United States Patent Application Publication US 2018/0126003 A1 - sequence listing, part 187

SEQ ID NO: 334069 - DNA, 3643 bp, Artificial Sequence
  derived and/or modified sequence
gatgaccgtgcccatcagcatcaccaaccctgacctgctgaggcacagcacagagctcttcatggacagcggcttctccccactgtgccagcgcatgggagccatggtagccttcaggagattcgaggacttcaccagaaattttgatgaagtcatctcttgcttcgccaacgtgcccaaagacacccccctcttcagcgaggcccgcacctccctatactccgaggatgactgcaagagcctcagagaagagcccatccacattctgaatgtgtccatccagtgtgcagaccacctggaggatgaggcactggtgccgattttacggacattcgtacagtccaagaaaaatatccttgtggattatggactccgacgaatcacattcttgattgcccaagagaaagaatttcccaagtttttcacattcagagcaagagatgagtttgcagaagatcgcatttaccgtcacttggaacctgccctggccttccagctggaacttaaccggatgcgtaacttcgatctgaccgccgtgccctgtgccaaccacaagatgcacctttacctgggtgctgccaaggtgaaggaaggtgtggaagtgacggaccataggttcttcatccgcgccatcatcaggcactctgacctgatcacaaaggaagcctccttcgaatacctgcagaacgagggtgagcggctgctcctggaggccatggacgagctggaggtggcgttcaataacaccagcgtgcgcaccgactgcaaccacatcttcctcaacttcgtgcccactgtcatcatggaccccttcaagatcgaggagtccgtgcgctacatggttatgcgctacggcagccggctgtggaaactccgtgtgctacaggctgaggtcaagatcaacatccgccagaccaccaccggcagtgccgttcccatccgcctgttcatcaccaatgagtcgggctactacctggacatcagcctctacaaagaagtgactgactccagatctggaaatatcatgtttcactccttcggcaacaagcaagggccccagcacgggatgctgatcaatactccctacgtcaccaaggatctgctccaggccaagcgattccaggcccagaccctgggaaccacctacatctatgacttcccggaaatgttcaggcaggctctctttaaactgtggggctccccagacaagtatcccaaagacatcctgacatacactgaattagtgttggactctcagggccagctggtggagatgaaccgacttcctggtggaaatgaggtgggcatggtggccttcaaaatgaggtttaagacccaggagtacccggaaggacgggatgtgatcgtcatcggcaatgacatcacctttcgcattggatcctttggccctggagaggaccttctgtacctgcgggcatccgagatggcccgggcagagggcattcccaaaatttacgtggcagccaacagtggcgcccgtattggcatggcagaggagatcaaacacatgttccacgtggcttgggtggacccagaagacccccacaaaggatttaaatacctgtacctgactccccaagactacaccagaatcagctccctgaactccgtccactgtaaacacatcgaggaaggaggagagtccagatacatgatcacggatatcatcgggaaggatgatggcttgggcgtggagaatctgaggggctcaggcatgattgctggggagtcctctctggcttacgaagagatcgtcaccattagcttggtgacctgccgagccattgggattggggcctacttggtgaggctgggccagcgagtgatccaggtggagaattcccacatcatcctcacaggagcaagtgctctcaacaaggtcctgggaagagaggtctacacatccaacaaccagctgggtggcgttcagatcatgcattacaatggtgtctcccacatcaccgtgccagatgactttgagggggtttataccatcctggagtggctgtcctatatgccaaaggataatcacagccctgtccctatcatcacacccactgaccccattgacagagaaattgaattcctcccatccagagctccctacgacccccggtggatgcttgcaggaaggcctcacccaactctgaagggaacgtggcagagcggattctttgaccacggcagtttcaaggaaatcatggcaccctgggcgcagaccgtggtgacaggacgagcaaggcttggggggattcccgtgggagtgattgctgtggagacacggactgtggaggtggcagtccctgcagaccctgccaacctggattctgaggccaagataattcagcaggcaggacaggtgtggttcccagactcagcctacaaaaccgcccaggccgtcaaggacttcaaccgggagaagttgcccctgatgatctttgccaactggagggggttctccggtggcatgaaagggtgcctggggacctggagagatgtgtcttggtggaagataagggccatgttgcccatgcacattggggaaggatcagtgtgactacatgtatgaccaggtgctgaagtttggagcctacatcgtggacggccttagacaatacaaacagcccatcctgatctatatcccgccctatgcggagctccggggaggctcctgggtggtcatagatgccaccatcaacccgctgtgcatagaaatgtatgcagacaaagagagcaggggtggtgttctggaaccagaggggacagtggagattaagttccgaaagaaagatctgataaagtccatgagaaggatcgatccagcttacaagaagctcatggaacagctaggggaacctgatctctccgacaaggaccgaaaggacctggagggccggctaaaggctcgcgaggacctgctgctccccatctaccaccaggtggcggtgcagttcgccgacttccatgacacacccggccggatgctggagaagggcgtcatatctgacatcctggagtggaagaccgcacgcaccttcctgtattggcgtctgcgccgcctcctcctggaggaccaggtcaagcaggagatcctgcaggccagcggggagctgagtcacgtgcatatccagtccatgctgcgtcgctggttcgtggagacggagggggctgtcaaggcctacttgtgggacaacaaccaggtggttgtgcagtggctggaacagcactggcaggcaggggatggcccgcgctccaccatccgtgagaacatcacgtacctgaagcacgactctgtcctcaagaccatccgaggcctggttgaagaaaaccccgaggtggccgtggactgtgtgatatacctgagccagcacatcagcccagctgagcgggcgcaggtcgttcacctgctgtctaccatggacagcccggcctccacctgaccgtggcccgcccagccactcccgggaccacggcaaaaggaaccacccagacccaccacccgtacaccctcagcagaccctgaagacttgcttttaaacaaagaaaatcctgggcacttctgcagggctgctggttccgagctgacacccgtcttaacaaaaggcccaggagtgcctcttcc

SEQ ID NO: 334070 - DNA, 5070 bp, Artificial Sequence
  derived and/or modified sequence
ctgcccttcctgctgaagcccccccagaccctgcccagccccgacgccatgttcagaacctgcatgaccgacttcctgcacagcctggagagaggccaggtgctgcccgccgacagcctgctgaacctggtggacgtggagctgatctacggcggcgtgaagtacatcctgaaggtggccagacagagcctgaccatgttcgtgctgatcatgaacggctgccacatcgagatcgacgcccacagactgaacgacggcggcctgctgctgagctacaacggcaacagctacaccacctacatgaaggaggaggtggacagctacagaatcaccatcggcaacaagacctgcgtgttcgagaaggagaacgaccccaccgtgctgagaagccccagcgccggcaagctgacccagtacaccgtggaggacggcggccacgtggaggccggcagcagctacgccgagatggaggtgatgaagatgatcatgaccctgaacgtgcaggagagaggcagagtgaagtacatcaagagacccggcgccgtgctggaggccggctgcgtggtggccagactggagctggacgaccccagcaaggtgcaccccgccgagcccttcaccggcgagctgcccgcccagcagaccctgcccatcctgggcgagaagctgcaccaggtgttccacagcgtgctggagaacctgaccaacgtgatgagcggcttctgcctgcccgagcccgtgttcagcatcaagctgaaggagtgggtgcagaagctgatgatgaccctgagacaccccagcctgcccctgctggagctgcaggagatcatgaccagcgtggccggcagaatccccgcccccgtggagaagagcgtgagaagagtgatggcccagtacgccagcaacatcaccagcgtgctgtgccagttccccagccagcagatcgccaccatcctggactgccacgccgccaccctgcagagaaaggccgacagagaggtgttcttcatcaacacccagagcatcgtgcagctggtgcagagatacagaagcggcatcagaggctacatgaagaccgtggtgctggacctgctgagaagatacctgagagtggagcaccacttccagcaggcccactacgacaagtgcgtgatcaacctgagagagcagttcaagcccgacatgagccaggtgctggactgcatcttcagccacgcccaggtggccaagaagaaccagctggtgatcatgctgatcgacgagctgtgcggccccgaccccagcctgagcgacgagctgatcagcatcctgaacgagctgacccagctgagcaagagcgagcactgcaaggtggccctgagagccagacagatcctgatcgccagccacctgcccagctacgagctgagacacaaccaggtggagagcatcttcctgagcgccatcgacatgtacggccaccagttctgccccgagaacctgaagaagctgatcctgagcgagaccaccatcttcgacgtgctgcccaccttcttctaccacgccaacaaggtggtgtgcatggccagcctggaggtgtacgtgagaagaggctacatcgcctacgagctgaacagcctgcagcacagacagctgcccgacggcacctgcgtggtggagttccagttcatgctgcccagcagccaccccaacagaatgaccgtgcccatcagcatcaccaaccccgacctgctgagacacagcaccgagctgttcatggacagcggcttcagccccctgtgccagagaatgggcgccatggtggccttcagaagattcgaggacttcaccagaaacttcgacgaggtgatcagctgcttcgccaacgtgcccaaggacacccccctgttcagcgaggccagaaccagcctgtacagcgaggacgactgcaagagcctgagagaggagcccatccacatcctgaacgtgagcatccagtgcgccgaccacctggaggacgaggccctggtgcccatcctgagaaccttcgtgcagagcaagaagaacatcctggtggactacggcctgagaagaatcaccttcctgatcgcccaggagaaggagttccccaagttcttcaccttcagagccagagacgagttcgccgaggacagaatctacagacacctggagcccgccctggccttccagctggagctgaacagaatgagaaacttcgacctgaccgccgtgccctgcgccaaccacaagatgcacctgtacctgggcgccgccaaggtgaaggagggcgtggaggtgaccgaccacagattcttcatcagagccatcatcagacacagcgacctgatcaccaaggaggccagcttcgagtacctgcagaacgagggcgagagactgctgctggaggccatggacgagctggaggtggccttcaacaacaccagcgtgagaaccgactgcaaccacatcttcctgaacttcgtgcccaccgtgatcatggaccccttcaagatcgaggagagcgtgagatacatggtgatgagatacggcagcagactgtggaagctgagagtgctgcaggccgaggtgaagatcaacatcagacagaccaccaccggcagcgccgtgcccatcagactgttcatcaccaacgagagcggctactacctggacatcagcctgtacaaggaggtgaccgacagcagaagcggcaacatcatgttccacagcttcggcaacaagcagggcccccagcacggcatgctgatcaacaccccctacgtgaccaaggacctgctgcaggccaagagattccaggcccagaccctgggcaccacctacatctacgacttccccgagatgttcagacaggccctgttcaagctgtggggcagccccgacaagtaccccaaggacatcctgacctacaccgagctggtgctggacagccagggccagctggtggagatgaacagactgcccggcggcaacgaggtgggcatggtggccttcaagatgagattcaagacccaggagtaccccgagggcagagacgtgatcgtgatcggcaacgacatcaccttcagaatcggcagcttcggccccggcgaggacctgctgtacctgagagccagcgagatggccagagccgagggcatccccaagatctacgtggccgccaacagcggcgccagaatcggcatggccgaggagatcaagcacatgttccacgtggcctgggtggaccccgaggacccccacaagggcttcaagtacctgtacctgaccccccaggactacaccagaatcagcagcctgaacagcgtgcactgcaagcacatcgaggagggcggcgagagcagatacatgatcaccgacatcatcggcaaggacgacggcctgggcgtggagaacctgagaggcagcggcatgatcgccggcgagagcagcctggcctacgaggagatcgtgaccatcagcctggtgacctgcagagccatcggcatcggcgcctacctggtgagactgggccagagagtgatccaggtggagaacagccacatcatcctgaccggcgccagcgccctgaacaaggtgctgggcagagaggtgtacaccagcaacaaccagctgggcggcgtgcagatcatgcactacaacggcgtgagccacatcaccgtgcccgacgacttcgagggcgtgtacaccatcctggagtggctgagctacatgcccaaggacaaccacagccccgtgcccatcatcacccccaccgaccccatcgacagagagatcgagttcctgcccagcagagccccctacgaccccagatggatgctggccggcagaccccaccccaccctgaagggcacctggcagagcggcttcttcgaccacggcagcttcaaggagatcatggccccctgggcccagaccgtggtgaccggcagagccagactgggcggcatccccgtgggcgtgatcgccgtggagaccagaaccgtggaggtggccgtgcccgccgaccccgccaacctggacagcgaggccaagatcatccagcaggccggccaggtgtggttccccgacagcgcctacaagaccgcccaggccgtgaaggacttcaacagagagaagctgcccctgatgatcttcgccaactggagaggcttcagcggcggcatgaaggacatgtacgaccaggtgctgaagttcggcgcctacatcgtggacggcctgagacagtacaagcagcccatcctgatctacatccccccctacgccgagctgagaggcggcagctgggtggtgatcgacgccaccatcaaccccctgtgcatcgagatgtacgccgacaaggagagcagaggcggcgtgctggagcccgagggcaccgtggagatcaagttcagaaagaaggacctgatcaagagcatgagaagaatcgaccccgcctacaagaagctgatggagcagctgggcgagcccgacctgagcgacaaggacagaaaggacctggagggcagactgaaggccagagaggacctgctgctgcccatctaccaccaggtggccgtgcagttcgccgacttccacgacacccccggcagaatgctggagaagggcgtgatcagcgacatcctggagtggaagaccgccagaaccttcctgtactggagactgagaagactgctgctggaggaccaggtgaagcaggagatcctgcaggccagcggcgagctgagccacgtgcacatccagagcatgctgagaagatggttcgtggagaccgagggcgccgtgaaggcctacctgtgggacaacaaccaggtggtggtgcagtggctggagcagcactggcaggccggcgacggccccagaagcaccatcagagagaacatcacctacctgaagcacgacagcgtgctgaagaccatcagaggcctggtggaggagaaccccgaggtggccgtggactgcgtgatctacctgagccagcacatcagccccgccgagagagcccaggtggtgcacctgctgagcaccatggacagccccgccagcacctag

SEQ ID NO: 334071 - DNA, 2577 bp, Artificial Sequence
  derived and/or modified sequence
atgaccgtgcccatcagcatcaccaaccccgacctgctgagacacagcaccgagctgttcatggacagcggcttcagccccctgtgccagagaatgggcgccatggtggccttcagaagattcgaggacttcaccagaaacttcgacgaggtgatcagctgcttcgccaacgtgcccaaggacacccccctgttcagcgaggccagaaccagcctgtacagcgaggacgactgcaagagcctgagagaggagcccatccacatcctgaacgtgagcatccagtgcgccgaccacctggaggacgaggccctggtgcccatcctgagaaccttcgtgcagagcaagaagaacatcctggtggactacggcctgagaagaatcaccttcctgatcgcccaggagaaggagttccccaagttcttcaccttcagagccagagacgagttcgccgaggacagaatctacagacacctggagcccgccctggccttccagctggagctgaacagaatgagaaacttcgacctgaccgccgtgccctgcgccaaccacaagatgcacctgtacctgggcgccgccaaggtgaaggagggcgtggaggtgaccgaccacagattcttcatcagagccatcatcagacacagcgacctgatcaccaaggaggccagcttcgagtacctgcagaacgagggcgagagactgctgctggaggccatggacgagctggaggtggccttcaacaacaccagcgtgagaaccgactgcaaccacatcttcctgaacttcgtgcccaccgtgatcatggaccccttcaagatcgaggagagcgtgagatacatggtgatgagatacggcagcagactgtggaagctgagagtgctgcaggccgaggtgaagatcaacatcagacagaccaccaccggcagcgccgtgcccatcagactgttcatcaccaacgagagcggctactacctggacatcagcctgtacaaggaggtgaccgacagcagaagcggcaacatcatgttccacagcttcggcaacaagcagggcccccagcacggcatgctgatcaacaccccctacgtgaccaaggacctgctgcaggccaagagattccaggcccagaccctgggcaccacctacatctacgacttccccgagatgttcagacaggccctgttcaagctgtggggcagccccgacaagtaccccaaggacatcctgacctacaccgagctggtgctggacagccagggccagctggtggagatgaacagactgcccggcggcaacgaggtgggcatggtggccttcaagatgagattcaagacccaggagtaccccgagggcagagacgtgatcgtgatcggcaacgacatcaccttcagaatcggcagcttcggccccggcgaggacctgctgtacctgagagccagcgagatggccagagccgagggcatccccaagatctacgtggccgccaacagcggcgccagaatcggcatggccgaggagatcaagcacatgttccacgtggcctgggtggaccccgaggacccccacaagggcttcaagtacctgtacctgaccccccaggactacaccagaatcagcagcctgaacagcgtgcactgcaagcacatcgaggagggcggcgagagcagatacatgatcaccgacatcatcggcaaggacgacggcctgggcgtggagaacctgagaggcagcggcatgatcgccggcgagagcagcctggcctacgaggagatcgtgaccatcagcctggtgacctgcagagccatcggcatcggcgcctacctggtgagactgggccagagagtgatccaggtggagaacagccacatcatcctgaccggcgccagcgccctgaacaaggtgctgggcagagaggtgtacaccagcaacaaccagctgggcggcgtgcagatcatgcactacaacggcgtgagccacatcaccgtgcccgacgacttcgagggcgtgtacaccatcctggagtggctgagctacatgcccaaggacaaccacagccccgtgcccatcatcacccccaccgaccccatcgacagagagatcgagttcctgcccagcagagccccctacgaccccagatggatgctggccggcagaccccaccccaccctgaagggcacctggcagagcggcttcttcgaccacggcagcttcaaggagatcatggccccctgggcccagaccgtggtgaccggcagagccagactgggcggcatccccgtgggcgtgatcgccgtggagaccagaaccgtggaggtggccgtgcccgccgaccccgccaacctggacagcgaggccaagatcatccagcaggccggccaggtgtggttccccgacagcgcctacaagaccgcccaggccgtgaaggacttcaacagagagaagctgcccctgatgatcttcgccaactggagaggcttcagcggcggcatgaagggctgcctgggcacctggagagacgtgagctggtggaagatcagagccatgctgcccatgcacatcggcgagggcagcgtgtag

SEQ ID NO: 334072 - DNA, 432 bp, Artificial Sequence
  derived and/or modified sequence
atgacagatagtaaacctatcacaaagtccaagtccgaagctaaccttatcccctcccaggagcccttccccgccagtgataatagtggagagaccccgcagcgcaatggggagggacatactctgcccaagaccccgagtcaagcagagccggcttcccataaaggcccgaaagacgccggtaggcgccgcaatagtcttccaccttctcatcagaaaccccctaggaatcccctgtccagcagcgacgctgcacccagtccagagctccaggcaaacggtacaggtactcaaggcctggaagccactgacaccaatgggttatcatcgtccgccaggccacaggggcaacaggcgggtagcccttctaaagaggacaaaaaacaggcgaacatcaagcgccagctcatgacgaactttatccttggctag

SEQ ID NO: 334073 - DNA, 432 bp, Artificial Sequence
  derived and/or modified sequence
atgacagacagcaagcccatcaccaagagcaagtctgaggccaacctgatccccagccaggagcccttccctgccagtgacaacagcggggagaccccccagagaaatggagagggccacaccctgcccaagacccccagccaggccgagcccgccagccacaagggccccaaggatgctggaagaagaagaaacagcctgccccccagccaccagaagccacccaggaaccccctgagcagcagtgatgctgcccccagccctgagctgcaggccaatggaacaggcacccagggcctggaggccacagacaccaacggcctgagcagcagcgcccggccccagggccagcaggccggcagccccagcaaagaagacaagaagcaggccaacatcaagaggcagctgatgaccaacttcatcctgggctag

SEQ ID NO: 334074 - DNA, 432 bp, Artificial Sequence
  derived and/or modified sequence
atgaccgacagcaagcccatcaccaagagcaagagcgaggccaacttaatcccaagccaggaaccatttcccgcttctgacaattcaggagaaaccccccagaggaacggcgagggccacacactaccaaaaacccctagtcaagctgaaccagcctctcacaagggccccaaagatgccgggcgccgaagaaactcattacctccctcacaccagaaaccacctcggaaccccttgtctagcagcgacgccgcaccctctccagagcttcaggccaatggaacaggaactcaaggcctggaggctaccgacacgaacggactcagttctagtgcccgtccccagggtcaacaggctggatctcccagcaaagaagataagaaacaggccaacataaaacgacagctcatgaccaacttcatcttggggtag

SEQ ID NO: 334075 - DNA, 432 bp, Artificial Sequence
  derived and/or modified sequence
atgacggactctaagccgatcaccaaatcaaagtctgaggctaatcttatccctagtcaagaaccctttcctgcatcagacaactccggcgagacaccccagaggaacggcgagggtcacactctcccaaagacgccttcccaggctgaacctgcctcccacaaaggaccaaaagacgccggaagaaggagaaattccttgcctccttcacaccaaaaacccccaaggaacccactttctagttctgacgccgcaccatcaccagagctccaggcaaatgggactggtactcaaggactggaggccactgacaccaacggactctcaagcagcgcacgaccccagggtcagcaggcagggagtccctccaaagaagataaaaaacaggcaaacatcaagcgccaactcatgacaaactttatcctgggctag

SEQ ID NO: 334076 - DNA, 583 bp, Artificial Sequence
  derived and/or modified sequence
cttagtcaccctgtgggcgcctgtcagcctcactcaagaatggagctggtggctgcatccccagtgacgattttctgaatggtcttgcttctttgtctatcttgtctgattttctcctgtctgaccttttcctggttaaaaatctgggggaaaatgacggactccaagccgatcaccaagagtaaatcagaagcaaacctcatcccgagccaggagccctttccagcctctgataactcaggggagacaccgcagagaaatggggagggccacactctgcccaagacacccagccaggccgagccagcctcccacaaaggccccaaagatgccggtcggcggagaaactccctaccaccctcccaccagaagcccccaagaaaccccctttcttccagtgacgcagcaccctccccagagcttcaagccaacgggactgggacacaaggtctggaggccacagataccaatggcctgtcctcctcagccaggccccagggccagcaagctggctccccctccaaagaagacaagaagcaggcaaacatcaagaggcagctgatgaccaacttcatcctgggct

SEQ ID NO: 334077 - DNA, 432 bp, Artificial Sequence
  derived and/or modified sequence
atgaccgacagcaagcccatcaccaagagcaagagcgaggccaacctgatccccagccaggagcccttccccgccagcgacaacagcggcgagaccccccagagaaacggcgagggccacaccctgcccaagacccccagccaggccgagcccgccagccacaagggccccaaggacgccggcagaagaagaaacagcctgccccccagccaccagaagccccccagaaaccccctgagcagcagcgacgccgcccccagccccgagctgcaggccaacggcaccggcacccagggcctggaggccaccgacaccaacggcctgagcagcagcgccagaccccagggccagcaggccggcagccccagcaaggaggacaagaagcaggccaacatcaagagacagctgatgaccaacttcatcctgggctag

SEQ ID NO: 334078 - protein, 159 aa, Artificial Sequence
  derived and/or modified sequence
MAGLTRFALELVTEKGHTFAEELQKIQCTLQDVGSALATPCSSAREAHLKYTTFKAGPILELEQWIDKYTSQLPPLTAFILPSGGKISSALHFCRAVCRRAERRVVPLVQMGETDANVAKFLNRLSDYLFTLARYAAMKEGNQEKIYMKNDPSAESEGL

SEQ ID NO: 334079 - DNA, 480 bp, Artificial Sequence
  derived and/or modified sequence
atggctggccttactagattcgccttggaacttgttacagaaaagggacacaccttcgctgaggagttgcagaaaatccaatgtaccctgcaagacgttggtagtgctctggcaacaccatgcagttccgccagagaagcgcatctgaagtataccactttcaaagccgggccaatactggaattagagcagtggattgataaatacacttcccagctgccccctcttaccgctttcatactgccttccggcggaaagattagtagcgccctgcatttctgccgagctgtctgtcgtcgcgctgaaaggagagtggttcccctggtgcagatgggcgaaacagatgccaatgtggccaaatttctgaatagattgagcgactacttgttcacactggctcgctatgccgcaatgaaggaagggaatcaagaaaaaatctatatgaagaatgatccctcagccgaatccgagggcctttag

SEQ ID NO: 334080 - DNA, 480 bp, Artificial Sequence
  derived and/or modified sequence
atggccggcctgaccaggtttgccctggagctggtgacagagaagggccacacctttgctgaggagctgcagaagatccagtgcaccctgcaggatgtgggcagcgccctggccaccccctgcagcagcgcccgggaggcccacctgaagtacaccaccttcaaggccggccccatcctggagctggagcagtggattgacaagtacaccagccagctgccccccctgacagccttcatcctgcccagcggcggcaagatcagcagcgccctgcacttctgcagagctgtgtgcagaagagctgagaggagagtggtgcccctggtgcagatgggagaaacagatgccaacgtggccaagttcctgaaccggctgagtgactacctgttcaccctggcccgctatgctgccatgaaggagggcaaccaggagaagatctacatgaagaatgaccccagcgctgagagcgagggcctgtag

SEQ ID NO: 334081 - DNA, 1174 bp, Artificial Sequence
  derived and/or modified sequence
aggtcccgtcaagcagcctggctcatggctgtgtgcggcctggggagccgtcttggcctggggagccgtcttggcctgcgcgggtgcttcggcgccgccaggctcctgtatccccgtttccagagccgcggccctcagggcgtggaagacggggacaggccacagccttcctcgaagacacccaggatccccaagatttacaccaaaacgggagacaaagggttttctagtaccttcacaggagaaaggagacccaaagatgaccaagtgtttgaagccgtgggaactacagatgaattaagttcagctattggacggagtttcgcgcttgttgcccagactggagtgcaatggtgtgatctcggctcactgcaacctctgcctcccgggttcaagcgagtctcctcattattactattcttaacacttacctgttcctggctaccatttctccatggcgggcctgactaggtttgctctggaattagtcacagaaaagggccatacatttgccgaagagcttcagaaaatccagtgcacattgcaggacgtcggctcggccctggcgacaccatgctcctcggcccgggaggctcacttaaagtataccacgttcaaggcggggcccatcctggagctggagcagtggatcgacaagtacaccagccagctcccaccactcacggccttcatcctgccttcgggaggcaagatcagctcggcgctgcatttctgccgggccgtgtgccgccgggccgagagacgtgtggtgcctcttgtccagatgggagagaccgatgcgaacgtggccaagttcttaaacagactcagtgactatctcttcacgctagccagatatgcagccatgaaggaggggaatcaagagaaaatatacatgaaaaatgacccatcggccgagtctgagggactctgaaatcacagaaagtgggagcttggaggatccctccatggcgatggccgtggagagaggagcttgcccttctggggtcctggttcctgaagagctcacccagagaggctcaaagcagccttttgtcccagctcagctttgatctacacctcttgccaccttcctcaagggactgtgaccctttggggattctgtccctgaccctgcttccccaagctctcctgggtcttggagggatgtggg

SEQ ID NO: 334082 - DNA, 480 bp, Artificial Sequence
  derived and/or modified sequence
atggccggcctgacccggttcgccctggagctggtgaccgagaagggtcatacctttgccgaggaacttcagaaaatccaatgcacactccaggatgttgggagcgctcttgcgacgccctgttcttccgcccgcgaagcccaccttaagtacaccactttcaaggccggcccaattcttgagttagaacagtggatcgacaagtatactagccagctccccccgctgactgcatttatccttccttcagggggaaaaatttctagtgcgcttcacttctgccgggcagtttgtaggcgcgcagagaggcgcgttgtaccactcgtacagatgggcgaaacagacgcaaacgtggccaaattcctgaacaggctttccgattacctgtttacgctcgccagatacgcagcaatgaaagagggtaatcaagagaaaatctatatgaagaatgaccccagcgctgaaagcgagggactttag

SEQ ID NO: 334083 - DNA, 480 bp, Artificial Sequence
  derived and/or modified sequence
atggctgggctcaccaggttcgctctggaattagtgacagaaaaaggtcacaccttcgctgaggagcttcagaagattcagtgcacactacaggacgtcggctcagcgttggccacaccctgctcgagcgctcgtgaggcgcacctaaagtacacaacttttaaagccggaccaatactggagttggagcagtggatcgacaagtacacctcacagctcccgccactgactgctttcattctcccctccggtgggaaaatcagcagtgcccttcacttctgccgcgctgtgtgtcgcagggcagagcggagagttgtgccactggtgcagatgggcgagaccgatgcaaacgttgccaaattcctcaatagactttctgactacctctttactctagcaagatacgccgcaatgaaagagggcaaccaggaaaagatttatatgaagaatgatcctagtgcagaatccgagggtctgtag

SEQ ID NO: 334084 - DNA, 480 bp, Artificial Sequence
  derived and/or modified sequence
atggccggcctgaccagattcgccctggagctggtgaccgagaagggccacaccttcgccgaggagctgcagaagatccagtgcaccctgcaggacgtgggcagcgccctggccaccccctgcagcagcgccagagaggcccacctgaagtacaccaccttcaaggccggccccatcctggagctggagcagtggatcgacaagtacaccagccagctgccccccctgaccgccttcatcctgcccagcggcggcaagatcagcagcgccctgcacttctgcagagccgtgtgcagaagagccgagagaagagtggtgcccctggtgcagatgggcgagaccgacgccaacgtggccaagttcctgaacagactgagcgactacctgttcaccctggccagatacgccgccatgaaggagggcaaccaggagaagatctacatgaagaacgaccccagcgccgagagcgagggcctgtag

SEQ ID NO: 334085 - protein, 991 aa, Artificial Sequence
  derived and/or modified sequence
MAGARSRDPWGASGICYLFGSLLVELLFSRAVAFNLDVMGALRKEGEPGSLFGFSVALHRQLQPRPQSWLLVGAPQALALPGQQANRTGGLFACPLSLEETDCYRVDIDQGADMQKESKENQWLGVSVRSQGPGGKIVTCAHRYEARQRVDQILETRDMIGRCFVLSQDLAIRDELDGGEWKFCEGRPQGHEQFGFCQQGTAAAFSPDSHYLLFGAPGTYNWKGTARVELCAQGSADLAHLDDGPYEAGGEKEQDPRLIPVPANSYFGLLFVTNIDSSDPDQLVYKTLDPADRLPGPAGDLALNSYLGFSIDSGKGLVRAEELSFVAGAPRANHKGAVVILRKDSASRLVPEVMLSGERLTSGFGYSLAVADLNSDGWPDLIVGAPYFFERQEELGGAVYVYLNQGGHWAGISPLRLCGSPDSMFGISLAVLGDLNQDGFPDIAVGAPFDGDGKVFIYHGSSLGVVAKPSQVLEGEAVGIKSFGYSLSGSLDMDGNQYPDLLVGSLADTAVLFRARPILHVSHEVSIAPRSIDLEQPNCAGGHSVCVDLRVCFSYIAVPSSYSPTVALDYVLDADTDRRLRGQVPRVTFLSRNLEEPKHQALDPAEKPLCLSNENASHVECELGNPMKRGAQVTFYLILSTSGISIETTELEVELLLATISEQELHPVSARARVFIELPLSIAGMAIPQQLFFSGVVRGERAMQSERDVGSKVKYEVTVSNQGQSLRTLGSAFLNIMWPHEIANGKWLLYPMQVELEGGQGPGQKGLCSPRPNILHLDVDSRDRRRRELEPPEQQEPGERQEPSMSWWPVSSAEKKKNITLDCARGTANCVVFSCPLYSFDRAAVLHVWGRLWNSTFLEEYSAVKSLEVIVRANITVKSSIKNLMLRDASTVIPVMVYLDPMAVVAEGVPWWVILLAVLAGLLVLALLVLLLWKCGFFHRSSQSSSFPTNYHRACLAVQPSAMEVGGPGTVGWDSSNGRSTPRPPCPSTMR

SEQ ID NO: 334086 - DNA, 2976 bp, Artificial Sequence
  derived and/or modified sequence
atggccggcgccagaagcagagacccctggggcgccagcggcatctgctacctgttcggcagcctgctggtggagctgctgttcagcagagccgtggccttcaacctggacgtgatgggcgccctgagaaaggagggcgagcccggcagcctgttcggcttcagcgtggccctgcacagacagctgcagcccagaccccagagctggctgctggtgggcgccccccaggccctggccctgcccggccagcaggccaacagaaccggcggcctgttcgcctgccccctgagcctggaggagaccgactgctacagagtggacatcgaccagggcgccgacatgcagaaggagagcaaggagaaccagtggctgggcgtgagcgtgagaagccagggccccggcggcaagatcgtgacctgcgcccacagatacgaggccagacagagagtggaccagatcctggagaccagagacatgatcggcagatgcttcgtgctgagccaggacctggccatcagagacgagctggacggcggcgagtggaagttctgcgagggcagaccccagggccacgagcagttcggcttctgccagcagggcaccgccgccgccttcagccccgacagccactacctgctgttcggcgcccccggcacctacaactggaagggcaccgccagagtggagctgtgcgcccagggcagcgccgacctggcccacctggacgacggcccctacgaggccggcggcgagaaggagcaggaccccagactgatccccgtgcccgccaacagctacttcggcctgctgttcgtgaccaacatcgacagcagcgaccccgaccagctggtgtacaagaccctggaccccgccgacagactgcccggccccgccggcgacctggccctgaacagctacctgggcttcagcatcgacagcggcaagggcctggtgagagccgaggagctgagcttcgtggccggcgcccccagagccaaccacaagggcgccgtggtgatcctgagaaaggacagcgccagcagactggtgcccgaggtgatgctgagcggcgagagactgaccagcggcttcggctacagcctggccgtggccgacctgaacagcgacggctggcccgacctgatcgtgggcgccccctacttcttcgagagacaggaggagctgggcggcgccgtgtacgtgtacctgaaccagggcggccactgggccggcatcagccccctgagactgtgcggcagccccgacagcatgttcggcatcagcctggccgtgctgggcgacctgaaccaggacggcttccccgacatcgccgtgggcgcccccttcgacggcgacggcaaggtgttcatctaccacggcagcagcctgggcgtggtggccaagcccagccaggtgctggagggcgaggccgtgggcatcaagagcttcggctacagcctgagcggcagcctggacatggacggcaaccagtaccccgacctgctggtgggcagcctggccgacaccgccgtgctgttcagagccagacccatcctgcacgtgagccacgaggtgagcatcgcccccagaagcatcgacctggagcagcccaactgcgccggcggccacagcgtgtgcgtggacctgagagtgtgcttcagctacatcgccgtgcccagcagctacagccccaccgtggccctggactacgtgctggacgccgacaccgacagaagactgagaggccaggtgcccagagtgaccttcctgagcagaaacctggaggagcccaagcaccaggccctggaccccgccgagaagcccctgtgcctgagcaacgagaacgccagccacgtggagtgcgagctgggcaaccccatgaagagaggcgcccaggtgaccttctacctgatcctgagcaccagcggcatcagcatcgagaccaccgagctggaggtggagctgctgctggccaccatcagcgagcaggagctgcaccccgtgagcgccagagccagagtgttcatcgagctgcccctgagcatcgccggcatggccatcccccagcagctgttcttcagcggcgtggtgagaggcgagagagccatgcagagcgagagagacgtgggcagcaaggtgaagtacgaggtgaccgtgagcaaccagggccagagcctgagaaccctgggcagcgccttcctgaacatcatgtggccccacgagatcgccaacggcaagtggctgctgtaccccatgcaggtggagctggagggcggccagggccccggccagaagggcctgtgcagccccagacccaacatcctgcacctggacgtggacagcagagacagaagaagaagagagctggagccccccgagcagcaggagcccggcgagagacaggagcccagcatgagctggtggcccgtgagcagcgccgagaagaagaagaacatcaccctggactgcgccagaggcaccgccaactgcgtggtgttcagctgccccctgtacagcttcgacagagccgccgtgctgcacgtgtggggcagactgtggaacagcaccttcctggaggagtacagcgccgtgaagagcctggaggtgatcgtgagagccaacatcaccgtgaagagcagcatcaagaacctgatgctgagagacgccagcaccgtgatccccgtgatggtgtacctggaccccatggccgtggtggccgagggcgtgccctggtgggtgatcctgctggccgtgctggccggcctgctggtgctggccctgctggtgctgctgctgtggaagtgcggcttcttccacagaagcagccagagcagcagcttccccaccaactaccacagagcctgcctggccgtgcagcccagcgccatggaggtgggcggccccggcaccgtgggctgggacagcagcaacggcagaagcacccccagacccccctgccccagcaccatgagatag

SEQ ID NO: 334087 - DNA, 2976 bp, Artificial Sequence
  derived and/or modified sequence
atggctggagctcgcagtcgggacccttggggcgcgtccggaatctgctacctttttggctccttgctggttgagctactgttcagcagggctgtcgcttttaatctcgatgtgatgggagctcttcgcaaagagggcgagcctgggtcactgttcggattctccgtcgcactgcaccggcaactgcagccaagacctcaatcctggctcctcgtcggtgctccacaggcgcttgctctgcctggacagcaggcaaaccgtaccggcggcttgtttgcctgtccccttagcctggaagaaactgattgttacagggtggatattgaccaaggagccgatatgcagaaggagtctaaggaaaaccagtggttgggagtgagcgtccgaagccagggccctggcggaaagatagtcacctgcgctcatagatacgaggctagacagcgagtggatcagattctggaaacaagggatatgatcggccggtgttttgtcctatcccaggacctggccattagagatgaacttgacgggggcgagtggaagttctgcgagggccgtcctcagggccacgagcagtttggcttctgccagcagggcactgcagcggctttctctcccgatagtcattatcttctgttcggagcccctgggacttacaattggaaggggaccgcacgagttgagttgtgcgctcagggatccgctgatctggctcacttggatgacggaccctacgaggcaggcggggaaaaggagcaagaccctcgacttatacctgtgccagcgaattcctactttggactcctcttcgtgaccaacatcgactccagtgaccccgatcagctggtctacaagacccttgacccagctgataggctcccaggccccgctggagatcttgccctgaatagctacctggggttttccattgatagtgggaagggccttgttagagccgaagaactgagctttgtagccggtgctccccgcgctaaccacaagggggctgtagttatactacggaaggattctgcaagcagactcgtgccggaggtcatgctgagtggcgaaaggctgacatcgggctttggatactctctagctgtggcagatctcaactctgatggatggcctgacctcatcgttggagcaccatatttcttcgagcggcaagaggagttgggtggggctgtgtacgtgtacctcaaccagggaggacactgggcagggatatcaccactccggctgtgtgggagtcctgatagcatgttcggtatctctctggccgtcctaggcgatcttaatcaggatgggtttcctgacattgcagtgggcgccccttttgacggggacgggaaggtgttcatctatcacggctctagcctgggagtggtggcgaagccctcccaggtgttggaaggcgaggcggtggggataaagagcttcgggtattccttatccggatccctggacatggatggaaaccaataccctgacctcctggtggggtccctggcagataccgctgtccttttccgtgcacgaccgattctccacgtgtcccatgaagtgtccatcgctcccaggagcatagacctggagcagcccaactgcgcgggcggtcatagtgtttgtgtagacctgcgcgtgtgcttctcctacatagcagtgccaagttcatactcccctaccgttgctctggactatgtgctggacgctgacaccgaccgccggctgcgagggcaagtgccacgggttacatttctcagccgcaacttagaggagccaaagcatcaggctctcgatccggcggaaaagccgttgtgtttgtccaacgagaatgcaagtcacgtcgagtgcgaacttgggaatccaatgaagcgtggggctcaggtaaccttctatctcattctgtccaccagcgggatcagcattgagactacggagcttgaagtggagctcttgctcgccaccattagcgagcaggagcttcaccctgtgtccgcccgagcccgggtatttatagaactgccccttagcattgccggaatggccatccctcagcagctgtttttctccggtgttgtgagaggagagcgcgctatgcagtccgagagagatgtcggctcgaaagtcaaatacgaagtcaccgtgagcaaccaggggcaatcgcttcggactctcgggagcgcgtttctgaatataatgtggccccatgagatcgcaaacggcaagtggctcctgtacccaatgcaggtggaattggagggcgggcagggccccgggcagaagggcctgtgttcccctaggccaaatatccttcatctggacgtcgatagtagggacaggagacgccgggagctcgaacctcccgagcaacaggagccaggtgaacggcaggagcctagcatgtcatggtggcctgtcagtagcgccgagaagaagaagaatataacactggactgcgcacgtggaacggcaaactgcgtcgtgttctcttgccccctgtattcttttgaccgcgctgctgtcttgcacgtctggggccgtctatggaattccacattcctcgaagaatattctgcagtcaaatccctggaagtaatcgtgagggcaaacatcacagtcaagagctcaatcaaaaacctgatgctgcgggacgcctcaacagtcatcccagtaatggtgtatctggacccaatggctgtggtcgccgagggcgtgccatggtgggtgattttgttggctgtgttagcaggtctgctcgtcttggcactgcttgttctgctgctctggaagtgtggcttcttccaccgctcctctcaaagcagctcatttcccactaactatcatcgcgcctgtttagctgtacaaccaagtgcaatggaggttggcggccctggcaccgttggctgggacagcagtaacggtcgctccactccaaggccgccctgccctagcaccatgcggtag

SEQ ID NO: 334088 - DNA, 2976 bp, Artificial Sequence
  derived and/or modified sequence
atggccggggcccggagccgggacccctggggcgccagcggcatctgctacctgtttggcagcctgctggtggagctgctcttcagcagagctgtggccttcaacctggatgtgatgggcgccctgaggaaggagggggagcccggcagcctgtttggcttctctgtggccctgcaccggcagctgcagccccggccccagagctggctgctggtgggcgccccccaggccctggccctgcccggccagcaggccaacagaactggaggcctgtttgcctgccccctgagcctggaggagacagactgctacagagtggacatcgaccagggcgctgacatgcagaaggagagcaaggagaaccagtggctgggcgtgtctgtgcgcagccagggccctgggggcaagatcgtgacctgtgcccacagatatgaggcccggcagagggtggaccagatcctggagacccgggacatgattggccgctgctttgtgctgagccaggacctggccatcagagatgagctggatggaggagagtggaagttctgtgagggccggccccagggccacgagcagtttggcttctgccagcagggcacagctgctgccttctccccagacagccactacctgctgtttggagcccctggcacctacaactggaagggcacagcccgggtggagctgtgtgcccagggcagcgctgacctggcccacctggatgatggcccctatgaggccggcggggagaaggagcaggaccccaggctcatccctgtgcctgccaacagctacttcggcctgctgtttgtgaccaacatcgacagcagtgaccctgaccagctggtgtacaagaccctggaccctgctgaccggctgcccggccctgctggggacctggccctgaacagctacctgggcttcagcattgattctgggaagggcctggtgcgggcagaggagctgagctttgtggccggggccccccgggccaaccacaagggagctgtggtgatcctgaggaaggacagcgccagccggctggtgcctgaggtgatgctgagcggggagcggctgaccagcggcttcggctacagcctggccgtggccgacctgaacagtgatggctggccagacctgattgtgggcgccccctacttctttgagcggcaggaggagctgggcggcgctgtgtatgtgtacctgaaccagggcggccactgggccggcatcagccccctgcggctgtgtggcagcccagacagcatgtttggcatcagcctggccgtgctgggggacctgaaccaggacggcttcccagacattgctgtgggcgccccctttgatggagatggcaaggtgttcatctaccacggcagcagcctgggcgtggtggccaagcccagccaggtgctggagggggaggccgtgggcatcaagagctttggctacagcctgagcggcagcctggacatggatggcaaccagtacccagacctgctggtgggcagcctggccgacacagctgtgctcttccgggcccggcccatcctgcacgtgtcccatgaggtgtccatcgcccccaggagcattgacctggagcagcccaactgtgccggcggccacagcgtgtgtgtggacctgcgggtgtgcttctcctacatcgctgtgcccagcagctacagccccaccgtggccctggactatgtgctggatgctgacacagaccggcggctgcggggccaggtgccccgggtgaccttcctgagcaggaacctggaggagcccaagcaccaggccctggaccctgctgagaagcccctgtgcctgagcaatgaaaatgccagccacgtggagtgtgagctgggcaaccccatgaagagaggagcccaggtgaccttctacctgatcctgagcaccagcggcatcagcattgagaccacagagctggaggtggagctgctgctggccaccatcagcgagcaggagctgcaccctgtgtctgcccgggcccgggtcttcatcgagctgcccctgagcattgctggcatggccatcccccagcagctgttcttcagcggcgtggtgcggggggagcgggccatgcagagcgagagagatgtgggcagcaaggtgaagtatgaggtgacagtgagcaaccagggccagagcctgcggaccctgggcagcgccttcctgaacatcatgtggccccatgagatcgccaacgggaagtggctgctgtaccccatgcaggtggagctggagggcggccagggccctggccagaagggcctgtgcagcccccggcccaacatcctgcacctggatgtggacagccgggacagaagaagaagagagctggagcccccagagcagcaggagcctggagagcggcaggagcccagcatgtcctggtggcctgtgagcagcgctgagaagaagaagaacatcaccctggactgtgcccggggcacagccaactgtgtggtgttcagctgccccctgtacagctttgacagagctgctgtgctgcacgtgtggggccgcctgtggaacagcaccttcctggaggagtacagcgctgtgaagagcctggaggtgattgtgcgggccaacatcaccgtgaagagcagcatcaagaacctgatgctgagagatgccagcaccgtcatccctgtgatggtgtacctggaccccatggctgtggtggccgagggcgtgccctggtgggtgatcctgctggccgtgctggccggcctgctggtgctggccctgctggtgctgctgctgtggaagtgtggcttcttccacaggagcagccagagcagcagcttccccaccaactaccaccgggcctgcctggccgtgcagcccagcgccatggaggtgggcggccctggcaccgtgggctgggacagcagcaatggccgcagcaccccccggcccccctgccccagcaccatgaggtag

SEQ ID NO: 334089 - DNA, 3835 bp, Artificial Sequence
  derived and/or modified sequence
gggcgccggagctgcggctgctgtagttgtcctagccggtgctggggcggcggggtggcggagcggcgggcgggcgggagggctggcggggcgaacgtctgggagacgtctgaaagaccaacgagactttggagaccagagacgcgcctggggggacctggggcttggggcgtgcgagatttcccttgcattcgctgggagctcgcgcagggatcgtcccatggccggggctcggagccgcgacccttggggggcctccgggatttgctacctttttggctccctgctcgtcgaactgctcttctcacgggctgtcgccttcaatctggacgtgatgggtgccttgcgcaaggagggcgagccaggcagcctcttcggcttctctgtggccctgcaccggcagttgcagccccgaccccagagctggctgctggtgggtgctccccaggccctggctcttcctgggcagcaggcgaatcgcactggaggcctcttcgcttgcccgttgagcctggaggagactgactgctacagagtggacatcgaccagggagctgatatgcaaaaggaaagcaaggagaaccagtggttgggagtcagtgttcggagccaggggcctgggggcaagattgttacctgtgcacaccgatatgaggcaaggcagcgagtggaccagatcctggagacgcgggatatgattggtcgctgctttgtgctcagccaggacctggccatccgggatgagttggatggtggggaatggaagttctgtgagggacgcccccaaggccatgaacaatttgggttctgccagcagggcacagctgccgccttctcccctgatagccactacctcctctttggggccccaggaacctataattggaagggcacggccagggtggagctctgtgcacagggctcagcggacctggcacacctggacgacggtccctacgaggcggggggagagaaggagcaggacccccgcctcatcccggtccctgccaacagctactttgggttgctttttgtgaccaacattgatagctcagaccccgaccagctggtgtataaaactttggaccctgctgaccggctcccaggaccagccggagacttggccctcaatagctacttaggcttctctattgactcggggaaaggtctggtgcgtgcagaagagctgagctttgtggctggagccccccgcgccaaccacaagggtgctgtggtcatcctgcgcaaggacagcgccagtcgcctggtgcccgaggttatgctgtctggggagcgcctgacctccggctttggctactcactggctgtggctgacctcaacagtgatggctggccagacctgatagtgggtgccccctacttctttgagcgccaagaagagctggggggtgctgtgtatgtgtacttgaaccaggggggtcactgggctgggatctcccctctccggctctgcggctcccctgactccatgttcgggatcagcctggctgtcctgggggacctcaaccaagatggctttccagatattgcagtgggtgccccctttgatggtgatgggaaagtcttcatctaccatgggagcagcctgggggttgtcgccaaaccttcacaggtgctggagggcgaggctgtgggcatcaagagcttcggctactccctgtcaggcagcttggatatggatgggaaccaataccctgacctgctggtgggctccctggctgacaccgcagtgctcttcagggccagacccatcctccatgtctcccatgaggtctctattgctccacgaagcatcgacctggagcagcccaactgtgctggcggccactcggtctgtgtggacctaagggtctgtttcagctacattgcagtccccagcagctatagccctactgtggccctggactatgtgttagatgcggacacagaccggaggctccggggccaggttccccgtgtgacgttcctgagccgtaacctggaagaacccaagcaccaggccctggaccctgcggagaagccactctgcctgtccaatgagaatgcctcccatgttgagtgtgagctggggaaccccatgaagagaggtgcccaggtcaccttctacctcatccttagcacctccgggatcagcattgagaccacggaactggaggtagagctgctgttggccacgatcagtgagcaggagctgcatccagtctctgcacgagcccgtgtcttcattgagctgccactgtccattgcaggaatggccattccccagcaactcttcttctctggtgtggtgaggggcgagagagccatgcagtctgagcgggatgtgggcagcaaggtcaagtatgaggtcacggtttccaaccaaggccagtcgctcagaaccctgggctctgccttcctcaacatcatgtggcctcatgagattgccaatgggaagtggttgctgtacccaatgcaggttgagctggagggcgggcaggggcctgggcagaaagggctttgctctcccaggcccaacatcctccacctggatgtggacagtagggataggaggcggcgggagctggagccacctgagcagcaggagcctggtgagcggcaggagcccagcatgtcctggtggccagtgtcctctgctgagaagaagaaaaacatcaccctggactgcgcccggggcacggccaactgtgtggtgttcagctgcccactctacagctttgaccgcgcggctgtgctgcatgtctggggccgtctctggaacagcacctttctggaggagtactcagctgtgaagtccctggaagtgattgtccgggccaacatcacagtgaagtcctccataaagaacttgatgctccgagatgcctccacagtgatcccagtgatggtatacttggaccccatggctgtggtggcagaaggagtgccctggtgggtcatcctcctggctgtactggctgggctgctggtgctagcactgctggtgctgctcctgtggaagtgtggcttcttccatcggagcagccagagctcatcttttcccaccaactatcaccgggcctgtctggctgtgcagccttcagccatggaagttgggggtccagggactgtgggatgggattcttcaaacgggcgaagcaccccgaggccaccgtgccccagtaccatgcggtgaagattcctcgggaagaccgacagcagttcaaggaggagaagacgggcaccatcctgaggaacaactggggcagcccccggcgggagggcccggatgcacaccccatcctggctgctgacgggcatcccgagctgggccccgatgggcatccagggccaggcaccgcctaggttcccatgtcccagcctggcctgtggctgccctccatcccttccccagagatggctccttgggatgaagagggtagagtgggctgctggtgtcgcatcaagatttggcaggatcggcttcctcaggggcacagacctctcccacccacaagaactcctcccacccaacttccccttagagtgctgtgagatgagagtgggtaaatcagggacagggccatggggtagggtgagaagggcaggggtgtcctgatgcaaaggtggggagaagggatcctaatcccttcctctcccattcaccctgtgtaacaggaccccaaggacctgcctccccggaagtgccttaacctagagggtcggggaggaggttgtgtcactgactcaggctgctccttctctagtttcccctctcatctgaccttagtttgctgccatcagtctagtggtttcgtggtttcgtctatttatt

SEQ ID NO: 334090 - DNA, 2976 bp, Artificial Sequence
  derived and/or modified sequence
atggccggcgcccggagccgggacccctggggcgccagcggcatctgctacctctttggcagtcttctggtcgaactgctgttctccagggccgtcgcattcaacttggacgtaatgggggcattacgtaaggaaggtgaacctggttccctattcggcttcagtgtggcactgcacagacagttgcagccccggccccagtcctggctcctggtgggggctccccaggccctcgccttgcccggacagcaagcgaatcggaccgggggtctatttgcttgcccgctgagtttagaggagacagattgttaccgcgtggatattgatcagggagctgacatgcagaaggagtcaaaagagaatcaatggctgggagtcagtgtgagaagtcaaggccccggcggtaagattgtgacttgcgcccatagatacgaggccaggcagagagtggaccagatcttagagactagggacatgattgggcgatgtttcgtcctgagtcaggatcttgctatcagggacgagctcgatggaggagaatggaaattctgcgaaggtaggccccaaggccatgagcagttcggcttttgtcaacagggcaccgctgccgcttttagtccagattctcattaccttctctttggcgctccagggacttataactggaagggtactgcaagagtcgagctgtgtgctcagggaagcgctgacttggcccacctcgacgatggtccgtatgaggctggtggcgagaaagagcaggacccgcgattgatcccagtgccggctaattcctatttcggactcttgttcgttacaaacattgattctagtgatccagaccagctggtgtataaaacgttggaccccgcagacaggctgccagggccagcaggagatctcgcgctgaactcttacttaggatttagcatcgattccggcaagggactggtccgggctgaagaactgtctttcgtcgccggggccccgcgggccaaccataaaggagcggtggtaatcctgcggaaggattcggcatcgcgcctggtgcctgaagtgatgctgtccggggaacggttgacgtccggatttggatactccctggcggtggctgacctcaactcagatggatggcctgacttaattgtgggagcaccctactttttcgagagacaagaagagctgggcggtgcagtttacgtgtacttaaaccagggcggacactgggcgggcatttctcccctgaggctgtgcggaagtcccgattcaatgtttgggatttcgctcgctgtactcggtgatctgaatcaggatggatttcccgatatcgctgtaggcgccccttttgacggggatggcaaggttttcatctaccatggcagctcccttggggtcgtcgccaaacccagccaagtgttagagggagaggccgtagggattaagtcctttggatattcccttagtggttccctggatatggatgggaaccagtatcccgacctcctggtgggcagcctagccgacaccgccgtgctgtttagggccagacctatcttacatgtgtcccatgaagtctctatcgcgccccgatctatcgatctagagcagcccaattgtgcgggagggcattctgtgtgtgtagatttgagggtctgcttcagctacatcgcggtgccttcatcttacagcccgaccgttgcactcgactacgtactggatgccgatacagaccggaggctgcgcgggcaggtccctagagtgactttcttgagccgcaatctggaagaacctaagcatcaagccctggatcctgctgagaagcccctgtgcctctccaatgaaaatgctagccacgtcgagtgtgaactcgggaaccctatgaagaggggcgcccaggtcacattttacctgatcttatccacctcgggtatttccatcgaaaccacagaactggaagtggagttgttactcgctaccatcagcgaacaggagcttcaccctgtgtcggccagggctagggtctttatcgagctacctctgagcattgctgggatggccataccgcaacagctatttttttccggagtggtgcgaggagagcgggcaatgcagtctgagcgcgacgtaggatcgaaggtaaagtacgaggtgacggtttccaaccagggacagtccctcaggacactgggttctgcttttcttaacatcatgtggccccacgaaattgccaatgggaagtggcttctttaccctatgcaggtggagctggaaggcgggcaaggcccagggcagaagggtctgtgttcccctagaccaaacattcttcacttagacgtcgatagtcgggaccgccggagaagggagctggagccgcccgagcagcaggaaccaggcgagcgacaggagccaagtatgtcttggtggcctgtgtcttcagctgaaaagaagaaaaatattacactcgactgtgcacggggcaccgcaaactgtgtggtcttctcgtgccctctctacagctttgatagagctgccgtgctccatgtgtggggcagactgtggaatagcaccttccttgaggaatattctgccgtcaagtcactggaggtgatcgttagagccaacatcaccgtgaagagtagtatcaaaaacctcatgctaagagatgcctctaccgttataccagtcatggtgtatctggaccctatggcagtagtagcagaaggtgtgccttggtgggtaattcttcttgctgttctggctggactgctggtgctggctttactggtgctgctgctgtggaagtgtggattctttcatcggagttcacagagctcctcattccccacaaactaccaccgcgcgtgtttagccgtccagccctcggccatggaggtaggcgggcccggtacggtcgggtgggattctagtaatggtagaagcaccccacggcccccctgtccttccaccatgcggtag

SEQ ID NO: 334091 - DNA, 2976 bp, Artificial Sequence
  derived and/or modified sequence
atggccggagctcggtcgcgggacccctggggagcatctggcatctgctatctgttcggatccttactggtcgagttactgttcagtcgagcggtcgctttcaacttagacgtaatgggagcccttcgaaaagagggagagcctggctccctgtttggtttttcagtggcgctgcacagacagcttcaacccaggccccagagttggctgcttgttggggctccccaggcgctcgcgctgcctggacaacaagcgaacaggacaggcggtctcttcgcctgtccactttccctagaagaaacagactgctatcgagtcgatattgaccaaggagccgacatgcagaaggaatccaaggaaaaccagtggctgggtgtgagcgtgaggagccagggaccaggagggaagatagtaacatgcgcacaccgctacgaagctcgtcagagggtggaccagattctggaaacccgtgatatgattggcagatgcttcgtgctctcccaggacctcgccattcgggatgagctcgacggaggtgaatggaaattctgcgagggaagacctcagggtcacgaacagtttggcttctgtcagcagggaaccgcagcagctttttctcctgattcacactacttgctcttcggtgcacccggaacgtacaactggaagggaactgcaagggtggagctgtgcgcacagggctcagcggacttggcccaccttgatgacggcccttacgaagccggtggtgagaaggagcaggatcccaggctcatcccggtaccggctaatagctactttggcctattgtttgttactaacattgactctagcgaccctgaccagctggtctacaaaaccctggatccagcagatcgtctgcctggccctgccggagacctggctctgaacagctatctcggtttctcaattgactccggcaaaggactcgtgagagctgaagagttgtccttcgttgccggagcacctcgtgctaatcacaagggggctgtcgtgattctgcggaaagattctgcttcacggctggtgcctgaggtcatgctgagcggagagcgcttgaccagtggcttcggatactctctggccgtggccgacctcaacagcgatggctggcccgacctgatcgttggggcaccatacttctttgaaagacaggaagagcttggaggcgcagtgtatgtgtacctgaatcaggggggacattgggccggaatttcacctctgcgcctgtgcggtagccctgattccatgttcggcattagcttggccgtgctgggagatctgaatcaagatggcttcccggatatcgccgttggcgctccttttgatggggacggtaaagtgtttatctaccatggcagctctcttggcgtggtggccaaaccatcccaggtactggagggagaggccgtgggaatcaagagcttcggatactctctctccggaagccttgacatggacggaaaccaatacccagacctgctggtgggctctttggccgacactgccgtattattcagagctagacccattctccacgtgtcccacgaagttagtatcgcaccccgttcaattgatcttgagcaaccaaactgcgccggtggacactccgtctgcgttgatctccgggtgtgcttcagctacatcgcagtgccatcgtcttacagcccgactgtggcgcttgattacgtcctggacgccgataccgatcgcagacttagggggcaggtgcctagggtgacattcctgagcaggaacctcgaggagccaaaacatcaggcactggaccctgccgaaaagccgctgtgcctatctaatgaaaatgcctcccatgtcgagtgtgagttgggtaaccccatgaagcggggagctcaagtcactttctacctgatcctatccacaagcggtatcagtatagagactacagaactggaagttgagctcctcctggctaccatctccgaacaggaactgcaccccgtgtcagcacgggcacgagtgtttatcgagctgccactctccattgccggaatggccattccccagcagcttttctttagtggggtggtccgaggggaacgcgcaatgcagagcgagcgcgacgtaggaagtaaagtgaaatacgaggtgaccgtctccaatcaaggtcagtctcttcggacactcgggagcgcttttttaaatatcatgtggccccacgaaatcgccaatgggaagtggctactgtaccctatgcaggttgagctggagggaggacagggaccagggcagaagggcctttgttcccccaggccaaacatcctccacttggacgttgattcaagggatcgaagacgtcgtgaactggagccccctgagcagcaggagcccggtgagagacaggagccctccatgtcctggtggccggtatcttctgcagagaaaaaaaaaaacataaccctcgattgtgcaagaggcacggctaattgtgttgtgtttagttgtccattatatagttttgatcgagccgcagtgctgcacgtgtggggacggttatggaacagcacattcttggaagagtactctgccgtcaaatcccttgaggtgatcgtgcgagccaacatcaccgttaagtctagtatcaagaacctcatgctcagagacgcaagcacagtgattcctgtgatggtgtacctcgatcctatggccgtggtggccgagggggtaccatggtgggtgattcttcttgccgtcctggccggactgcttgttctagccttactcgtgctgttgctgtggaagtgcggcttcttccacagatcaagccagtcttcctcattccctaccaattaccatcgagcttgcctggcggtgcagccttccgctatggaagtgggcggtcccggtacggtcggatgggattcttctaacgggagaagtacaccgagaccaccttgccccagcaccatgcgttag

SEQ ID NO: 334092 - protein, 360 aa, Artificial Sequence
  derived and/or modified sequence
MSTVICMKQREEEFLLTIRPFANRMQKSPCYIPIVSSATLWDRSTPSAKHIPCYERTSVPCSRFINHMKNFSESPKFRSLHFLNFPVFPERTQNSMACKRLLHTCQYIVPRCSVSTVSFDEESYEEFRSSPAPSSETDEAPLIFTARGETEERARGAPKQAWNSSFLEQLVKKPNWAHSVNPVHLEAQGIHISRHTRPKGQPLSSPKKNSGSAARPSTAIGLCRRSQTPGALQSTGPSNTELEPEERMAVPAGAQAHPDDIQSRLLGASGNPVGKGAVAMAPEMLPKHPHTPRDRRPQADTSLHGNLAGAPLPLLAGASTHFPSKRLIKVCSSAPPRPTRRFHTVCSQALSRPVVNAHLH

SEQ ID NO: 334093 - protein, 207 aa, Artificial Sequence
  derived and/or modified sequence
MSTVICMKQREEEFLLTIRPFANRMQKSPCYIPIVSSATLWDRSTPSAKHIPCYERTSVPCSRFINHMKNFSESPKFRSLHFLNFPVFPERTQNSMACKRLLHTCQYIVPRCSVSTVSFDEESYEEFRSSPAPSSETDEAPLIFTARGETEERARGAPKQAWNSSFLEQLVKKPNWAHSVNPVHLEAQGIHISRHTRPKGQPLSSPK

SEQ ID NO: 334094 - DNA, 1462 bp, Artificial Sequence
  derived and/or modified sequence
agcagagtgctccagctcccgcggaggaggctgcgggcggcgccccgggatagggaccctgcagctccaggtagacgcagggagcgcgggactcgccccctggcagggtgaggtagagccggaccgtttgctctctgctgctccccgggactccagccgcgcccgtgagaagaggcagcacggcagcaaaggccaaggagcggagggagttgaacttgtcaaattaatgtctacagtgatatgtatgaaacaaagggaagaagaattcttgctaaccatcagaccttttgcaaacaggatgcagaaatccccttgctatattcccattgtgagcagtgccaccctgtgggatagaagcacacccagtgcaaagcacatcccttgttatgaaagaacttcagtaccctgctccagattcattaatcacatgaagaatttctctgaatctcctaaatttcgtagtctacactttctgaattttccagtatttccagaaaggactcaaaattcaatggcgtgtaaaagactacttcatacttgccagtacatagtccccaggtgttctgtaagcacagtttcttttgatgaagaaagctatgaagaattccgttcctctccagcaccatccagtgaaactgatgaggccccattgatttttactgccagaggagaaactgaggagagagccagaggagcacccaagcaggcttggaacagttcatttttggaacaactggttaaaaagcctaactgggcacactcagtaaatcctgttcacctggaggctcagggcatacacatcagtagacacacaagacctaagggccagcccttgagcagtcccaagaaaaattctggttctgccgccagaccttccactgccatcggcctctgcaggaggagccagacgcccggcgctctgcagagcaccggcccgagtaacacagagctcgagccggaggagaggatggcagtcccagcaggcgctcaggcacaccccgacgacatccaaagcagactcctgggcgcgtccggaaatcccgtcggaaaaggcgcggttgccatggcgccggagatgctccccaagcatcctcataccccgcgggacaggaggcctcaggcggacacctccctccatggcaatctggcaggagcgccccttcctctgctggccggtgcttccacccatttcccctccaagaggttaataaaggtttgctcctcagcacccccccgcccaacccggcgtttccatacggtttgttcacaggccctttctaggccggtggtgaatgctcacttacattgaccgctgcgagggaattgttcggcgagtgctgcccatcttcaaatcaatgcctgctcagaacaacagaaagggcctcagatgtactggtttccacagaaccattgttaggcttttgtgaagcatttttgaacctaataaataatgtcaaaagtc

SEQ ID NO: 334095 - DNA, 1336 bp, Artificial Sequence
  derived and/or modified sequence
agagtgctccagctcccgcggaggaggctgcgggcggcgccccgggatagggaccctgcagctccagggagttgaacttgtcaaattaatgtctacagtgatatgtatgaaacaaagggaagaagaattcttgctaaccatcagaccttttgcaaacaggatgcagaaatccccttgctatattcccattgtgagcagtgccaccctgtgggatagaagcacacccagtgcaaagcacatcccttgttatgaaagaacttcagtaccctgctccagattcattaatcacatgaagaatttctctgaatctcctaaatttcgtagtctacactttctgaattttccagtatttccagaaaggactcaaaattcaatggcgtgtaaaagactacttcatacttgccagtacatagtccccaggtgttctgtaagcacagtttcttttgatgaagaaagctatgaagaattccgttcctctccagcaccatccagtgaaactgatgaggccccattgatttttactgccagaggagaaactgaggagagagccagaggagcacccaagcaggcttggaacagttcatttttggaacaactggttaaaaagcctaactgggcacactcagtaaatcctgttcacctggaggctcagggcatacacatcagtagacacacaagacctaagggccagcccttgagcagtcccaagaaaaattctggttctgccgccagaccttccactgccatcggcctctgcaggaggagccagacgcccggcgctctgcagagcaccggcccgagtaacacagagctcgagccggaggagaggatggcagtcccagcaggcgctcaggcacaccccgacgacatccaaagcagactcctgggcgcgtccggaaatcccgtcggaaaaggcgcggttgccatggcgccggagatgctccccaagcatcctcataccccgcgggacaggaggcctcaggcggacacctccctccatggcaatctggcaggagcgccccttcctctgctggccggtgcttccacccatttcccctccaagaggttaataaaggtttgctcctcagcacccccccgcccaacccggcgtttccatacggtttgttcacaggccctttctaggccggtggtgaatgctcacttacattgaccgctgcgagggaattgttcggcgagtgctgcccatcttcaaatcaatgcctgctcagaacaacagaaagggcctcagatgtactggtttccacagaaccattgttaggcttttgtgaagcatttttgaacctaataaataatgtcaaaagtccctagcgcagcc

SEQ ID NO: 334096 - DNA, 831 bp, Artificial Sequence
  derived and/or modified sequence
ccgcggaggaggctgcgggcggcgccccgggatagggaccctgcagctccaggtagacgcagggagcgcgggactcgccccctggcagggtgaggtagagccggaccgtttgctctctgctgctccccgggactccagccgcgcccgtgagaagaggcagcacggcagcaaaggccaaggagcggagggagttgaacttgtcaaattaatgtctacagtgatatgtatgaaacaaagggaagaagaattcttgctaaccatcagaccttttgcaaacaggatgcagaaatccccttgctatattcccattgtgagcagtgccaccctgtgggatagaagcacacccagtgcaaagcacatcccttgttatgaaagaacttcagtaccctgctccagattcattaatcacatgaagaatttctctgaatctcctaaatttcgtagtctacactttctgaattttccagtatttccagaaaggactcaaaattcaatggcgtgtaaaagactacttcatacttgccagtacatagtccccaggtgttctgtaagcacagtttcttttgatgaagaaagctatgaagaattccgttcctctccagcaccatccagtgaaactgatgaggccccattgatttttactgccagaggagaaactgaggagagagccagaggagcacccaagcaggcttggaacagttcatttttggaacaactggttaaaaagcctaactgggcacactcagtaaatcctgttcacctggaggctcagggcatacacatcagtagacacacaagacctaagggccagcccttgagcagtcccaagaa

SEQ ID NO: 334097 - protein, 107 aa, Artificial Sequence
  derived and/or modified sequence
MSTVICMKQREEEFLLTIRPFANRMQKSPCYIPIVSSATLWDRSTPSAKHIPCYERTSVPCSRFINHMKNFSESPKFRSLHFLNFPGSHHGQATQKLQGAMVLHLEE

SEQ ID NO: 334098 - DNA, 412 bp, Artificial Sequence
  derived and/or modified sequence
agagtgctccagctcccgcggaggaggctgcgggcggcgccccgggatagggaccctgcagctccagggagttgaacttgtcaaattaatgtctacagtgatatgtatgaaacaaagggaagaagaattcttgctaaccatcagaccttttgcaaacaggatgcagaaatccccttgctatattcccattgtgagcagtgccaccctgtgggatagaagcacacccagtgcaaagcacatcccttgttatgaaagaacttcagtaccctgctccagattcattaatcacatgaagaatttctctgaatctcctaaatttcgtagtctacactttctgaattttccaggaagtcaccatggacaggccacacagaaattacagggagctatggttcttcaccttgaagagtga

SEQ ID NO: 334099 - DNA, 324 bp, Artificial Sequence
  derived and/or modified sequence
atgagcaccgtgatctgcatgaagcagagagaggaggagttcctgctgaccatcagacccttcgccaacagaatgcagaagagcccctgctacatccccatcgtgagcagcgccaccctgtgggacagaagcacccccagcgccaagcacatcccctgctacgagagaaccagcgtgccctgcagcagattcatcaaccacatgaagaacttcagcgagagccccaagttcagaagcctgcacttcctgaacttccccggcagccaccacggccaggccacccagaagctgcagggcgccatggtgctgcacctggaggagtag

SEQ ID NO: 334100 - DNA, 324 bp, Artificial Sequence
  derived and/or modified sequence
atgtcaacagtcatatgcatgaaacagagagaagaagagttcctactgaccatccgcccctttgcgaacagaatgcagaaatccccctgttacattccaatcgtgtcttccgcaacactgtgggacaggtcaacaccatctgccaaacacattccctgctatgagaggactagtgtgccctgctcgcggttcatcaaccatatgaagaacttctccgagtcccctaaatttagaagcctgcactttctgaactttcccggctcacaccacgggcaggctacccagaagctgcagggcgcaatggtcctgcacttagaagagtag

SEQ ID NO: 334101 - DNA, 324 bp, Artificial Sequence
  derived and/or modified sequence
atgagcaccgtcatctgcatgaagcagcgggaggaggagttcctgctgaccatccggccctttgccaacaggatgcagaagagcccctgctacatccccatcgtgtcctctgccaccctgtgggacaggagcaccccatctgccaagcacatcccctgctatgaaagaacatctgtgccctgcagccgcttcatcaaccacatgaagaacttcagcgagagccccaagttccgcagcctgcacttcctgaacttccctggcagccaccacggccaggccacccagaagctgcagggcgccatggtgctgcacctggaggagtag

SEQ ID NO: 334102 - DNA, 324 bp, Artificial Sequence
  derived and/or modified sequence
atgagcaccgtgatctgcatgaagcagcgggaggaggagttcctgttgacaatcagaccatttgccaataggatgcaaaaatccccctgttatatcccgatcgtgtcctcggctactttgtgggataggtctactccttcagctaaacatattccttgttacgagaggacctctgtgccatgctcccgttttatcaatcatatgaaaaacttcagtgaatcccctaagttcaggtctctgcattttctgaacttccctggctcacaccacggccaggccactcaaaagttacaaggggcaatggtgctgcacctcgaggaatag

SEQ ID NO: 334103 - DNA, 324 bp, Artificial Sequence
  derived and/or modified sequence
atgtccaccgtgatctgcatgaaacaacgggaagaagaattccttctgacaatccggccatttgctaatcgcatgcagaaatccccatgctatattcctatcgtcagttctgccacactctgggacaggagcaccccatctgccaaacacatcccatgttacgaaaggacaagcgtcccctgcagccggtttattaaccatatgaagaatttcagtgagtcccccaagttccggtcgctgcatttcctgaatttccccggaagtcaccatggccaggccacacagaaactgcagggggcaatggtgctacacctggaggaatag

SEQ ID NO: 334104 - protein, 164 aa, Artificial Sequence
  derived and/or modified sequence
MASHSGPSTSVLFLFCCLGGWLASHTLPVRLLRPSDDVQKIVEELQSLSKMLLKDVEEEKGVLVSQNYTLPCLSPDAQPPNNIHSPAIRAYLKTIRQLDNKSVIDEIIEHLDKLIFQDAPETNISVPTDTHECKRFILTISQQFSECMDLALKSLTSGAQQATT

SEQ ID NO: 334105 - DNA, 495 bp, Artificial Sequence
  derived and/or modified sequence
atggccagccacagcggccccagcaccagcgtgctgttcctgttctgctgcctgggcggctggctggccagccacaccctgcccgtgagactgctgagacccagcgacgacgtgcagaagatcgtggaggagctgcagagcctgagcaagatgctgctgaaggacgtggaggaggagaagggcgtgctggtgagccagaactacaccctgccctgcctgagccccgacgcccagccccccaacaacatccacagccccgccatcagagcctacctgaagaccatcagacagctggacaacaagagcgtgatcgacgagatcatcgagcacctggacaagctgatcttccaggacgcccccgagaccaacatcagcgtgcccaccgacacccacgagtgcaagagattcatcctgaccatcagccagcagttcagcgagtgcatggacctggccctgaagagcctgaccagcggcgcccagcaggccaccacctag

SEQ ID NO: 334106 - DNA, 495 bp, Artificial Sequence
  derived and/or modified sequence
atggcctcccattccggaccttccacctctgtgctgtttctgttttgttgccttggcggatggcttgctagccacactcttcccgtgaggctgctgcgtccatcagacgacgtgcagaagatcgtggaggaactacagtctttgtctaaaatgctcctgaaagatgtggaagaggagaaaggtgtgctcgttagtcagaattatacactgccgtgcctgagtcctgacgcacagccacctaacaacattcattctcccgcgatccgagcttatctgaaaaccatcaggcaacttgataacaagtccgtcatcgatgagatcattgagcacttggacaaattgatcttccaggacgcccctgaaactaatatttcagtacctaccgacacgcatgagtgtaaaagatttatcctgaccatctcccaacagttcagcgaatgcatggacctggctttgaagagcttgaccagcggcgcccaacaggccaccacctag

SEQ ID NO: 334107 - DNA, 495 bp, Artificial Sequence
  derived and/or modified sequence
atggccagccacagcggccccagcacctctgtgctcttcctgttctgctgcctgggcggctggctggccagccacaccctgcctgtgcggctgctgcggcccagtgatgatgtgcagaagatcgtggaggagctgcagagcctgagcaagatgctgctgaaggatgtggaggaggagaagggcgtgctggtgtcccagaactacaccctgccctgcctgagcccagatgcccagccccccaacaacatccacagccctgccatccgggcctacctgaagaccatccggcagctggacaacaagtctgtgattgatgagatcatcgagcacctggacaagctgatcttccaggatgcccctgagaccaacatctctgtgcccacagacacccatgagtgcaagcgcttcatcctgaccatcagccagcagttcagcgagtgcatggacctggccctgaagagcctgaccagcggggcccagcaggccaccacctag

SEQ ID NO: 334108 - DNA, 495 bp, Artificial Sequence
  derived and/or modified sequence
atggccagccacagcggccccagcaccagcgtgctgttcctgttctgttgcctcggaggatggctggccagccatacactgcctgtgcgactcctgaggcccagtgatgacgtgcagaaaatcgttgaggaacttcagtcactctctaagatgctcctcaaggacgtcgaagaagagaaaggggtgcttgtttctcagaactacacgctgccgtgtctgtccccagacgcacagcctcctaacaacatccactcaccagctatccgggcttatcttaagactattagacagttagataacaagtcagtgattgatgagatcatagagcacctggataagctcatattccaggatgcacctgagaccaatatctcagtcccaaccgatactcacgaatgtaagaggtttatcctgaccatctctcagcagttcagcgagtgtatggaccttgccctgaagtcccttacttcaggagcacaacaagccactacctag

SEQ ID NO: 334109 - DNA, 495 bp, Artificial Sequence
  derived and/or modified sequence
atggcatctcatagcggcccatcaacatctgtactatttcttttctgctgccttggcggttggttagcttctcacacccttcccgtgcggctactgaggccatccgacgacgtgcagaaaattgtcgaagagctgcagagtctgtccaaaatgcttttgaaagatgttgaggaggagaaaggcgtgctggtgtctcaaaactacaccttgccctgtctttcacctgacgcgcaaccaccaaataacatacattcaccggctatcagagcgtacttgaaaacgattaggcagctggataataagagcgttatcgatgaaattattgaacatctggataaactgatcttccaggatgccccagaaaccaacattagcgttcccactgacacacatgagtgtaaacgcttcatcctgacgatttcccagcagttctccgaatgtatggatttagccctgaagagcctcacctctggtgcccagcaagcgactacctag

SEQ ID NO: 334110 - DNA, 495 bp, Artificial Sequence
  derived and/or modified sequence
atggcctcccacagcggcccctctacttcagtcctgtttcttttttgttgcctcggggggtggctagcctcccatacactgccggtacggcttctaagacccagtgatgatgtacaaaaaatagttgaggagttacagagccttagcaagatgctgctcaaggacgttgaagaggaaaagggagtgcttgtgtcccagaactatactctgccgtgcctgagccctgacgcccaaccgcctaacaatatccactctcccgcaattcgtgcttacctgaaaactatacggcaattagacaataaatctgtgatagacgaaattatcgaacatcttgataaactcatattccaagacgctccagagaccaatatttcagtccccacagacacccacgaatgcaagcgctttattctaaccattagtcaacagttctcggaatgcatggacttagcactcaaatcgctgacttccggcgcccaacaggcaacaacttag

SEQ ID NO: 334111 - DNA, 495 bp, Artificial Sequence
  derived and/or modified sequence
atggccagtcattccggcccctctacctccgttctattccttttctgttgccttggaggatggctcgcctcccacaccctgcctgtacgcctactgaggccctccgatgatgttcagaaaatcgttgaagagcttcagtcgctgagcaaaatgcttcttaaagatgtagaagaggagaaaggagtgctcgtgtcacagaattatactcttccttgtctgagcccagatgcccaaccacccaacaacatacactctcccgccatccgcgcctacctgaagaccatccgacagctcgacaataagtcagttatagacgaaatcatcgaacatctagataagctaatctttcaagacgcaccagaaacaaatataagcgtccccaccgacacccacgagtgcaagcggttcatccttactatttctcagcagttttccgaatgcatggacctagccctgaaaagccttaccagtggagctcagcaggccacaacctag

SEQ ID NO: 334112 - DNA, 904 bp, Artificial Sequence
  derived and/or modified sequence
ctgaagctggccttgctctctctcgccatggcctctcactcaggcccctcgacgtctgtgctctttctgttctgctgcctgggaggctggctggcctcccacacgttgcccgtccgtttactacgaccaagtgatgatgtacagaaaatagtcgaggaattacagtccctctcgaagatgcttttgaaagatgtggaggaagagaagggcgtgctcgtgtcccagaattacacgctgccgtgtctcagccctgacgcccagccgccaaacaacatccacagcccagccatccgggcatatctcaagacaatcagacagctagacaacaaatctgttattgatgagatcatagagcacctcgacaaactcatatttcaagatgcaccagaaacaaacatttctgtgccaacagacacccatgaatgtaaacgcttcatcctgactatttctcaacagttttcagagtgcatggacctcgcactaaaatcattgacctctggagcccaacaggccaccacttaaggccatctcttcctttcggattggcaggaacttaaggagccttaaaaagatgaccgacagctaagtgtgggaactctgccgtgattccttaagtacatttttccaatgaataatctcagggacccctcatatgggctagtcccgggagggctgagatgtgaatttgtgaattaccttgaaaaacattaggttattgttattagtcttggtatttatggaatgcttttcttctgcaggcttaagtcttacttattataccctcgtgagggtgggaggtggcagctatgttaatttattgatatttattgtactaagagttgtcaatgctccctgggggagccctcggaatctatttaataaattatattgaatttttctcata

SEQ ID NO: 334113 - RNA, 495 nt, Artificial Sequence
  derived and/or modified sequence
auggccucccacagcggccccucuacuucaguccuguuucuuuuuuguugccucgggggguggcuagccucccauacacugccgguacggcuucuaagacccagugaugauguacaaaaaauaguugaggaguuacagagccuuagcaagaugcugcucaaggacguugaagaggaaaagggagugcuugugucccagaacuauacucugccgugccugagcccugacgcccaaccgccuaacaauauccacucucccgcaauucgugcuuaccugaaaacuauacggcaauuagacaauaaaucugugauagacgaaauuaucgaacaucuugauaaacucauauuccaagacgcuccagagaccaauauuucaguccccacagacacccacgaaugcaagcgcuuuauucuaaccauuagucaacaguucucggaaugcauggacuuagcacucaaaucgcugacuuccggcgcccaacaggcaacaacuuag

SEQ ID NO: 334114 - RNA, 495 nt, Artificial Sequence
  derived and/or modified sequence
auggccagucauuccggccccucuaccuccguucuauuccuuuucuguugccuuggaggauggcucgccucccacacccugccuguacgccuacugaggcccuccgaugauguucagaaaaucguugaagagcuucagucgcugagcaaaaugcuucuuaaagauguagaagaggagaaaggagugcucgugucacagaauuauacucuuccuugucugagcccagaugcccaaccacccaacaacauacacucucccgccauccgcgccuaccugaagaccauccgacagcucgacaauaagucaguuauagacgaaaucaucgaacaucuagauaagcuaaucuuucaagacgcaccagaaacaaauauaagcguccccaccgacacccacgagugcaagcgguucauccuuacuauuucucagcaguuuuccgaaugcauggaccuagcccugaaaagccuuaccaguggagcucagcaggccacaaccuag

SEQ ID NO: 334115 - protein, 505 aa, Artificial Sequence
  derived and/or modified sequence
MTCGSGFGGRAFSCISACGPRPGRCCITAAPYRGISCYRGLTGGFGSHSVCGGFRAGSCGRSFGYRSGGVCGPSPPCITTVSVNESLLTPLNLEIDPNAQCVKQEEKEQIKSLNSRFAAFIDKVRFLEQQNKLLETKLQFYQNRECCQSNLEPLFEGYIETLRREAECVEADSGRLASELNHVQEVLEGYKKKYEEEVSLRATAENEFVALKKDVDCAYLRKSDLEANVEALIQEIDFLRRLYEEEILILQSHISDTSVVVKLDNSRDLNMDCIIAEIKAQYDDIVTRSRAEAESWYRSKCEEMKATVIRHGETLRRTKEEINELNRMIQRLTAEVENAKCQNSKLEAAVAQSEQQGEAALSDARCKLAELEGALQKAKQDMACLIREYQEVMNSKLGLDIEIATYRRLLEGEEQRLCEGIGAVNVCVSSSRGGVVCGDLCVSGSRPVTGSVCSAPCNGNVAVSTGLCAPCGQLNTTCGGGSCGVGSCGISSLGVGSCGSSCRKC

SEQ ID NO: 334116 - protein, 484 aa, Artificial Sequence
  derived and/or modified sequence
MTCGSGFGGRAFSCISACGPRPGRCCITAAPYRGISCYRGLTGGFGSHSVCGGFRAGSCGRSFGYRSGGVCGPSPPCITTVSVNESLLTPLNLEIDPNAQCVKQEEKEQIKSLNSRFAAFIDKVRFLEQQNKLLETKLQFYQNRECCQSNLEPLFEGYIETLRREAECVEADSGRLASELNHVQEVLEGYKKKYEEEVSLRATAENEFVALKKDVDCAYLRKSDLEANVEALIQEIDFLRRLYEEEILILQSHISDTSVVVKLDNSRDLNMDCIIAEIKAQYDDIVTRSRAEAESWYRSKCEEMKATVIRHGETLRRTKEEINELNRMIQRLTAEVENAKCQNSKLEAAVAQSEQQGEAALSDARCKLAELEGALQKAKQDMACLIREYQEVMNSKLGLDIEIATYRRLLEGEEQRLCEGIGAVNVCVSSSRGGVVCGDLCVSGSRPVTGSVCSAPCNGNVAVSTGLCAPCGQVGSCGSSCRKC

SEQ ID NO: 334117 - DNA, 1518 bp, Artificial Sequence
  derived and/or modified sequence
atgacatgcgggagtggctttgggggacgggcatttagctgcatctcagcatgcgggccccgccccggcagatgttgtataacggccgccccctataggggtatttcatgctacagaggcttgactggcggcttcgggtcccactcagtatgtggaggatttagagccggctcttgcggaaggtccttcggatatcggtcaggcggcgtgtgtggcccatcacccccctgcatcacgacagtatcagtaaatgagtctctgctgactcccctcaatttagaaattgatccaaatgcacagtgtgtgaagcaggaggagaaagagcagatcaaatccctaaacagcagatttgccgcatttatagacaaggtaaggttccttgaacagcagaataaactgttagaaactaagttgcagttctatcagaaccgagagtgctgccagtcaaacctggagcccttgtttgaagggtatatcgaaacactgaggagagaggcagagtgcgtggaagcggattcagggcgtctggcatccgaactcaatcacgtgcaagaggtactcgaggggtataaaaaaaagtacgaagaagaggttagtctgcgcgccactgcggagaatgagttcgtagctctcaaaaaggatgtggactgtgcttacctgaggaaaagtgaccttgaggctaatgtcgaggcgctgatccaggaaatcgacttccttagaagattatacgaagaggagatcctgatcttgcaaagccacatttccgacactagtgtcgtcgtgaaactcgacaattctcgggatttaaatatggactgtattatcgccgaaatcaaggcgcagtacgatgatatagtcacgaggtcgagagccgaagcagaaagttggtaccgtagcaaatgtgaagaaatgaaagccacggtcattcggcatggggagacgttaaggcgtactaaggaggaaatcaacgagttgaatagaatgatacaacgtctgacagcagaagtggaaaatgccaaatgtcagaacagcaagttggaagccgcagtggcacaatcagagcagcagggcgaggctgccctgtccgacgccagatgtaaactggctgagcttgagggagcattgcaaaaagccaaacaggacatggcctgccttatccgggagtatcaagaggttatgaacagcaagcttggcttggacattgagatcgcaacgtatagacgcttgctcgaaggcgaggaacaaaggctatgcgagggaatcggagccgtcaacgtgtgtgtgagctccagccgtggaggagttgtttgtggcgacctgtgtgtgagtggaagccggccggtcacagggagtgtgtgctcagctccctgtaacgggaacgtcgccgtgtcaacaggtctgtgtgcaccatgtggccagctgaatactacctgtggaggaggatcgtgtggggtcgggagttgtggtattagcagtctgggagtggggagttgtggctcttcttgcaggaaatgctag

SEQ ID NO: 334118 - DNA, 1455 bp, Artificial Sequence
  derived and/or modified sequence
atgacctgtggaagcggttttggaggccgtgctttcagctgcatcagtgcttgtgggcctcgtccaggaaggtgttgcataaccgcagcaccctatcgcggcatttcttgctacagaggcttgaccggcgggttcggaagtcattccgtgtgcggcggattcagagcggggagctgtggcaggtcattcggttaccggtccgggggcgtgtgcgggcctagccccccatgtataacgaccgtgtcagtaaatgaatcactgctgacccccttgaatctggagatagaccccaatgcacagtgtgtcaagcaagaggagaaagaacagattaaatctttgaattcacgcttcgcggcctttatcgacaaggtccgcttcctcgagcaacagaacaagctgcttgaaactaaactgcagttttaccagaacagggaatgctgtcaatcgaatctggagcctctgttcgagggatacatcgagaccctccggagggaggctgaatgtgtcgaggcagatagtggccggctggcttcagaactgaaccacgtgcaggaggtcctcgaaggctacaaaaaaaagtacgaggaagaagtaagcctcagagcgaccgccgagaacgagttcgtcgccctaaagaaggatgtggattgcgcctacctaaggaagtcagatttggaagcgaacgtggaagcattgattcaggaaatcgattttctcaggagactgtacgaagaagagattctgatcttacagagtcatatatccgatactagtgtggttgttaagctggataactcgagggacctcaatatggactgtatcattgctgaaatcaaagctcagtatgacgatatcgtgaccaggagccgggccgaggcagaatcttggtacagaagcaagtgcgaggagatgaaagcaacagtgataagacacggcgaaacccttagacgaacaaaagaggagataaacgagctgaatcggatgattcagagacttacagcggaggtcgagaacgcaaaatgtcaaaactctaagttggaagcagccgtagcccagagtgagcagcaaggagaagctgctctttctgacgcgcgttgcaagctcgcagagcttgagggcgcgctccagaaggcaaaacaggacatggcctgcctcatcagggaatatcaagaggttatgaacagtaaattgggtttggacatcgagattgctacttacagacggcttcttgagggcgaggagcaaaggctctgcgaaggtataggtgccgtgaatgtgtgcgtcagcagtagccggggcggcgtcgtgtgcggcgacttgtgcgtgtcaggctcccggccagtgacagggagtgtgtgcagcgcgccttgtaatggcaacgtggcagtttcgaccggcctatgcgccccctgcgggcaagtaggttcttgcgggagctcatgtaggaagtgttag

SEQ ID NO: 334119 - DNA, 1929 bp, Artificial Sequence
  derived and/or modified sequence
cattggagtttccatcaggactccaggtcccctatcctgtcctctgcaacccaaacgtccaggaggatcatgacctgcggatcaggatttggtgggcgcgccttcagctgcatctcggcctgcgggccgcggcccggccgctgctgcatcaccgccgccccctaccgtggcatctcctgctaccgcggcctcaccgggggcttcggcagccacagcgtgtgcggaggctttcgggccggctcctgcggacgcagcttcggctaccgctccgggggcgtgtgcgggcccagtcccccatgcatcaccaccgtgtcggtcaacgagagcctcctcacgcccctcaacctggagatcgaccccaacgcgcagtgcgtgaagcaggaggagaaggagcagatcaagtccctcaacagcaggttcgcggccttcatcgacaaggtgcgcttcctggagcagcagaacaaactgctggagacaaagctgcagttctaccagaaccgcgagtgttgccagagcaacctggagcccctgtttgagggctacatcgagactctgcggcgggaggccgagtgcgtggaggccgacagcgggaggctggcctcagagcttaaccacgtgcaggaggtgctggagggctacaagaagaagtatgaggaggaggtttctctgagagcaacagctgagaacgagtttgtggctctgaagaaggatgtggactgcgcctacctccgcaagtcagacctggaggccaacgtggaggccctgatccaggagatcgacttcctgaggcggctgtatgaggaggagatcctcattctccagtcgcacatctcagacacctccgtggttgtcaagctggacaacagccgggacctgaacatggactgcatcattgccgagattaaggcacagtatgacgacattgtcacccgcagccgggccgaggccgagtcctggtaccgcagcaagtgtgaggagatgaaggccacggtgatcaggcacggggagaccctgcgccgcaccaaggaggagatcaatgagctgaaccgcatgatccaaaggctgacggccgaggtggagaatgccaagtgccagaactccaagctggaggccgcggtggcccagtctgagcagcagggtgaggcggccctcagtgatgcccgctgcaagctggccgagctggagggcgccctgcagaaggccaagcaggacatggcctgcctgatcagggagtaccaggaggtgatgaactccaagctgggcctggacatcgagatcgccacctacaggcgcctgctggagggcgaggagcagaggctatgtgaaggcattggggctgtgaatgtctgtgtcagcagctcccggggcggggtcgtgtgcggggacctctgcgtgtcaggctcccggccagtgactggcagtgtctgcagcgctccgtgcaacgggaacgtggcggtgagcaccggcctgtgtgcgccctgcggccaattgaacaccacctgcggagggggttcctgcggcgtgggctcctgtggtatcagctccctgggtgtggggtcttgcggcagcagctgccggaaatgttaggcaccccaactcaagtcccaggccccaggcatctttcctgccctgccttgcttggcccatccagtccaggcgcctggagcaagtgctcagctacttctcctgcactttgaaagacccctcccactcctggcctcacatttctctgtgtgatcccccacttctgggctctgccaccccacagtgggaaaggccaccctagaaagaagtccgctggcacccataggaaggggcctcaggagcaggaagggccaggaccagaaccttgcccacggcaactgccttcctgcctctccccttcctcctctgctcttgatctgtgtttcaataaattaatgtagccaa

SEQ ID NO: 334120 - DNA, 1505 bp, Artificial Sequence
  derived and/or modified sequence
actccaggtcccctatcctgtcctctgcaacccaaacgtccaggaggatcatgacctgcggatcaggatttggtgggcgcgccttcagctgcatctcggcctgcgggccgcggcccggccgctgctgcatcaccgccgccccctaccgtggcatctcctgctaccgcggcctcaccgggggcttcggcagccacagcgtgtgcggaggctttcgggccggctcctgcggacgcagcttcggctaccgctccgggggcgtgtgcgggcccagtcccccatgcatcaccaccgtgtcggtcaacgagagcctcctcacgcccctcaacctggagatcgaccccaacgcgcagtgcgtgaagcaggaggagaaggagcagatcaagtccctcaacagcaggttcgcggccttcatcgacaaggtgcgcttcctggagcagcagaacaaactgctggagacaaagctgcagttctaccagaaccgcgagtgttgccagagcaacctggagcccctgtttgagggctacatcgagactctgcggcgggaggccgagtgcgtggaggccgacagcgggaggctggcctcagagcttaaccacgtgcaggaggtgctggagggctacaagaagaagtatgaggaggaggtttctctgagagcaacagctgagaacgagtttgtggctctgaagaaggatgtggactgcgcctacctccgcaagtcagacctggaggccaacgtggaggccctgatccaggagatcgacttcctgaggcggctgtatgaggaggagatcctcattctccagtcgcacatctcagacacctccgtggttgtcaagctggacaacagccgggacctgaacatggactgcatcattgccgagattaaggcacagtatgacgacattgtcacccgcagccgggccgaggccgagtcctggtaccgcagcaagtgtgaggagatgaaggccacggtgatcaggcacggggagaccctgcgccgcaccaaggaggagatcaatgagctgaaccgcatgatccaaaggctgacggccgaggtggagaatgccaagtgccagaactccaagctggaggccgcggtggcccagtctgagcagcagggtgaggcggccctcagtgatgcccgctgcaagctggccgagctggagggcgccctgcagaaggccaagcaggacatggcctgcctgatcagggagtaccaggaggtgatgaactccaagctgggcctggacatcgagatcgccacctacaggcgcctgctggagggcgaggagcagaggctatgtgaaggcattggggctgtgaatgtctgtgtcagcagctcccggggcggggtcgtgtgcggggacctctgcgtgtcaggctcccggccagtgactggcagtgtctgcagcgctccgtgcaacgggaacgtggcggtgagcaccggcctgtgtgcgccctgcggccaagtggggtcttgcggcagcagctgccggaaatgttag

SEQ ID NO: 334121 - DNA, 1518 bp, Artificial Sequence
  derived and/or modified sequence
atgacctgtggcagcggctttggaggccgggccttcagctgcatcagcgcctgtggcccccggcccggccgctgctgcatcacagctgccccctaccggggcatcagctgctaccggggcctgaccggcggcttcggcagccacagcgtgtgtggcggcttccgggccggcagctgtggccgcagctttggctacagaagtggaggagtgtgtggccccagccccccctgcatcaccaccgtgtctgtgaatgaaagcctgctgacccccctgaacctggagattgaccccaatgcccagtgtgtgaagcaggaggagaaggagcagatcaagagcctgaacagcagatttgctgccttcatcgacaaggtgcgcttcctggagcagcagaacaagctgctggagaccaagctgcagttctaccagaaccgggagtgctgccagagcaacctggagcccctgtttgagggctacatcgagaccctgcggcgggaggctgaatgtgtggaggccgacagcggccgcctggccagcgagctgaaccacgtgcaggaggtgctggagggctacaagaagaagtatgaggaggaggtgtccctgcgggccacagcagaaaatgaatttgtggccctgaagaaggatgtggactgtgcctacctgaggaagagtgacctggaggccaacgtggaggccctgatccaggagattgacttcctgcggcggctgtatgaggaggagatcctgatcctgcagagccacatcagtgacacctctgtggtggtgaagctggacaacagccgggacctgaacatggactgcatcatcgccgagatcaaggcccagtatgatgacatcgtgaccaggagcagagctgaggccgagagctggtaccgcagcaaatgtgaggagatgaaggccaccgtcatcagacatggagagaccctgcggaggaccaaggaggagatcaatgagctgaacaggatgatccagaggctgacagctgaggtggagaatgccaagtgccagaacagcaagctggaggccgctgtggcccagagcgagcagcagggcgaggccgccctgagtgatgcccgctgcaagctggccgagctggagggcgccctgcagaaggccaagcaggacatggcctgcctgatccgggagtaccaggaggtgatgaacagcaagctgggcctggacattgaaattgccacctacagaaggctgctggagggggaggagcagaggctgtgtgagggcattggagctgtgaatgtgtgtgtgagcagcagcagaggaggagtggtgtgtggggacctgtgtgtgtctggcagcaggcctgtgactggatctgtgtgcagcgccccctgcaatggaaatgtggccgtgtccacaggcctgtgtgccccctgtggccagctgaacaccacctgtggcggcggcagctgtggggtgggcagctgtggcatcagcagcctgggcgtgggcagctgtggcagcagctgcaggaagtgctag

SEQ ID NO: 334122 - DNA, 1455 bp, Artificial Sequence
  derived and/or modified sequence
atgacctgtggcagcggctttggaggccgggccttcagctgcatcagcgcctgtggcccccggcccggccgctgctgcatcacagctgccccctaccggggcatcagctgctaccggggcctgaccggcggcttcggcagccacagcgtgtgtggcggcttccgggccggcagctgtggccgcagctttggctacagaagtggaggagtgtgtggccccagccccccctgcatcaccaccgtgtctgtgaatgaaagcctgctgacccccctgaacctggagattgaccccaatgcccagtgtgtgaagcaggaggagaaggagcagatcaagagcctgaacagcagatttgctgccttcatcgacaaggtgcgcttcctggagcagcagaacaagctgctggagaccaagctgcagttctaccagaaccgggagtgctgccagagcaacctggagcccctgtttgagggctacatcgagaccctgcggcgggaggctgaatgtgtggaggccgacagcggccgcctggccagcgagctgaaccacgtgcaggaggtgctggagggctacaagaagaagtatgaggaggaggtgtccctgcgggccacagcagaaaatgaatttgtggccctgaagaaggatgtggactgtgcctacctgaggaagagtgacctggaggccaacgtggaggccctgatccaggagattgacttcctgcggcggctgtatgaggaggagatcctgatcctgcagagccacatcagtgacacctctgtggtggtgaagctggacaacagccgggacctgaacatggactgcatcatcgccgagatcaaggcccagtatgatgacatcgtgaccaggagcagagctgaggccgagagctggtaccgcagcaaatgtgaggagatgaaggccaccgtcatcagacatggagagaccctgcggaggaccaaggaggagatcaatgagctgaacaggatgatccagaggctgacagctgaggtggagaatgccaagtgccagaacagcaagctggaggccgctgtggcccagagcgagcagcagggcgaggccgccctgagtgatgcccgctgcaagctggccgagctggagggcgccctgcagaaggccaagcaggacatggcctgcctgatccgggagtaccaggaggtgatgaacagcaagctgggcctggacattgaaattgccacctacagaaggctgctggagggggaggagcagaggctgtgtgagggcattggagctgtgaatgtgtgtgtgagcagcagcagaggaggagtggtgtgtggggacctgtgtgtgtctggcagcaggcctgtgactggatctgtgtgcagcgccccctgcaatggaaatgtggccgtgtccacaggcctgtgtgccccctgtggccaggtgggcagctgtggcagcagctgcaggaaatgttag

SEQ ID NO: 334123 - DNA, 1518 bp, Artificial Sequence
  derived and/or modified sequence
atgacctgcggcagcggcttcggcggccgggccttcagctgcatctcagcctgtggaccgcgccccggcagatgttgcatcactgcagcaccctatagggggatctcctgttaccggggcttgacaggggggtttggatctcactccgtttgtgggggattccgagccgggagctgcgggcgatcgtttggctaccgctcgggtggggtttgcggaccgtctcctccctgcattaccacggtgtcagtaaatgagtcattgttgactccgctcaaccttgaaattgacccaaacgctcagtgtgtaaaacaggaagaaaaagagcagatcaagtccctcaacagccgttttgccgcattcatcgataaggtccggtttcttgagcaacagaataagttactggagactaaactacagttctatcagaatagagaatgctgtcagtcaaatctcgagccgttgttcgaaggctatattgaaacattacggcgggaagcggagtgcgtggaagctgactcaggccggctcgcttcagagttgaatcatgtccaggaagtgttagaggggtataaaaagaagtacgaggaggaagtatcgcttagagccaccgctgaaaacgagtttgttgcacttaagaaagacgtcgattgcgcgtatctgcgtaaaagtgacctggaggctaatgtcgaagctctaattcaggaaatcgatttcttgagaaggctgtatgaggaagagattctgatcctgcagagccacatcagcgatacaagtgtagtggtcaagttagacaattccagagacttaaacatggactgcattattgctgaaatcaaggcccagtacgatgacatcgttacccgctcccgggccgaggccgaaagttggtatcggagtaagtgcgaagagatgaaagcaacagttattaggcatggcgaaaccttacgtagaacgaaagaagagattaatgagctgaacagaatgatccagcgcttgacagctgaggtcgagaacgctaagtgccaaaactccaagctggaggccgccgtggcccagagtgagcagcagggagaagccgcgctgagcgatgctcggtgcaagctggccgagctggagggggcgttacagaaggccaagcaagatatggcttgtctgatccgtgaatatcaagaggtaatgaattcaaaacttggcctcgacatcgaaatcgccacctaccgcaggctactggagggcgaagagcagagactgtgcgagggaattggggccgtcaatgtatgcgtctcttcgagtagagggggcgtcgtgtgcggcgatctctgtgtatcaggatctcgcccagttacaggctccgtgtgctcagctccttgtaatggcaatgttgccgtcagcaccgggctgtgcgccccgtgcgggcagctgaacacgacgtgtgggggcggcagttgcggcgttgggtcttgcggcatctccagtctcggcgtcggcagttgcggctcaagttgtcggaagtgctag

SEQ ID NO: 334124 - DNA, 1455 bp, Artificial Sequence
  derived and/or modified sequence
atgacctgcggcagcggcttcggcggccgggccttcagctgcatctccgcctgcgggcccagaccgggcagatgctgtatcaccgctgctccatataggggcatctcctgttaccggggactgactggagggttcggcagtcactccgtctgtgggggtttcagagccggcagctgtggccgtagttttggttacagaagcgggggggtgtgcggtcctagcccaccttgcatcactacggtgtccgtcaacgaatccttgcttacaccactgaacctggagattgaccccaatgcccagtgcgtgaaacaagaagagaaagagcagattaaatccttgaattcccgcttcgctgcctttatcgacaaggtcagatttctcgaacaacagaataaactgctcgaaacaaagttacaattttaccagaatagggaatgttgtcagtctaacttggaacctctgtttgaagggtacatcgagactctccggagggaggcagaatgcgtggaggccgatagtggccgactggctagcgaactaaaccacgttcaggaggtgttggaaggctataaaaagaagtatgaggaggaagtgtcccttcgcgccactgcagaaaacgagttcgtggctctcaagaaggacgttgactgtgcctatttgcgcaagtcagatctggaggccaatgtggaggccctaatccaggaaatcgacttccttcggaggctgtacgaagaggaaattcttatcctgcagtctcacatttcggacacatctgtagtggtgaaacttgataattctcgggatctgaatatggactgcattattgctgaaatcaaggcacaatacgatgacatcgtcacacgctcacgagctgaggcagagagctggtaccgctccaagtgtgaggaaatgaaagctacagttattcggcacggagagactctcagaaggacaaaggaagaaattaacgagttaaatcgcatgattcagcgattgactgctgaggtggagaacgccaagtgtcaaaatagtaagttggaggccgctgtggctcagagtgagcagcagggcgaagccgccctgtccgatgcacggtgcaagcttgccgaactggagggagccctgcaaaaagccaaacaggatatggcctgtctcattagagaatatcaggaggtgatgaattcgaaattggggctggacattgagatcgccacttaccgtagacttcttgagggtgaggagcagagactttgtgaaggaatcggggctgtcaatgtgtgcgttagcagctcacggggcggcgtcgtgtgcggcgacctgtgcgtatccgggtctcgacccgtgacaggttccgtgtgttctgctccatgtaacgggaatgtcgcagtgtccaccggcctttgtgccccttgtgggcaagtcggtagctgcgggagcagttgccggaagtgttag

SEQ ID NO: 334125 - DNA, 1518 bp, Artificial Sequence
  derived and/or modified sequence
atgacttgtggctctggattcggaggtcgcgctttcagctgtatctccgcatgtggccctcgccctggacgctgttgcataaccgcagctccatatcggggaatttcatgttaccgcggactgactggagggtttggatctcatagcgtttgtggcggttttcgagccggatcttgtggcaggtcatttgggtaccgcagcggaggggtgtgtggcccttctcctccctgtataaccacagtctccgtgaatgagtctttattgacaccactgaatctggaaatagaccctaacgcccagtgtgtcaaacaggaggagaaggagcagatcaaaagcctaaattctagatttgcagcctttatcgataaggtaagatttctcgagcaacagaacaaactgcttgaaactaagcttcagttttaccaaaacagagagtgctgtcagtcaaaccttgagccactgtttgaaggatatatagagaccctgcgacgcgaagctgaatgtgtggaagccgatagcggcagacttgcgagcgagctcaatcatgtgcaggaagttttggagggctataaaaaaaagtacgaggaggaagtgtcgttacgtgccacagctgagaacgaattcgtggccctgaagaaggacgtagactgcgcatatcttagaaagagcgacctggaggccaacgtcgaagccttaattcaagaaatcgacttcttacgacggctgtatgaggaagagattctgattctccaatctcatatctctgacacaagcgtagtagtcaagttggataattctagggatctgaatatggactgcatcatcgcggagataaaagcgcaatatgatgatatagttacaaggagtcgcgcagaggccgaaagctggtatcgctcaaaatgcgaagaaatgaaggccactgtcatccggcatggggagactttgagaagaactaaggaagaaatcaatgagttgaaccgaatgatccaacgattaactgcagaggtggaaaacgctaagtgccagaatagtaagctggaagcagcagttgctcagagcgaacaacagggggaagccgctttaagcgacgctagatgcaagcttgctgagttagagggagcgctccagaaggcaaagcaggatatggcctgtctgataagagagtatcaggaggtgatgaactccaagttagggctcgatattgagattgccacgtatcgaaggctcctggagggagaggagcagcgcctttgcgagggtattggcgctgtgaacgtgtgcgtttcctcctctaggggtggtgtggtatgtggtgacctgtgtgtgagtggaagtagacctgttactggatccgtctgttctgcaccgtgtaatggaaacgtcgccgtgtctaccggtttgtgcgccccatgtggccagctaaacacaacctgcgggggtggctcctgtggcgtcggctcttgtggtatctctagcctgggagtgggtagttgtgggtcaagttgtcgtaaatgttag

SEQ ID NO: 334126 - DNA, 1455 bp, Artificial Sequence
  derived and/or modified sequence
atgacctgcggcagtggctttggcggacgggctttctcatgtatatccgcctgcggccctagacccggacgatgttgtattactgcagcgccttatagggggatttcttgctaccgcggactcactggaggcttcggctcccactctgtatgtggcggttttcgcgcaggcagttgtggcaggtctttcgggtacagatccgggggtgtttgcgggccatcacctccttgcattacaactgtgtcagtcaatgagagtctgctgacacccctaaatctggagatcgacccaaatgctcagtgcgttaaacaggaggagaaggagcagataaagagccttaatagtagatttgccgctttcatcgacaaagtgaggttcttagagcagcaaaataagctgctggagactaagttgcagttttaccagaatagagaatgctgtcagtcaaacctggagccccttttcgaaggctatatcgaaactctcaggcgagaagccgagtgtgtggaggctgatagtggcagattggcttccgaactgaatcacgtgcaggaggtgttagagggctacaaaaagaagtacgaggaggaggtgtcccttagggcaactgcggagaatgaattcgtagccttgaaaaaagatgtagattgcgcttatctgcgaaagtctgacttggaagcaaacgtagaggcccttatacaggagatcgactttctgagacgcctgtacgaggaggagattcttatcctacaaagtcatatcagcgatacctccgtagtggtgaaacttgataactctcgggatctgaacatggactgcatcattgcagaaattaaggcccagtatgatgacatagtcaccaggagccgagccgaagcagagagttggtacagaagcaagtgcgaggagatgaaggctaccgtgatcaggcacggagagaccctgagacggaccaaagaggagattaatgagttgaaccggatgatccaacggttgactgcagaggtagagaacgcgaagtgccagaactccaaattagaagcagcggtagcgcagagcgagcagcagggggaggccgctctcagcgacgctcgatgcaaattagcggagctagagggcgcattacagaaggcaaaacaggatatggcctgcctcatccgggaataccaagaagtaatgaacagcaaattgggactcgatatcgaaattgccacctaccgccgactgcttgaaggagaagagcagaggctctgtgagggcatcggcgctgtgaatgtctgcgtttccagttcccggggtggagtggtctgtggggatctctgcgtgagtggctctaggcctgtgaccgggagcgtgtgtagtgccccttgcaacggaaatgtagcagtctctaccggcctgtgtgctccatgcggacaagtgggatcttgcggaagtagctgccggaagtgttag

SEQ ID NO: 334127 - DNA, 1518 bp, Artificial Sequence
  derived and/or modified sequence
atgacctgcggcagcggcttcggcggcagagccttcagctgcatcagcgcctgcggccccagacccggcagatgctgcatcaccgccgccccctacagaggcatcagctgctacagaggcctgaccggcggcttcggcagccacagcgtgtgcggcggcttcagagccggcagctgcggcagaagcttcggctacagaagcggcggcgtgtgcggccccagccccccctgcatcaccaccgtgagcgtgaacgagagcctgctgacccccctgaacctggagatcgaccccaacgcccagtgcgtgaagcaggaggagaaggagcagatcaagagcctgaacagcagattcgccgccttcatcgacaaggtgagattcctggagcagcagaacaagctgctggagaccaagctgcagttctaccagaacagagagtgctgccagagcaacctggagcccctgttcgagggctacatcgagaccctgagaagagaggccgagtgcgtggaggccgacagcggcagactggccagcgagctgaaccacgtgcaggaggtgctggagggctacaagaagaagtacgaggaggaggtgagcctgagagccaccgccgagaacgagttcgtggccctgaagaaggacgtggactgcgcctacctgagaaagagcgacctggaggccaacgtggaggccctgatccaggagatcgacttcctgagaagactgtacgaggaggagatcctgatcctgcagagccacatcagcgacaccagcgtggtggtgaagctggacaacagcagagacctgaacatggactgcatcatcgccgagatcaaggcccagtacgacgacatcgtgaccagaagcagagccgaggccgagagctggtacagaagcaagtgcgaggagatgaaggccaccgtgatcagacacggcgagaccctgagaagaaccaaggaggagatcaacgagctgaacagaatgatccagagactgaccgccgaggtggagaacgccaagtgccagaacagcaagctggaggccgccgtggcccagagcgagcagcagggcgaggccgccctgagcgacgccagatgcaagctggccgagctggagggcgccctgcagaaggccaagcaggacatggcctgcctgatcagagagtaccaggaggtgatgaacagcaagctgggcctggacatcgagatcgccacctacagaagactgctggagggcgaggagcagagactgtgcgagggcatcggcgccgtgaacgtgtgcgtgagcagcagcagaggcggcgtggtgtgcggcgacctgtgcgtgagcggcagcagacccgtgaccggcagcgtgtgcagcgccccctgcaacggcaacgtggccgtgagcaccggcctgtgcgccccctgcggccagctgaacaccacctgcggcggcggcagctgcggcgtgggcagctgcggcatcagcagcctgggcgtgggcagctgcggcagcagctgcagaaagtgctag

SEQ ID NO: 334128 - DNA, 1455 bp, Artificial Sequence
  derived and/or modified sequence
atgacctgcggcagcggcttcggcggcagagccttcagctgcatcagcgcctgcggccccagacccggcagatgctgcatcaccgccgccccctacagaggcatcagctgctacagaggcctgaccggcggcttcggcagccacagcgtgtgcggcggcttcagagccggcagctgcggcagaagcttcggctacagaagcggcggcgtgtgcggccccagccccccctgcatcaccaccgtgagcgtgaacgagagcctgctgacccccctgaacctggagatcgaccccaacgcccagtgcgtgaagcaggaggagaaggagcagatcaagagcctgaacagcagattcgccgccttcatcgacaaggtgagattcctggagcagcagaacaagctgctggagaccaagctgcagttctaccagaacagagagtgctgccagagcaacctggagcccctgttcgagggctacatcgagaccctgagaagagaggccgagtgcgtggaggccgacagcggcagactggccagcgagctgaaccacgtgcaggaggtgctggagggctacaagaagaagtacgaggaggaggtgagcctgagagccaccgccgagaacgagttcgtggccctgaagaaggacgtggactgcgcctacctgagaaagagcgacctggaggccaacgtggaggccctgatccaggagatcgacttcctgagaagactgtacgaggaggagatcctgatcctgcagagccacatcagcgacaccagcgtggtggtgaagctggacaacagcagagacctgaacatggactgcatcatcgccgagatcaaggcccagtacgacgacatcgtgaccagaagcagagccgaggccgagagctggtacagaagcaagtgcgaggagatgaaggccaccgtgatcagacacggcgagaccctgagaagaaccaaggaggagatcaacgagctgaacagaatgatccagagactgaccgccgaggtggagaacgccaagtgccagaacagcaagctggaggccgccgtggcccagagcgagcagcagggcgaggccgccctgagcgacgccagatgcaagctggccgagctggagggcgccctgcagaaggccaagcaggacatggcctgcctgatcagagagtaccaggaggtgatgaacagcaagctgggcctggacatcgagatcgccacctacagaagactgctggagggcgaggagcagagactgtgcgagggcatcggcgccgtgaacgtgtgcgtgagcagcagcagaggcggcgtggtgtgcggcgacctgtgcgtgagcggcagcagacccgtgaccggcagcgtgtgcagcgccccctgcaacggcaacgtggccgtgagcaccggcctgtgcgccccctgcggccaggtgggcagctgcggcagcagctgcagaaagtgctag

SEQ ID NO: 334129 - DNA, 1461 bp, Artificial Sequence
  derived and/or modified sequence
atgacctgtggaagttattgcggcggtcgcgcatttagttgtatctcagcttgcggtccaagaccgggtcgttgctgtatcaccgcagccccttaccgggggatctcttgttatcgagggctgactggcggctttgggtcccacagtgtgtgtggggggttcagggcgggcagctgtggacgctcttttgggtatcgctcggggggcgtttgcgggccgtcccccccttgcatcacaacagtgagcgtcaacgagtccctgttaacaccacttaatctcgagattgacccgaacgcccagtgcgtgaaacaggaagagaaagagcagattaagtctcttaacagtaggttcgcagcgtttattgataaggtcaggtttctggagcagcagaacaagcttctggagaccaagcttcaattttatcagaatcgcgagtgctgtcaatcaaatctcgaacctctgttcgaagggtacatcgaaactctaagacgggaggcagaatgtgtcgaggctgacagcgggagactggcgagcgagctgaaccatgtacaagaggtgctcgagggttacaaaaagaagtatgaagaagaggtgtctctgcgcgcaactgctgagaatgaatttgtcgctctgaaaaaggacgtggattgcgcatacctacggaagagcgatctggaggccaacgtcgaagctctgattcaggagatcgatttcctgcgacggctgtatgaagaggagatccgggtgttacagtcccacattagcgatacctccgtggtggttaaactggataattctcgcgatctgaatatggactgtatcatcgcagagattaaagcccaatacgatgacattgtgacaaggagccgtgccgaagccgaaagttggtacagaagcaaatgcgaggaaatgaaagcgactgtgattcggcatggagagacacttcgacgtactaaagaggagataaatgagctgaaccgcatgatccagagacttacagcggaggtggagaatgctaaatgccagaactccaagcttgaggccgccgttgcacagtccgagcaacagggcgaggccgcactgtcagatgcaaggtgtaaactcgctgaactagagggagccctccaaaaagccaaacaagacatggcctgtctgatccgggaatatcaggaagtaatgaattccaaactgggtttggacatcgagatagccacatacaggaggctcctggagggcgaggagcagcgcctgtgtgaaggggttggatcggtgaatgtgtgcgtgtccagcagtcgcggaggggtggtctgtggtgacctatgcgcctctacaactgcccccgttgttagcacacgcgtgtcctcagttccgagcaatagcaacgtcgtggtgggtacaaccaatgcttgtgctccttctgctcgggtcggtgtctgtggcggctcctgtaaaagatgctag

SEQ ID NO: 334130 - DNA, 1461 bp, Artificial Sequence
  derived and/or modified sequence
atgacatgcggatcctattgcggtggtcgcgcattttcctgcataagtgcgtgtggccctaggcctgggcgatgctgtatcactgccgccccttaccggggaatcagctgctaccgcgggctgacaggtgggttcggctcccacagcgtctgcggtggatttagggcaggatcctgcggccgctcattcggatataggtccgggggcgtttgcggcccttcacccccctgcattacaacggtttcagtgaacgagtcattacttacccctctgaacctggaaatcgaccccaatgcacagtgcgtgaagcaggaagagaaggaacagattaaatcgctaaacagtcgttttgccgccttcatcgacaaggtccgctttttagagcagcagaacaagctgctggagacgaaactgcagttttaccaaaaccgcgagtgctgtcagagtaatctcgagccactgtttgagggctacattgaaactttgcgcagagaggctgaatgtgtggaggccgattccgggcggctggcgagtgaattgaaccatgttcaggaagtgttggagggatataagaaaaaatatgaagaagaggtgtctctgcgagccacagcagagaacgaattcgtggcattgaaaaaagatgtggattgcgcgtacctgcgaaagagcgatttggaagctaatgtggaagcactgatccaggagattgatttcttgagacgactgtacgaggaggagatccgtgtactgcagtcacatattagcgatacttcagtcgtggttaaacttgacaactcgcgcgacctaaatatggactgcatcatagcagagatcaaagctcagtacgacgacattgtcacgaggtcccgtgcagaggccgaatcctggtacagatccaagtgtgaagagatgaaggctacagtgatccgtcacggtgaaacgctcaggcggacaaaggaggagattaacgaactgaaccgtatgatccagaggctcaccgcggaggtcgaaaatgcaaagtgccaaaattccaagctcgaagccgccgtggcccaatcggagcagcaaggggaggctgctctgtctgacgcccgctgcaagctggcagaactggaaggtgctctacagaaagccaagcaggacatggcctgtcttattagggagtatcaggaagtgatgaattcaaagctgggattagatatcgaaatcgccacatacagacgcctcctggagggcgaggagcagaggctgtgtgagggagtcggctctgtgaatgtgtgtgtgtcttctagccgaggcggagtggtctgtggagacctctgcgcctctactacagcacctgtagtttccacccgggtgtcatcagtgccaagcaactctaacgttgtggtaggcaccactaatgcatgcgccccctcagcacgcgtcggagtctgcgggggctcatgcaaaaggtgttag

SEQ ID NO: 334131 - DNA, 1461 bp, Artificial Sequence
  derived and/or modified sequence
atgacatgcgggtcttattgcggcggtcgagccttttcttgcattagcgcatgcggacctcgaccgggcagatgctgcatcaccgcggcaccttacagaggtatcagttgttaccgcggattaacaggtgggttcggctcccatagtgtgtgcggaggtttccgggccggcagttgcggaagatcatttggataccgtagtggtggagtctgtggacccagccctccctgcataaccacagtttccgtgaacgaatccctgctgacccctctcaatctagagatcgatccaaatgcgcagtgcgtgaaacaagaggagaaggagcagattaagagtctcaactcccgttttgcagcatttattgataaagtaagatttttggaacagcagaacaagctgcttgaaacaaaactgcagttttaccagaatagggaatgctgccaatctaacttagaacccctctttgaagggtacattgaaacactgagacgagaagccgaatgtgtggaggctgattcagggcgtctggcctctgaactcaatcatgtccaggaggtgttggaaggctataaaaagaagtacgaagaggaggtctcacttcgggcaaccgctgagaatgaatttgtggcgttgaaaaaggacgtggattgcgcctacctccgaaaatcagacctggaagcgaatgtcgaagcccttattcaggaaatcgactttctgcgccgactatacgaggaagagataagagtactgcaatctcacattagcgataccagtgtggttgtgaaactggataacagtcgcgaccttaatatggattgcattatagcggaaatcaaggcccagtatgacgacatagtgacccggtcaagagccgaagctgagagctggtatcgctcaaaatgcgaggagatgaaggccaccgtgatccggcacggtgagacccttagaaggacaaaggaggaaattaatgagctgaatagaatgattcagcgtttgaccgccgaggtcgagaacgccaagtgtcagaactccaagctcgaggccgcggtggcccagtctgagcagcagggagaggctgcactgtctgatgctaggtgcaaattggccgagctcgaaggcgcccttcagaaggcgaagcaggatatggcctgcttgatcagagaataccaggaggtgatgaatagcaagcttggtttggatatcgagatagcaacgtacagaaggttgttggagggcgaggaacaaaggctgtgtgaaggagtgggaagtgtcaacgtgtgtgtgagctcatcccgcggcggcgtggtttgcggcgatctgtgtgcatccacaaccgcgccagtagtgagtactagggtttcctcagtgcccagcaattccaatgtggtggtaggaacaacaaacgcctgcgcccctagtgcacgggttggcgtatgtggcggttcatgtaagcggtgttag

SEQ ID NO: 334132 - DNA, 1461 bp, Artificial Sequence
  derived and/or modified sequence
atgacctgtggcagctactgcggcggccgggccttcagctgcatcagcgcctgtggcccccggcccggccgctgctgcatcacagctgccccctaccggggcatcagctgctaccggggcctgaccggcggcttcggcagccacagcgtgtgtggcggcttccgggccggcagctgtggccgcagctttggctacagaagtggaggagtgtgtggccccagccccccctgcatcaccaccgtgtctgtgaatgaaagcctgctgacccccctgaacctggagattgaccccaatgcccagtgtgtgaagcaggaggagaaggagcagatcaagagcctgaacagcagatttgctgccttcatcgacaaggtgcgcttcctggagcagcagaacaagctgctggagaccaagctgcagttctaccagaaccgggagtgctgccagagcaacctggagcccctgtttgagggctacatcgagaccctgcggcgggaggctgaatgtgtggaggccgacagcggccgcctggccagcgagctgaaccacgtgcaggaggtgctggagggctacaagaagaagtatgaggaggaggtgtccctgcgggccacagcagaaaatgaatttgtggccctgaagaaggatgtggactgtgcctacctgaggaagagtgacctggaggccaacgtggaggccctgatccaggagattgacttcctgcggcggctgtatgaggaggagatccgggtgctgcagagccacatcagtgacacctctgtggtggtgaagctggacaacagccgggacctgaacatggactgcatcatcgccgagatcaaggcccagtatgatgacatcgtgaccaggagcagagctgaggccgagagctggtaccgcagcaaatgtgaggagatgaaggccaccgtcatcagacatggagagaccctgcggaggaccaaggaggagatcaatgagctgaacaggatgatccagaggctgacagctgaggtggagaatgccaagtgccagaacagcaagctggaggccgctgtggcccagagcgagcagcagggcgaggccgccctgagtgatgcccgctgcaagctggccgagctggagggcgccctgcagaaggccaagcaggacatggcctgcctgatccgggagtaccaggaggtgatgaacagcaagctgggcctggacattgaaattgccacctacagaaggctgctggagggggaggagcagaggctgtgtgagggcgtgggctctgtgaatgtgtgtgtgagcagcagcagaggaggagtggtgtgtggggacctgtgtgccagcaccacagcccctgtggtgtccaccagggtgtcctctgtgcccagcaacagcaatgtggtggtgggcaccaccaatgcctgtgcccccagcgcccgggtgggcgtgtgtggcggcagctgcaagcgctgctag

SEQ ID NO: 334133 - DNA, 1461 bp, Artificial Sequence
  derived and/or modified sequence
atgacctgcggcagctactgcggcggccgggccttcagctgcatctccgcctgtgggcctcgtcccggacggtgctgcattaccgcggcaccttaccgaggcataagctgctaccgcggtttgactggcggctttgggagccatagtgtgtgcggaggattcagggcaggctcttgcggtaggtctttcgggtataggtctggaggagtgtgtgggcctagtcccccttgcatcactactgtgtctgttaatgaaagtctgctgactcctttgaacctggaaattgaccccaatgcccagtgcgttaagcaggaagagaaggagcagataaagtcactgaatagccggtttgccgcgtttatcgacaaagttcgattcttggaacagcagaacaagcttctcgaaactaaattgcagttctatcaaaaccgggagtgctgtcagtcaaatctcgagccactgttcgagggatacatcgaaacactgagaagggaggctgagtgtgtagaggccgacagtggccgccttgcctccgagttgaatcatgtgcaagaagtgctcgaaggatacaaaaagaagtatgaggaagaggtatccctcagagcaaccgccgaaaacgagttcgtggctctgaaaaaggatgtggactgcgcctatctccgcaaatctgacctggaagcgaacgtcgaagccctgatccaggaaattgactttcttaggagactctacgaagaagagatccgggtgctgcagtcacacatatctgatacaagtgtcgtcgtcaaactggataactcccgggatctgaacatggactgcatcattgccgagatcaaggcccagtacgacgatattgttacccgatctcgggcagaggcagagtcgtggtatagatccaaatgtgaagagatgaaagctacagttattcgccatggggagaccctccggcgaaccaaagaggagataaatgagctgaatagaatgatacagcggttaaccgcggaggtcgaaaatgctaagtgccagaatagtaagcttgaggctgctgtagcacaatccgagcagcagggagaggcagctctctccgatgcccgctgcaaattggcggaactggagggcgcactgcagaaagcgaagcaggatatggcctgccttatacgagaataccaagaggtcatgaactcaaagctaggtctcgacattgagattgcaacataccgtaggctcttagaaggagaagagcagaggctttgcgaaggcgtggggtctgtgaacgtctgcgtgtctagctctcgcggcggagtggtctgtggtgatttgtgtgcctcaactaccgccccagttgtcagcacgagggtatcctcagtgccctccaactcaaacgtcgtggtaggtaccacaaacgcatgcgcccctagcgctagagtgggcgtttgcgggggatcctgcaagagatgctag

SEQ ID NO: 334134 - DNA, 1461 bp, Artificial Sequence
  derived and/or modified sequence
atgacctgcggcagctactgcggcggccgggccttcagctgcatctcagcctgcggcccccgtcctggaaggtgctgcatcacagctgctccttacaggggcatatcatgttacaggggactcactggcggctttggatcccacagcgtctgcggagggtttagagccggctcatgtgggcgtagcttcggatacaggagcggcggcgtttgtggaccgagtcccccctgtattacaacagtgagtgtcaatgaatccctcctgaccccattgaacctggagatagatccaaacgcccagtgtgtgaagcaggaagaaaaggagcagattaaatctctgaattccaggtttgcagctttcatcgacaaggtgcggtttctcgagcagcagaataagctgctagagacaaaactccagttttaccagaacagagaatgttgccaatcaaatcttgagcccctttttgaaggatatatcgagacattgagacgtgaagctgagtgcgtggaggctgactctggccgcctcgcaagcgagttaaaccacgtgcaagaagttttggaagggtataagaaaaagtatgaagaggaggtgtcactcagagccacagcagagaacgaattcgtcgctctgaaaaaggacgtcgactgcgcgtacctgcgcaaatccgacctggaggcaaacgtagaggccctgattcaggaaatagactttttgaggcggctatatgaagaagagattagggttctacagtcccacatctcggacacctcagtggtcgttaaattggacaactcccgcgacctgaacatggattgcataatagctgagatcaaggcccagtacgacgatatcgtaacccggtcaagggctgaagccgagtcgtggtatcgcagcaagtgcgaggagatgaaagcgaccgtaattaggcacggcgaaactctgcgcaggacgaaggaagagatcaacgagctgaaccgcatgatccaaaggctgactgcagaggtcgaaaacgccaagtgccagaattcgaaactggaggcggcagttgcacagtctgagcagcagggagaggccgcccttagcgatgcaagatgtaagctcgcagagctcgagggcgctctgcaaaaggccaagcaggatatggcctgtctgataagggagtaccaagaggtgatgaatagcaagctaggcctcgatattgagatcgctacttatcgccgtcttttggagggtgaggaacagcgcttatgtgagggcgtcggtagcgtcaacgtgtgcgtgtcttcttctcgtggaggagttgtctgcggggacctttgtgcttctactaccgcccctgtagtcagcacacgagtgagctctgtacctagcaactctaacgtggttgtgggaacgacaaatgcatgtgcacctagcgctcgggtcggcgtgtgtggcggttcgtgcaaaaggtgttag

SEQ ID NO: 334135 - DNA, 1461 bp, Artificial Sequence
  derived and/or modified sequence
atgacctgcggcagctactgcggcggccgggccttcagctgcatcagtgcatgcgggccccggcctgggcggtgctgcatcaccgctgccccttatcgcggaatcagctgctaccgcggcctcacagggggcttcgggagccatagtgtttgtggcgggtttagagctggatcatgcggccgttccttcggatatcgcagcggaggcgtatgtgggccatcacccccgtgcataacgacggtgagcgtgaacgaaagtctccttaccccgcttaacctcgaaattgacccaaacgcccagtgcgttaaacaagaggaaaaggagcaaattaagagtctcaatagtcggtttgctgccttcatcgacaaggtgcgattcctggaacagcagaataaactcttagagaccaagctgcagttttatcagaatagagagtgctgccagagcaacctagagcctctgttcgagggctacattgaaacactcaggagagaagctgagtgcgtggaagccgattcaggacgcctcgccagtgagttgaaccacgtccaggaagtgttagaggggtataaaaagaagtatgaagaggaggtgagtcttcgagcgacagccgaaaatgagtttgttgccctgaagaaggatgttgattgcgcctatcttcgtaaaagcgaccttgaggcaaatgtcgaagccttgatacaagagattgactttctccgtcgactctatgaggaggagattagagttctgcagtcacatatctccgatacctcagtggtcgtgaagctagacaactcgcgggacctcaacatggactgtattatcgctgagattaaagcgcagtatgatgatatcgtcacaaggagtagggccgaggctgagtcatggtatcgctccaaatgcgaagaaatgaaggccacagttatccgtcatggcgagactctgcggaggacaaaagaggaaatcaatgagctcaatcgtatgatccagcgcttgaccgctgaggtggaaaatgcaaaatgccagaacagtaagcttgaggctgcagtggcccagagtgagcagcagggggaggccgccctctcggatgcacggtgtaagctcgccgagctagaaggggcactccaaaaggcaaagcaagatatggcgtgcttgataagagagtaccaggaggtgatgaattctaaattggggctggacatcgagattgcaacttataggaggctcctggagggcgaggagcagaggctgtgtgagggtgtcggatctgtgaatgtatgtgtgagttcaagtagaggtggggtcgtttgtggagatttgtgcgcctcgacgaccgctcctgttgtttctacacgagtgagctccgtgccttcgaacagcaacgtggtagtggggacgaccaacgcctgcgccccctccgctcgagtaggtgtttgtgggggaagctgtaagcgttgttag

SEQ ID NO: 334136 - DNA, 1461 bp, Artificial Sequence
  derived and/or modified sequence
atgacatgcggcagttattgtggcggaagagccttcagctgtatatctgcatgtggacctaggccaggtaggtgctgtataactgccgcaccctatcgcggaatttcttgttacagaggcctgaccgggggtttcgggagccattcagtctgtgggggtttcagagctggcagctgcggccgaagtttcggctacagatctggaggggtgtgcggcccttcaccaccgtgcattaccactgtctctgtaaacgagtcactactgacgcctctcaacctggagatcgaccccaatgcacagtgtgtgaagcaggaggagaaagagcagataaaatcactaaacagcagattcgccgctttcattgataaggtccgtttcctggagcagcagaataagttgttagaaacaaagctgcagttctatcagaatagggagtgttgtcaaagcaatctggaacccctgttcgagggatatattgagacactcaggcgcgaggccgaatgtgtagaagccgattcaggccgactcgccagtgagctgaaccacgtgcaggaggttcttgaagggtataaaaagaagtacgaagaggaagtgtctctccgagctaccgctgagaacgagtttgttgccctgaaaaaggacgtggactgtgcatatctgaggaagtcagacttggaggctaatgtggaggccttgatacaggagattgattttctacggcgtctttacgaggaggagatcagggtgctccagagccacatttccgacacttccgtcgtcgttaagctggataactcaagggaccttaacatggattgtatcatcgctgagatcaaagcccagtacgatgacatcgtcacacgctctcgcgcagaggctgaaagctggtataggtccaagtgcgaggaaatgaaagctactgtaataagacatggtgagaccttgaggaggaccaaagaggagataaacgagctcaacagaatgatccaaaggttgactgctgaggtagagaacgccaaatgccagaactcaaaattggaagcagccgtcgcccagtcagagcagcagggagaggctgccctgagcgacgccagatgtaagctcgctgagctcgagggagccctgcaaaaggcaaagcaagatatggcttgtctcattagggagtatcaggaggtgatgaactccaaactgggccttgatattgagatcgccacgtaccgcaggctgttggaaggcgaggagcagaggctgtgtgagggggtgggatcggtaaatgtttgtgttagttccagccgaggtggggtggtgtgtggtgatctgtgtgcgtcaaccaccgctccagtagtctcaacgagggtgtcctcggtcccatccaactccaatgtggtggtcggaacaacaaacgcctgtgccccatccgccagagtcggggtttgcggtggcagctgcaagcggtgctag

SEQ ID NO: 334137 - DNA, 1461 bp, Artificial Sequence
  derived and/or modified sequence
atgacctgtgggagctattgcggaggcagagcgttcagctgtatctccgcctgtggacccagaccgggacggtgttgcatcacagccgcaccctatcggggtatttcctgctacaggggcctcacagggggtttcggatcacatagcgtgtgcggcggatttcgggctgggagctgtggacggagcttcggctaccgctcaggcggagtctgtggccctagccccccatgcatcacgacagtgtccgtaaatgagagcctcttgacacctctgaaccttgagatcgaccctaacgcccagtgcgtcaaacaggaagagaaagaacaaatcaaatctttgaactcacgattcgcggctttcatcgacaaggtacgttttctggagcaacagaataaattgttagagaccaagctccagttctatcagaacagggagtgttgtcaaagcaatctggagcctctgttcgaaggctacattgagacactaagacgcgaggctgagtgtgtcgaagcagatagcgggaggctcgccagcgagctcaaccacgtccaggaggttcttgagggatacaaaaagaaatatgaggaggaagtctcgttgagggccacagcggaaaacgaattcgtcgcccttaagaaagacgtcgattgcgcttacctgaggaaaagcgacctggaggccaatgttgaagcattgattcaagaaattgactttctgcgccgattgtacgaggaggagattcgcgtcctacagtcacatatcagcgacacgtcagtggtagtaaaactggacaactcccgtgacctgaacatggactgtatcatcgcggagattaaagcgcagtatgatgatatcgtgactcggagtcgggctgaagccgaatcctggtatcgaagcaagtgcgaggaaatgaaggctaccgtaatcagacacggagaaaccctgaggcggactaaagaggagattaacgagcttaaccgtatgattcaaagattaactgcagaggttgaaaatgcgaaatgtcagaacagtaaactcgaagcagccgtggctcagtcagagcagcagggtgaagctgccttatctgacgcccgatgtaagctggcggagctggaaggggctctgcagaaagccaaacaggacatggcctgcctcatacgtgagtaccaggaggtgatgaacagtaagcttgggctggacatcgaaatcgccacttatcggagattgttagagggagaggaacagaggttatgtgagggggtcggatccgtgaacgtctgcgtgagtagcagtcggggtggagttgtctgcggagacctgtgcgccagcacaaccgctccggtcgtctccacccgagtgagctccgtccctagtaattccaacgtggtggtggggactacaaacgcatgcgccccatccgccagggttggtgtctgtggtggctcctgtaagcggtgttag

SEQ ID NO: 334138 - DNA, 1461 bp, Artificial Sequence
  derived and/or modified sequence
atgacctgtgggtcttattgcgggggtagggccttttcgtgtatcagtgcttgcggccctaggcccggtcgctgctgcataaccgcggcaccttatcggggaattagctgctataggggcctcacaggagggttcgggtcccacagtgtgtgcggcggattcagagcaggctcttgcggacgctcgtttgggtataggagtgggggtgtgtgcgggccaagcccaccctgtatcaccaccgtgtcagttaacgaaagtctgctgactcctctcaacttggaaatcgatcccaatgcccagtgtgttaagcaggaagagaaagagcagataaaaagtttaaattcccgattcgccgctttcatcgataaggtgagattcctggagcagcagaacaaactgctggaaactaagctgcagttctatcagaatagggagtgttgccagtccaacttggaaccgctctttgaaggatacattgagacccttcgtagagaggctgaatgcgtggaggcagatagcggcagactggcttcagaacttaatcacgtccaggaggtgctggaggggtacaagaaaaagtacgaggaggaggtgtcactgagagcaacagctgagaatgagttcgtagccctgaagaaggacgtagattgcgcatatttgaggaagtccgatctggaggcaaatgtcgaggccctgatccaggaaatagacttcctaaggaggttgtacgaggaagaaatccgtgtgctgcagtctcatatctctgatacctctgttgtcgtgaaactcgataatagtagagatttgaacatggactgcatcattgctgagataaaagctcagtatgacgacatagtgacgcgctcaagagccgaagccgagagctggtatcggtcaaagtgtgaagagatgaaggctaccgtgatacgccatggcgaaactctgcgcaggactaaggaagaaataaatgaactcaaccggatgatacagcgtctcacagccgaggtcgaaaatgctaagtgtcagaactcaaaactggaagctgctgtggcacaaagtgagcagcagggcgaggccgcattatctgacgctaggtgcaagctggccgaacttgagggggcactccagaaggccaagcaagacatggcttgcctcatccgcgagtaccaggaggtcatgaactcaaaactgggactcgacatcgagatagcaacttatcgtcggttgctcgaaggagaggagcagagactttgtgagggagtgggatctgtcaacgtgtgcgtctctagcagtcggggaggagtggtgtgtggtgacctgtgcgctagcaccacagcacccgtggtgtctacacgagtgagcagtgtaccatctaacagtaatgtcgtcgtgggaaccacaaacgcttgtgctccatctgctcgtgtcggtgtctgtggaggcagttgcaagcgctgctag

SEQ ID NO: 334139 - DNA, 1461 bp, Artificial Sequence
  derived and/or modified sequence
atgacctgcggcagctactgcggcggcagagccttcagctgcatcagcgcctgcggccccagacccggcagatgctgcatcaccgccgccccctacagaggcatcagctgctacagaggcctgaccggcggcttcggcagccacagcgtgtgcggcggcttcagagccggcagctgcggcagaagcttcggctacagaagcggcggcgtgtgcggccccagccccccctgcatcaccaccgtgagcgtgaacgagagcctgctgacccccctgaacctggagatcgaccccaacgcccagtgcgtgaagcaggaggagaaggagcagatcaagagcctgaacagcagattcgccgccttcatcgacaaggtgagattcctggagcagcagaacaagctgctggagaccaagctgcagttctaccagaacagagagtgctgccagagcaacctggagcccctgttcgagggctacatcgagaccctgagaagagaggccgagtgcgtggaggccgacagcggcagactggccagcgagctgaaccacgtgcaggaggtgctggagggctacaagaagaagtacgaggaggaggtgagcctgagagccaccgccgagaacgagttcgtggccctgaagaaggacgtggactgcgcctacctgagaaagagcgacctggaggccaacgtggaggccctgatccaggagatcgacttcctgagaagactgtacgaggaggagatcagagtgctgcagagccacatcagcgacaccagcgtggtggtgaagctggacaacagcagagacctgaacatggactgcatcatcgccgagatcaaggcccagtacgacgacatcgtgaccagaagcagagccgaggccgagagctggtacagaagcaagtgcgaggagatgaaggccaccgtgatcagacacggcgagaccctgagaagaaccaaggaggagatcaacgagctgaacagaatgatccagagactgaccgccgaggtggagaacgccaagtgccagaacagcaagctggaggccgccgtggcccagagcgagcagcagggcgaggccgccctgagcgacgccagatgcaagctggccgagctggagggcgccctgcagaaggccaagcaggacatggcctgcctgatcagagagtaccaggaggtgatgaacagcaagctgggcctggacatcgagatcgccacctacagaagactgctggagggcgaggagcagagactgtgcgagggcgtgggcagcgtgaacgtgtgcgtgagcagcagcagaggcggcgtggtgtgcggcgacctgtgcgccagcaccaccgcccccgtggtgagcaccagagtgagcagcgtgcccagcaacagcaacgtggtggtgggcaccaccaacgcctgcgcccccagcgccagagtgggcgtgtgcggcggcagctgcaagagatgctag

SEQ ID NO: 334140 - DNA, 1461 bp, Artificial Sequence
  derived and/or modified sequence
atgacgtgcggtagctactgtggtgggagagccttctcttgtatttcagcttgtggccccagacccggcaggtgttgcatcaccgccgccccttatagagggatttcctgttacaggggactgacaggcggctttggatcccattctgtgtgtggtggattcagggctgggtcttgtggtaggtctttcggatacagatcaggaggagtgtgcgggccctctcccccatgtatcactacagtatctgtgaatgaatcactgctgacacctctaaatctcgagattgatcccaatgcacagtgcgtgaaacaggaagagaaagagcagataaaaagccttaactctcggtttgctgcatttatcgataaggtccgctttcttgagcaacagaacaagttacttgagacaaagctgcagttctaccagaaccgggaatgctgtcagtctaacctggagcccctgtttgaggggtacatagagacccttcgtagagaagccgagtgcgtggaggctgattccggcagattagcgtcagagctaaatcacgtccaggaagtgctggagggctataagaagaaatacgaagaagaggtgtctctgagagcaacagcggaaaacgaattcgtcgcactcaaaaaggacgttgactgcgcttatctgcgtaaatccgatctcgaagctaatgtcgaggcactcatccaggaaatcgatttcctgagaagactgtacgaagaggagatcagagttctccagtcacacatctccgataccagcgtggtggtgaagctggataacagtcgggacctgaacatggattgtattatcgcagagattaaggcccagtacgacgatattgtaactcgatcgcgggccgaggcggaaagctggtatcgcagcaagtgtgaagagatgaaggctactgtgatacggcacggagaaaccttgaggcgaaccaaagaagagattaacgagttgaaccggatgatccaacgtctcacggccgaggtggagaacgctaagtgtcagaactcaaagctcgaggctgccgtagcccagtccgaacaacagggtgaggccgccctgtctgatgcccggtgtaaactggccgaactggagggcgcgctgcagaaggctaagcaggacatggcatgcctgattagagagtatcaagaggttatgaatagtaaactgggcctggatatagagatcgcaacttatagaagactacttgagggagaggaacaaaggctgtgtgagggcgtgggatccgtaaacgtgtgtgtgagtagtagtcgaggcggggtcgtgtgtggagacctgtgtgccagtactactgcccccgtggtatccacccgtgtttcgtctgtgccctccaacagtaatgtcgtggtggggacaaccaatgcctgcgcaccaagtgctagggtgggtgtgtgcggtggatcttgtaaaagatgctag

SEQ ID NO: 334141 - DNA, 1461 bp, Artificial Sequence
  derived and/or modified sequence
atgacctgcggcagctactgcggcggccgggccttcagctgcatcagcgcatgtggtccacgacccggccgctgttgtattacggctgctccctacagagggatatcctgctaccgaggactcacgggtggcttcggtagtcactccgtgtgtggcggttttagagcgggctcctgcggtagaagttttggctataggtcggggggagtgtgtggaccgagccccccctgtattaccaccgtgtccgtgaacgaatcgctgctgactccactgaatcttgagatcgaccctaatgctcaatgcgtgaaacaggaagagaaggaacagattaaaagcctcaacagcaggttcgcagctttcatcgataaggttagatttctggagcaacagaacaaactcttggaaaccaagctgcaattttatcagaacagagagtgttgtcaatccaacctcgagcccctgttcgaaggctatattgaaacactgagaagggaagccgaatgtgttgaagccgatagtggccggctggccagcgagctcaatcacgttcaggaggtgctggaagggtacaaaaaaaagtacgaggaggaagtgtctcttcgtgccacagccgaaaatgagttcgtggctctgaagaaagacgtcgactgtgcgtatctgcggaaaagtgacctggaggcgaatgtcgaggcacttatccaggaaatcgattttctgagacgtttgtatgaagaagagataagggtcctgcagtcccacatcagtgatacaagcgtggtggttaaactggacaactcaagagatctgaacatggattgtattatcgccgagattaaggcccagtacgacgatattgtgaccagaagtcgagccgaggccgagtcctggtataggtccaaatgcgaggagatgaaagcaaccgtgataagacatggggaaacattgagacgaactaaagaagagattaatgagctgaacagaatgatacaaaggctgaccgcggaagtcgaaaatgctaaatgccaaaacagcaagctcgaggccgccgtcgctcagagtgagcaacaaggcgaggccgccctgtccgatgcgagatgtaaactcgctgagctggagggggccctgcagaaagcaaagcaagatatggcttgcctcatccgagagtatcaggaagtgatgaattctaagttgggcctcgatattgagattgccacctatcgccgccttcttgaaggtgaagaacaaaggctctgcgagggcgtcggctctgtgaacgtctgcgtaagttcttcacggggcggggtagtgtgcggcgatctctgtgcatcaactacggcgcccgtggtaagcacccgagtttcttcagtcccttcgaatagcaatgtcgttgtaggcactactaacgcctgcgctcctagtgcccgcgtgggcgtgtgtggtgggagttgtaaacgctgctag

SEQ ID NO: 334142 - DNA, 1461 bp, Artificial Sequence
  derived and/or modified sequence
atgacatgtggcagctattgtggcggaagggccttcagctgtatctctgcctgcggaccccgtcccggtcgatgttgtatcaccgcggcaccttacagaggcatcagctgctataggggtctgactgggggtttcgggtctcactccgtgtgcgggggtttccgggcaggctcttgcggtcggtcttttggttacaggagcggcggagtttgtggtccttcacccccatgcattaccactgtaagtgtgaatgaatctctcctgacaccactgaatctggaaattgatcccaacgcccagtgcgtgaagcaagaagagaaagagcagatcaaatcacttaactcccgattcgcggcattcatagataaggtcaggtttttggagcagcagaataagcttctggagacaaaacttcagttctaccaaaatagagagtgctgtcaaagcaatctcgagcccctgttcgaggggtacattgagacattaaggagagaggctgaatgtgtggaagctgacagtggcaggctggcttcagagctgaaccacgttcaagaggtcctagaaggctataagaagaaatacgaagaagaagtatctctaagagcaacagccgaaaacgaattcgtggccctcaagaaggacgtcgactgtgcttatctgcgaaagtctgatttagaggctaacgtggaggctctgatccaggaaatcgatttcctccgacgcttgtacgaggaggaaatccgggtgctgcagtctcacattagtgatacgtcggttgtggtcaagcttgataacagtagagatctcaacatggattgtataatcgccgagatcaaagcacagtacgatgacatcgtgaccagatcgcgagcggaggcagaatcatggtatcgcagcaaatgcgaggagatgaaggcaacggtgatcaggcacggggagactctccggagaactaaggaagagatcaatgaactgaacaggatgatccagagactcactgccgaggtagaaaacgcgaagtgccagaatagcaaactcgaggcggctgtggctcagtcggagcaacagggcgaagccgcactgtctgatgctaggtgtaaactcgctgagttagaaggcgcactacagaaggccaagcaggatatggcatgtctgattcgagaataccaggaggtgatgaacagtaagctagggctggatatcgagatagcaacatacagacgcttactcgagggggaggagcagagactgtgcgaaggagtcggctccgtgaatgtttgtgtatccagctctagagggggagttgtttgcggagatttatgcgcgagcacaacagcccctgttgtttccaccagagtctcctccgtaccatcaaattctaacgtagtggtaggcacaaccaacgcttgtgccccttccgcaagggtaggggtgtgcggcggaagttgcaagagatgctag

SEQ ID NO: 334143 - protein, 142 aa, Artificial Sequence
  derived and/or modified sequence
MRFFVPLFLVGILFPAILAKQFTKCELSQLLKDIDGYGGIALPELICTMFHTSGYDTQAIVENNESTEYGLFQISNKLWCKSSQVPQSRNICDISCDKFLDDDITDDIMCAKKILDIKGIDYWLAHKALCTEKLEQWLCEKL

SEQ ID NO: 334144 - DNA, 728 bp, Artificial Sequence
  derived and/or modified sequence
atttcaggttcttgggggtagccaaaatgaggttctttgtccctctgttcctggtgggcatcctgttccctgccatcctggccaagcaattcacaaaatgtgagctgtcccagctgctgaaagacatagatggttatggaggcatcgctttgcctgaattgatctgtaccatgtttcacaccagtggttatgacacacaagccatagttgaaaacaatgaaagcacggaatatggactcttccagatcagtaataagctttggtgcaagagcagccaggtccctcagtcaaggaacatctgtgacatctcctgtgacaagttcctggatgatgacattactgatgacataatgtgtgccaagaagatcctggatattaaaggaattgactactggttggcccataaagccctctgcactgagaagctggaacagtggctttgtgagaagttgtgagtgtctgctgtccttggcacccctgcccactccacactcctggaatacctcttccctaatgccacctcagtttgtttctttctgttcccccaaagcttatctgtctctgagccttgggccctgtagtgacatcaccgaattcttgaagactattttccagggatgcctgagtggtgcactgagctctagacccttactcagtgccttcgatggcactttcactacagcacagatttcacctctgtcttgaataaaggtcccactttgaagtca

SEQ ID NO: 334145 - DNA, 429 bp, Artificial Sequence
  derived and/or modified sequence
atgcgcttctttgtgccccttttcttagtgggtattctgttcccagctatattggctaagcagttcacaaagtgcgaactctcccagctgctgaaggatattgacgggtatggaggaatcgctctgccagaactgatctgcactatgttccacacaagtggctatgacacgcaggctatcgttgagaataacgaatctacggagtacggactttttcagatctctaataaactttggtgtaaaagctcacaggttcctcaatcacgcaacatatgtgatatttcatgcgataaattcttagacgatgatatcacggacgatatcatgtgcgccaagaagattctggacataaaaggcatcgactactggctggcacataaagccctctgtacagagaaactggaacagtggctctgtgagaagttgtag

SEQ ID NO: 334146 - DNA, 429 bp, Artificial Sequence
  derived and/or modified sequence
atgaggttctttgtgcccctcttcctggtgggcatcctcttccctgccatcctggccaagcagttcaccaagtgtgagctgagccagctgctgaaggacattgatggctatggaggcatcgccctgcctgagctgatctgcaccatgttccacaccagcggctatgacacccaggccatcgtggagaacaatgaaagcacagaatatggcctcttccagatcagcaacaagctgtggtgcaagagcagccaggtgccccagagcaggaacatctgtgacatcagctgtgacaagttcctggatgatgacatcacagatgacatcatgtgtgccaagaagatcctggacatcaagggcatcgactactggctggcccacaaggccctgtgcacagagaagctggagcagtggctgtgtgagaagctgtag

SEQ ID NO: 334147 - DNA, 429 bp, Artificial Sequence
  derived and/or modified sequence
atgcggttcttcgtgcccctgttcctggtgggcatcctgttccccgcgatcctcgctaagcaattcacgaagtgtgagctgtcccagctcctgaaggatattgacggctacggaggcatcgcactgcccgagttaatatgtacaatgtttcacactagtggatatgacacccaggctatcgttgagaataatgaaagcacagagtacgggctgttccagattagtaacaagctgtggtgcaagtcatcccaggtgccccagagtagaaacatttgcgacatcagctgtgataaatttcttgacgatgatattaccgatgatattatgtgcgctaaaaagatcctggacatcaagggcattgattactggctcgcccacaaggctctctgtaccgagaagttggaacaatggctgtgcgagaagctttag

SEQ ID NO: 334148 - DNA, 429 bp, Artificial Sequence
  derived and/or modified sequence
atgcgcttctttgtgccgctgttcttggtgggcattctcttccctgccattttagcaaaacaatttacaaaatgtgagctgagccagctccttaaagacatcgacgggtacggcggtatcgccctccctgagttaatttgcacaatgttccacacttccggatatgatacccaggctatagtggagaacaacgagagcaccgaatatggcctgtttcagataagcaacaagctgtggtgtaagagcagccaggtccctcagtctcgcaatatatgcgatatttcctgcgacaagttcctcgacgacgacatcaccgatgatataatgtgtgcgaaaaaaattctcgatattaagggcatcgactactggctcgcacacaaggctctgtgcaccgaaaaactcgagcagtggctatgtgagaagctttag

SEQ ID NO: 334149 - DNA, 429 bp, Artificial Sequence
  derived and/or modified sequence
atgagattcttcgtgcccctgttcctggtgggcatcctgttccccgccatcctggccaagcagttcaccaagtgcgagctgagccagctgctgaaggacatcgacggctacggcggcatcgccctgcccgagctgatctgcaccatgttccacaccagcggctacgacacccaggccatcgtggagaacaacgagagcaccgagtacggcctgttccagatcagcaacaagctgtggtgcaagagcagccaggtgccccagagcagaaacatctgcgacatcagctgcgacaagttcctggacgacgacatcaccgacgacatcatgtgcgccaagaagatcctggacatcaagggcatcgactactggctggcccacaaggccctgtgcaccgagaagctggagcagtggctgtgcgagaagctgtag

SEQ ID NO: 334150 - DNA, 1641 bp, Artificial Sequence
  derived and/or modified sequence
atgcgcctgtttgtctccgatggggttccagggtgcttacctgtgctagcagccgcaggcagggcccggggccgggccgaagttctgattagcacagtgggccccgaggattgcgttgtcccattcctcactaggccgaaggtgccagtcctgcagctggattccggaaattatctgttctccacctccgccatctgccgctatttctttcttttgtcagggtgggaacaggatgacctgacaaaccagtggcttgaatgggaggccacagagctccaaccagctctaagcgccgcactgtattacctggttgtgcaaggaaaaaagggagaagacgtgctcggcagtgtgcgcagagccctgactcatatagatcacagtcttagtaggcagaattgcccattcttagctggcgagaccgagtccctggctgatattgtgctatggggcgccctctatcccctcctccaggacccagcctacctgcccgaggagcttagcgctctgcactcctggtttcaaaccctgtcaacacaggaaccgtgccagcgcgcggctgagaccgtgctcaaacagcagggtgtgcttgctctgcgcccatacctgcagaagcagccccagccttcgccggccgagggccgagctgtgactaatgagcccgaagaagaggagttggccacactgagcgaagaggaaattgcaatggcggtcacagcatgggagaaaggcctggagtcactgccacccctcaggcctcagcaaaatcccgtactgcccgtggctggggaaagaaatgtattgataacgagcgcactaccatacgttaacaatgtgcctcatctgggaaacatcatcggctgtgtcctctccgcagacgtgtttgcgcgatacagtaggttgcgccaatggaacacactctatctgtgcggaactgatgaatacgggacagctactgaaactaaggcgctggaggagggcctcacacctcaggaaatttgcgataaatatcatatcattcacgccgacatttaccgttggttcaacatcagcttcgacatctttggcaggaccaccaccccccagcaaaccaaaatcacccaggatatcttccaacaactcttgaaacggggcttcgttctgcaggacacagtggagcaactgcgctgcgagcattgcgcaagatttctggcagaccgttttgttgaaggtgtttgtccattctgcggctatgaggaagcacggggggaccagtgcgacaagtgcggtaagctgatcaatgctgtggagctaaaaaagcctcaatgtaaggtgtgtcgtagctgtcccgtcgtacagtcatctcagcacctcttcctggacctgcccaaactcgagaagcgactggaggaatggctaggaaggaccctgcctgggtccgactggactcctaatgcacagttcatcacccgcagttggctaagagacgggctgaaaccacgctgcataacccgggaccttaaatggggtactccggtccctctcgagggctttgaggacaaggtgttttacgtttggtttgacgctactatcggctacctgagcattacagctaactataccgaccagtgggagcggtggtggaagaatccagaacagccttag

SEQ ID NO: 334151 - DNA, 1641 bp, Artificial Sequence
  derived and/or modified sequence
atgaggctgtttgtgtctgatggagtgcccggctgcctgcctgtgctggccgctgctggccgggcccggggccgggcagaggtgctgatcagcacagtgggccctgaggactgtgtggtgcccttcctgacccggcccaaggtgcctgtgctgcagctggacagcggcaactacctgttcagcaccagcgccatctgccgctacttcttcctgctgagcggctgggagcaggatgacctgaccaaccagtggctggagtgggaggccacagagctgcagcctgccctgtctgctgccctgtactacctggtggtgcagggcaagaagggagaagatgtgctgggctctgtgcggcgggccctgacccacatcgaccacagcctgagccggcagaactgccccttcctggccggggagacagagagcctggccgacatcgtgctgtggggcgccctgtaccccctgctgcaggaccctgcctacctgcctgaggagctgagcgccctgcacagctggttccagaccctgagcacccaggagccctgccagagagctgctgagaccgtgctgaagcagcagggcgtgctggccctgcggccctacctgcagaagcagccccagcccagccctgctgagggccgggctgtgaccaatgaacctgaggaggaggagctggccaccctgtctgaggaggagatcgccatggctgtgacagcctgggagaagggcctggagagcctgccccccctgcggccccagcagaaccctgtgctgcctgtggccggggagagaaatgtgctgatcaccagcgccctgccctacgtgaacaacgtgccccacctgggcaacatcatcggctgtgtgctgtctgcagatgtgtttgcccgctacagccggctgcggcagtggaacaccctgtacctgtgtggcacagatgaatatggaacagccacagagaccaaggccctggaggagggcctgaccccccaggagatctgtgacaagtaccacatcatccatgctgacatctaccgctggttcaacatcagctttgacatcttcggccgcaccaccaccccccagcagaccaagatcacccaggacatcttccagcagctgctgaagaggggctttgtgctgcaggacacagtggagcagctgcgctgtgagcactgtgcccgcttcctggccgacagatttgtggagggcgtgtgccccttctgtggctatgaggaggcccggggggaccagtgtgacaagtgtgggaagctgatcaatgctgtggagctgaagaagccccagtgcaaggtgtgccgcagctgccctgtggtgcagagcagccagcacctgttcctggacctgcccaagctggagaagaggctggaggagtggctgggccgcaccctgcccggcagtgactggaccccaaatgcccagttcatcaccaggtcctggctgagagatggcctgaagccccgctgcatcacccgggacctgaagtggggcacccctgtgcccctggagggctttgaggacaaggtgttctacgtgtggtttgatgccaccatcggctacctgagcatcacagccaactacacagaccagtgggagcgctggtggaagaaccctgagcagccctag

SEQ ID NO: 334152 - DNA, 3592 bp, Artificial Sequence
  derived and/or modified sequence
tgttgttgataggatggatatgtacactaacttccactttgtcactaattccgcacatggtaactccgaactctaaaactctgaccgttaagagcttgcatcgagagccactgcgagtagctgctgttatgacatggccatttcattctccacaacaagagaagcagccgcggcttcagtcaccgccctccagcagcgtaagaggataaaagtgcgacttgccctaaaacctaaacgtctcttctggatctccagaaaaaaagtgctgctctaggccgggcgcagtggctcacgcctgtaatcctagcactttggcaggccgaggcgggcggatcatctgaggtgaggacttcgagaccagcctagccaaaatggtcaaagcccgcctctactaaaaatacaaaaattagccgagcgtggtggcacgtgcctgtagtcccagctgcatgggaggctgaggccggagaatcacttgaaccctggaggcagaggttgcagcgagccaagaccgtgccactgcacttcagcccagcgttgcatgatgggagaaatagtctactttccggtagcggtgccagggcagtggcctaatacggaactccatttcccggcgtgcctcgcggaggccgctgaactcagaagcgggaggccggttccggttgcatcagcgagggattcacggcgaaatgagactgttcgtgagtgatggcgtcccgggttgcttgccggtgctggccgccgccgggagagcccggggcagagcagaggtgctcatcagcactgtaggcccggaagattgtgtggtcccgttcctgacccggcctaaggtccctgtcttgcagctggatagcggcaactacctcttctccactagtgcaatctgccgatatttttttttgttatctggctgggagcaagatgacctcactaaccagtggctggaatgggaagcgacagagctgcagccagctttgtctgctgccctgtactatttagtggtccaaggcaagaagggggaagatgttcttggttcagtgcggagagccctgactcacattgaccacagcttgagtcgtcagaactgtcctttcctggctggggagacagaatctctagccgacattgttttgtggggagccctatacccattactgcaagatcccgcctacctccctgaggagctgagtgccctgcacagctggttccagacactgagtacccaggaaccatgtcagcgagctgcagagactgtactgaaacagcaaggtgtcctggctctccggccttacctccaaaagcagccccagcccagccccgctgagggaagggctgtcaccaatgagcctgaggaggaggagctggctaccctatctgaggaggagattgctatggctgttactgcttgggagaagggcctagaaagtttgcccccgctgcggccccagcagaatccagtgttgcctgtggctggagaaaggaatgtgctcatcaccagtgccctcccttacgtcaacaatgtcccccaccttgggaacatcattggttgtgtgctcagtgccgatgtctttgccaggtactctcgcctccgccagtggaacaccctctatctgtgtgggacagatgagtatggtacagcaacagagaccaaggctctggaggagggactaaccccccaggagatctgcgacaagtaccacatcatccatgctgacatctaccgctggtttaacatttcgtttgatatttttggtcgcaccaccactccacagcagaccaaaatcacccaggacattttccagcagttgctgaaacgaggttttgtgctgcaagatactgtggagcaactgcgatgtgagcactgtgctcgcttcctggctgaccgcttcgtggagggcgtgtgtcccttctgtggctatgaggaggctcggggtgaccagtgtgacaagtgtggcaagctcatcaatgctgtcgagcttaagaagcctcagtgtaaagtctgccgatcatgccctgtggtgcagtcgagccagcacctgtttctggacctgcctaagctggagaagcgactggaggagtggttggggaggacattgcctggcagtgactggacacccaatgcccagtttatcacccgttcttggcttcgggatggcctcaagccacgctgcataacccgagacctcaaatggggaacccctgtacccttagaaggttttgaagacaaggtattctatgtctggtttgatgccactattggctatctgtccatcacagccaactacacagaccagtgggagagatggtggaagaacccagagcaaccctaggagctgaggataactataccttggtcagccacctcattgctacagagtacctgaactatgaggatgggaaattctctaagagccgcggtgtgggagtgtttggggacatggcccaggacacggggatccctgctgacatctggcgcttctatctgctgtacattcggcctgagggccaggacagtgctttctcctggacggacctgctgctgaagaataattctgagctgcttaacaacctgggcaacttcatcaacagagctgggatgtttgtgtctaagttctttgggggctatgtgcctgagatggtgctcacccctgatgatcagcgcctgctggcccatgtcaccctggagctccagcactatcaccagctacttgagaaggttcggatccgggatgccttgcgcagtatcctcaccatatctcgacatggcaaccaatatattcaggtgaatgagccctggaagcggattaaaggcagtgaggctgacaggcaacgggcaggaacagtgactggcttggcagtgaatatagctgccttgctctctgtcatgcttcagccttacatgcccacggttagtgccacaatccaggcccagctgcagctcccacctccagcctgcagtatcctgctgacaaacttcctgtgtaccttaccagcaggacaccagattggcacagtcagtcccttgttccaaaaattggaaaatgaccagattgaaagtttaaggcagcgctttggagggggccaggcaaaaacgtccccgaagccagcagttgtagagactgttacaacagccaagccacagcagatacaagcgctgatggatgaagtgacaaaacaaggaaacattgtccgagaactgaaagcacaaaaggcagacaagaacgaggttgctgcggaggtggcgaaactcttggatctaaagaaacagttggctgtagctgaggggaaaccccctgaagcccctaaaggaggtgaaacataggtacccccattttcatctgaagacaggacctcttgcaggtcctcataccaggcttccagctcccagctggacagtgtcccgaaggagaaaggcaatgactcagctgccatctctgcagttggatcagtctggaaaagcacatctgcaggataatggggagtggctggaacaagctccatgtagcaaacagtctatgccacaagttggcaagctggtctgatgcctgtttttgtaggtaaagttgtactggaatacagccacatctgtttattt

SEQ ID NO: 334153 - DNA, 1641 bp, Artificial Sequence
  derived and/or modified sequence
atgcggctgttcgtgagcgacggcgtgcccggctgcctgcccgtgctggcggccgcgggacgcgcacggggcagggccgaggtgctcatcagcaccgttggccccgaggattgcgtcgtgccattcttgacgagaccaaaagtgccagtgctccagctggacagcggtaattacttattttccacaagtgctatctgcagatatttttttctgcttagcgggtgggagcaggacgacctcacaaatcagtggctagaatgggaggctacggagctgcaaccagctctgagtgctgctctatactatttagtggtgcaaggcaaaaagggcgaggatgtcttggggtctgttcgccgtgccctcacccacattgatcacagcctctccagacagaactgccctttcttggctggcgagactgaaagtctagctgatatcgtcttgtggggtgcactgtatccactgctgcaggaccccgcctacctgccagaggagttgtcagctctgcattcctggtttcaaaccctcagtacccaggaaccatgccagagggcagctgaaacagtcctaaagcagcaaggagtcttggcacttaggccctatctccagaagcagccccagccaagccccgccgaggggagggcggtcaccaatgaaccagaggaagaggagctagcaacgttatcggaggaagagatcgcgatggccgtgaccgcttgggagaagggcctggagagtctgcctcccctgcggcctcagcagaatccggtcttgcccgtcgctggcgagagaaacgtgcttatcaccagtgcactcccttacgtgaataacgtgccgcatctaggtaacatcattggttgcgtcctgagcgctgacgtattcgctcggtactcccgcctgagacagtggaacacattgtacctttgtggcacagatgagtatggaactgccactgagacaaaggccctcgaggaggggctcactccccaggaaatctgcgataaataccacataattcatgctgacatttataggtggttcaatatctcgttcgacatatttgggaggaccacgactccccagcagaccaagatcactcaggacatctttcaacaactgttgaagcgaggctttgtgctgcaggatactgtagagcagctccgctgcgaacactgcgcgaggttccttgccgatcgattcgtggagggagtttgtccattctgcgggtacgaggaggctaggggtgatcagtgcgataaatgtggcaagttgattaatgcagttgagttgaagaaaccacagtgcaaagtgtgccgatcatgccctgtggtccagtcatcccagcatttgttcctcgatttgcctaaactggagaaacggctcgaggagtggctagggcgcactcttcctggttcagactggacacctaatgcccagttcatcacacgctcctggcttagagatgggctgaagcctcgttgtatcaccagagaccttaaatggggaacaccagtaccacttgaaggcttcgaagataaagtcttctatgtgtggtttgacgcgacgattggatacctcagtatcaccgcgaactatacggatcagtgggagcgctggtggaagaaccccgagcagccctag

SEQ ID NO: 334154 - DNA, 1641 bp, Artificial Sequence
  derived and/or modified sequence
atgagactgttcgtctctgatggagtgcccggatgcctgccggtgcttgcagccgctggtagagccagggggcgtgccgaggttcttatcagtaccgtcggtcccgaagattgcgtcgtgccattcctcacccgccctaaagtacctgtgctgcagttggattcaggtaactatcttttctccaccagcgcaatctgcagatatttctttctcctgtcaggctgggaacaagacgacttgactaatcaatggctggagtgggaagcaaccgaactgcagccggcattgagcgccgctctgtattacttggtggttcagggaaagaagggggaggacgttcttgggtcggttagacgcgcactgacgcacatagaccactccctatctcgtcagaattgccctttcctggcaggagagactgagtcacttgccgacatcgtcttgtggggcgcactgtacccactgctgcaggacccagcatacttgcccgaggaactttctgctctgcacagctggttccaaacactctcaacacaagaaccatgccagcgagccgcagagactgtgctgaagcagcagggtgtgctggccctgagaccgtacttacaaaaacagcctcagccaagccccgctgaggggcgagcagtcacaaatgagcctgaggaggaggaactggccaccctctctgaagaagagatcgcgatggccgtgactgcctgggagaaagggctggaaagcttgcctcccttgcgaccccagcagaaccctgtacttccagtggccggagaacgaaacgtgctgattacttctgcccttccttacgtgaataacgttccccatctcggaaatatcatcggttgcgtactgagcgctgacgtgtttgcacgctacagcagactgcggcaatggaatacactatatctgtgcgggactgacgaatatggcaccgcaactgaaactaaggccttggaggagggactgacaccgcaagagatatgcgataagtaccacatcatccatgccgacatctacagatggttcaatatctctttcgacatcttcgggagaactaccacccctcagcaaaccaaaatcactcaggatatctttcaacagctcctgaagaggggattcgttctgcaggatacggtggaacagcttcgctgtgagcactgtgccaggttcctcgctgaccgctttgttgagggtgtttgtcctttttgtggatatgaggaggcccgaggcgaccagtgtgataagtgcggcaaattaattaacgcagtcgaactgaaaaagcctcagtgcaaagtctgcaggagttgccctgtagttcagtcgtcccagcacctcttcctcgacttgccaaaacttgagaagcgcttggaagaatggcttgggcgtacactcccagggtcagactggacacctaacgcccagttcattacccggtcatggttgcgggatggcctcaaaccgagatgtattacacgtgacctgaagtggggaacccctgtgcctttggaagggttcgaggataaggtgttttacgtgtggttcgacgccacaataggatacctgagtattacagctaactacactgaccagtgggaacgatggtggaagaaccccgaacagccctag

SEQ ID NO: 334155 - DNA, 1641 bp, Artificial Sequence
  derived and/or modified sequence
atgagactgttcgtgagcgacggcgtgcccggctgcctgcccgtgctggccgccgccggcagagccagaggcagagccgaggtgctgatcagcaccgtgggccccgaggactgcgtggtgcccttcctgaccagacccaaggtgcccgtgctgcagctggacagcggcaactacctgttcagcaccagcgccatctgcagatacttcttcctgctgagcggctgggagcaggacgacctgaccaaccagtggctggagtgggaggccaccgagctgcagcccgccctgagcgccgccctgtactacctggtggtgcagggcaagaagggcgaggacgtgctgggcagcgtgagaagagccctgacccacatcgaccacagcctgagcagacagaactgccccttcctggccggcgagaccgagagcctggccgacatcgtgctgtggggcgccctgtaccccctgctgcaggaccccgcctacctgcccgaggagctgagcgccctgcacagctggttccagaccctgagcacccaggagccctgccagagagccgccgagaccgtgctgaagcagcagggcgtgctggccctgagaccctacctgcagaagcagccccagcccagccccgccgagggcagagccgtgaccaacgagcccgaggaggaggagctggccaccctgagcgaggaggagatcgccatggccgtgaccgcctgggagaagggcctggagagcctgccccccctgagaccccagcagaaccccgtgctgcccgtggccggcgagagaaacgtgctgatcaccagcgccctgccctacgtgaacaacgtgccccacctgggcaacatcatcggctgcgtgctgagcgccgacgtgttcgccagatacagcagactgagacagtggaacaccctgtacctgtgcggcaccgacgagtacggcaccgccaccgagaccaaggccctggaggagggcctgaccccccaggagatctgcgacaagtaccacatcatccacgccgacatctacagatggttcaacatcagcttcgacatcttcggcagaaccaccaccccccagcagaccaagatcacccaggacatcttccagcagctgctgaagagaggcttcgtgctgcaggacaccgtggagcagctgagatgcgagcactgcgccagattcctggccgacagattcgtggagggcgtgtgccccttctgcggctacgaggaggccagaggcgaccagtgcgacaagtgcggcaagctgatcaacgccgtggagctgaagaagccccagtgcaaggtgtgcagaagctgccccgtggtgcagagcagccagcacctgttcctggacctgcccaagctggagaagagactggaggagtggctgggcagaaccctgcccggcagcgactggacccccaacgcccagttcatcaccagaagctggctgagagacggcctgaagcccagatgcatcaccagagacctgaagtggggcacccccgtgcccctggagggcttcgaggacaaggtgttctacgtgtggttcgacgccaccatcggctacctgagcatcaccgccaactacaccgaccagtgggagagatggtggaagaaccccgagcagccctag

SEQ ID NO: 334156 - protein, 115 aa, Artificial Sequence
  derived and/or modified sequence
MQQFGGLEATGILDEATLALMKTPRCSLPDLPVLTQARRRRQAPAPTKWNKRNLSWRVRTFPRDSPLGHDTVRALMYYALKVWSDIAPLNFHEVAGSAADIQIDFSKADHNDGYP

SEQ ID NO: 334157 - DNA, 348 bp, Artificial Sequence
  derived and/or modified sequence
atgcagcagttcggcggcctggaggccaccggcatcctggacgaggccaccctggccctgatgaagacccccagatgcagcctgcccgacctgcccgtgctgacccaggccagaagaagaagacaggcccccgcccccaccaagtggaacaagagaaacctgagctggagagtgagaaccttccccagagacagccccctgggccacgacaccgtgagagccctgatgtactacgccctgaaggtgtggagcgacatcgcccccctgaacttccacgaggtggccggcagcgccgccgacatccagatcgacttcagcaaggccgaccacaacgacggctacccctag

SEQ ID NO: 334158 - DNA, 348 bp, Artificial Sequence
  derived and/or modified sequence
atgcagcagtttggcggcctggaggcaaccgggattctagacgaggccacacttgcattgatgaagactcccaggtgcagtctgccagacctccctgtcctgacccaggccagaagacgtcgccaggcccccgcccccacgaaatggaacaagagaaatttaagttggcgagttcgaacttttccaagggatagtcctctggggcatgacacagtgcgggcactcatgtattatgccttgaaagtttggagcgacattgctccactgaacttccatgaggttgcagggtcagcagctgatatacagatcgactttagcaaagccgaccacaacgatggatacccatag

SEQ ID NO: 334159 - DNA, 348 bp, Artificial Sequence
  derived and/or modified sequence
atgcagcagtttggaggcctggaggccaccggcatcctggatgaggccaccctggccctgatgaagaccccccgctgcagcctgcctgacctgcctgtgctgacccaggccaggagaagacggcaggccccagcccccaccaagtggaacaagaggaacctgtcctggagggtgaggaccttcccccgggacagccccctgggccatgacacagtgcgggccctgatgtactatgccctgaaggtgtggagcgacatcgcccccctgaacttccacgaggtggccggcagcgctgctgacatccagattgacttcagcaaggctgaccacaatgatggctacccctag

SEQ ID NO: 334160 - DNA, 348 bp, Artificial Sequence
  derived and/or modified sequence
atgcagcagttcggcggcctggaggccaccggcatcctggacgaggcaactttggcactaatgaaaactccacggtgtagcctgccagaccttcccgtcctgacccaagcgcgtagaaggaggcaggcacctgctccgactaaatggaacaaaaggaatctttcatggcgcgtacgtactttcccccgggattcccccttaggtcacgataccgtgcgggcgctcatgtattacgccctgaaggtctggagcgatatcgctcctttgaacttccacgaagttgctggctccgccgccgatattcagatcgattttagtaaagcagatcacaatgacggatatccatag

SEQ ID NO: 334161 - DNA, 348 bp, Artificial Sequence
  derived and/or modified sequence
atgcagcagtttggcggattagaggccaccggtattctggacgaggcaacactggcactcatgaagaccccccgatgctcgctgccagatctaccggttctaactcaggctaggaggcgaagacaagcaccagccccaaccaaatggaataagaggaacctatcctggcgtgtccgcacatttcctagagactccccgttaggccacgataccgtccgggcactgatgtactacgccttgaaagtatggagtgacattgccccactgaactttcacgaagttgctgggtcagccgctgatatacagatcgactttagcaaagccgaccataacgatggttatccttag

SEQ ID NO: 334162 - protein, 396 aa, Artificial Sequence
  derived and/or modified sequence
MLSEVLLVSAPGKVILHGEHAVVHGKVALAVSLNLRTFLRLQPHSNGKVDLSLPNIGIKRAWDVARLQSLDTSFLEQGDVTTPTSEQVEKLKEVAGLPDDCAVTERLAVLAFLYLYLSICRKQRALPSLDIVVWSELPPGAGLGSSAAYSVCLAAALLTVCEEIPNPLKDGDCVNRWTKEDLELINKWAFQGERMIHGNPSGVDNAVSTWGGALRYHQGKISSLKRSPALQILLTNTKVPRNTRALVAGVRNRLLKFPEIVAPLLTSIDAISLECERVLGEMGEAPAPEQYLVLEELIDMNQHHLNALGVGHASLDQLCQVTRARGLHSKLTGAGGGGCGITLLKPGLEQPEVEATKQALTSCGFDCLETSIGAPGVSIHSATSLDSRVQQALDGL

SEQ ID NO: 334163 - protein, 171 aa, Artificial Sequence
  derived and/or modified sequence
MLSEVLLVSAPGKVILHGEHAVVHGKVALAVSLNLRTFLRLQPHSNGKVDLSLPNIGIKRAWDVARLQSLDTSFLEQGDVTTPTSEQVEKLKEVAGLPDDCAVTERLAVLAFLYLYLSICRKQRALPSLDIVVWSELPPGAGLGSSAAYSVCLAAALLTVCEEIPNPLKDG

SEQ ID NO: 334164 - protein, 201 aa, Artificial Sequence
  derived and/or modified sequence
MLSEVLLVSAPGKVILHGEHAVVHGKVALAVSLNLRTFLRLQPHSNGKVDLSLPNIGIKRAWDVARLQSLDTSFLEQGDVTTPTSEQVEKLKEVAGLPDDCAVTERLAVLAFLYLYLSICRKQRALPSLDIVVWSELPPGAGLGSSAAYSVCLAAALLTVCEEIPNPLKDGDCVNRWTKEDLELINKWAFQGERMIHGNPS

SEQ ID NO: 334165 - DNA, 1191 bp, Artificial Sequence
  derived and/or modified sequence
atgctcagcgaagtgctcttagtgtctgcccctggaaaagtgatattgcatggtgagcatgcagtggttcacggcaaggttgcacttgctgtgtctctgaacctgaggaccttcctccgactccagccgcactctaatgggaaggtcgacctcagcctcccaaatattggcatcaagcgcgcctgggacgtggcacgcctgcagagtcttgacacttcttttctcgagcaaggcgacgtcactacccctacctccgaacaggtcgagaagctcaaggaggtcgctggactccccgatgactgtgctgtaaccgagcgactggcagttctcgcttttctgtatctgtatttgtctatctgcagaaagcagcgtgccttgcctagtcttgatattgtggtatggtctgagctgcctccaggggcggggctcgggtcatctgctgcctattcagtgtgtcttgctgccgccctgctgactgtgtgcgaggagatcccgaatccattaaaggatggcgactgcgtgaacagatggactaaggaagaccttgagctaatcaacaagtgggcgttccagggggagaggatgattcacggcaaccccagcggcgtggataatgccgtctcgacatgggggggcgcactgcgatatcaccagggaaagattagctctcttaaaaggtctcccgcattgcaaatcctcctaaccaacactaaggtgccccggaatacacgggctttggttgctggagtacgtaatcgcctactgaagtttcccgagatcgtggcaccgttgctaacctccattgatgccatcagtttggagtgcgaacgcgtcctgggtgaaatgggagaggcaccagcccccgaacaatatctcgtgttggaggagctgatcgacatgaaccaacaccacctcaacgcactgggggtggggcacgctagtttggaccagctgtgccaggtcacaagagctcgaggcctgcattccaagctgactggagctggcggcggaggatgcggtattacattactgaaaccggggttagaacagccggaagtggaggccacaaagcaggccctgacgagctgcggcttcgattgtcttgaaacaagcatcggcgcccctggcgtgtcaatccatagtgccacctctctggacagtcgcgtccagcaagcccttgatgggctgtag

SEQ ID NO: 334166 - DNA, 1191 bp, Artificial Sequence
  derived and/or modified sequence
atgctgtctgaggtgctgctggtgtctgcccctgggaaggtgatcctgcatggagagcacgctgtggtgcacggcaaggtggccctggccgtgtccctgaacctgcggaccttcctgcggctgcagccccacagcaatggcaaggtggacctgagcctgcccaacatcggcatcaagagggcctgggatgtggcccggctgcagagcctggacaccagcttcctggagcagggagatgtgaccacccccaccagcgagcaggtggagaagctgaaggaggtggccggcctgcctgatgactgtgctgtgacagagcggctggccgtgctggccttcctgtacctgtacctgagcatctgcaggaagcagagggccctgcccagcctggacatcgtggtgtggagcgagctgcccccaggagctggcctgggcagcagcgctgcctacagcgtgtgcctggccgccgccctgctgactgtgtgtgaggagatccccaaccccctgaaggatggagactgtgtgaaccgctggaccaaggaggacctggagctgatcaacaagtgggccttccagggcgagaggatgattcatggcaaccccagcggcgtggacaatgctgtgtccacctggggcggggccctgcgctaccaccagggcaagatcagcagcctgaagaggagccctgccctgcagatcctgctgaccaacaccaaggtgcccaggaacacccgggccctggtggccggcgtgaggaaccggctgctgaagtttcctgagatcgtggcccccctgctgaccagcattgatgccatcagcctggagtgtgagcgggtgctgggggagatgggagaggccccagcccctgagcagtacctggtgctggaggagctgattgacatgaaccagcaccacctgaatgccctgggcgtgggccacgccagcctggaccagctgtgccaggtgacccgggcccggggcctgcacagcaagctgaccggggccggcggcggcggctgcggcatcaccctgctgaagccaggcctggagcagcctgaggtggaggccaccaagcaggccctgaccagctgtggctttgactgcctggagaccagcatcggggcccctggggtgtccatccacagcgccaccagcctggacagccgggtgcagcaggccctggatggcctgtag

SEQ ID NO: 334167 - DNA, 1191 bp, Artificial Sequence
  derived and/or modified sequence
atgctgagcgaggtgctgctggtgagcgcccccggcaaggtgatcttgcacggcgaacatgcagtcgtccacggtaaggtggcactcgccgtgtccctaaacctccgcacgtttctgcgtcttcagcctcacagcaacggaaaggtggatctttccctgccgaacatcggcataaagcgagcttgggacgtggccaggctccagtctctcgacaccagtttcctagaacagggagacgtaacaacacccacaagcgagcaggttgagaaacttaaggaggtggctgggctgccagacgattgtgccgtaacagaacgtttggctgttctggcctttttgtatctgtacctgagcatctgccggaaacagagggcactcccaagcctggacatcgtggtgtggtctgaactgcccccaggagctggcctgggttcctcggctgcatatagcgtgtgccttgccgccgcactcttgacagtgtgcgaggagatacccaacccgttaaaggatggtgattgtgtcaacaggtggaccaaggaagatctggagctcatcaacaaatgggctttccagggggaacgcatgatccacggcaaccctagtggagtagacaacgccgtgtcaacttggggtggagccctgagatatcaccagggtaagattagctctcttaagagatctcctgccctgcagattctgcttaccaatacaaaagtgccgcggaacactcgtgccctcgtagcaggcgtgcggaaccgtctgttgaaattcccagagatcgttgccccgctgctcacttccattgacgctatcagtctagagtgcgaacgtgtgctgggagaaatgggggaagcccccgcacctgaacaatatctggtactggaggagcttatcgacatgaaccagcatcacctgaacgccctcggcgtgggtcatgcatctttggaccagttgtgccaggtcacacgtgcacgggggctgcattccaagttgaccggggcaggtggcggaggctgcggtatcaccttgctcaaaccaggcctggaacagccagaagtggaggcaacaaagcaggctctcacaagctgtggttttgactgtttagagacgtcgatcggtgccccaggtgtttccatacacagcgccactagtttagattcgagagtgcaacaggccctcgacggactatag

SEQ ID NO: 334168 - DNA, 1191 bp, Artificial Sequence
  derived and/or modified sequence
atgctgtcagaggtcctactggtatccgctcctggaaaagtgattctgcatggggaacacgccgtcgtgcacgggaaggttgcgttagcagtgagtctgaatttgaggacattcctgcgccttcagcctcatagcaacggcaaggttgatctaagcctgcccaacatcggcataaagagggcctgggatgtcgcgagactgcagagcttagatacatcttttctggagcaaggcgatgtgactactccgacttctgagcaggtggaaaagctcaaggaggtcgctggactgcccgatgactgcgccgtgacggagagactcgccgtgttggcctttctgtacttgtacctatcaatttgtcggaagcagcgcgctcttccaagcctggacattgttgtctggtccgagttgccacccggagcaggcctcgggagcagcgccgcttactctgtgtgtctggctgccgcactgctcacagtctgtgaagagattccaaatccattgaaagatggggattgcgtgaataggtggactaaagaagacctggaacttatcaataagtgggcgtttcagggcgagcgaatgatacatgggaatccatctggtgtggataacgcagtgtccacgtggggtggcgcactgcgttaccaccaaggaaaaattagctcactgaaaaggagtccagccctgcaaattctcctaacaaatactaaagtgccacgtaatactagggccctagtcgctggcgttaggaaccgacttctgaaatttcccgaaatcgtggcaccattactgacgagcatagatgctatttcccttgaatgtgaacgggtgctgggagagatgggtgaggcccctgcccctgaacagtatcttgtcctggaggaattgatcgacatgaatcagcatcatttaaacgccttaggcgtgggtcatgccagcttggatcagctgtgtcaagttacgagagctagagggcttcatagcaagctgactggcgctggcggaggcggttgcggcatcacattactgaagcctggcctcgagcagccagaggtggaagctaccaaacaggcactcacatcctgtgggttcgactgtcttgagacctccattggcgcacctggcgttagcatccatagcgcaacctctctggatagccgcgtgcaacaggcactcgacggcctgtag

SEQ ID NO: 334169 - DNA, 1191 bp, Artificial Sequence
  derived and/or modified sequence
atgctgagcgaggtgctgctggtgagcgcccccggcaaggtgatcctgcacggcgagcacgccgtggtgcacggcaaggtggccctggccgtgagcctgaacctgagaaccttcctgagactgcagccccacagcaacggcaaggtggacctgagcctgcccaacatcggcatcaagagagcctgggacgtggccagactgcagagcctggacaccagcttcctggagcagggcgacgtgaccacccccaccagcgagcaggtggagaagctgaaggaggtggccggcctgcccgacgactgcgccgtgaccgagagactggccgtgctggccttcctgtacctgtacctgagcatctgcagaaagcagagagccctgcccagcctggacatcgtggtgtggagcgagctgccccccggcgccggcctgggcagcagcgccgcctacagcgtgtgcctggccgccgccctgctgaccgtgtgcgaggagatccccaaccccctgaaggacggcgactgcgtgaacagatggaccaaggaggacctggagctgatcaacaagtgggccttccagggcgagagaatgatccacggcaaccccagcggcgtggacaacgccgtgagcacctggggcggcgccctgagataccaccagggcaagatcagcagcctgaagagaagccccgccctgcagatcctgctgaccaacaccaaggtgcccagaaacaccagagccctggtggccggcgtgagaaacagactgctgaagttccccgagatcgtggcccccctgctgaccagcatcgacgccatcagcctggagtgcgagagagtgctgggcgagatgggcgaggcccccgcccccgagcagtacctggtgctggaggagctgatcgacatgaaccagcaccacctgaacgccctgggcgtgggccacgccagcctggaccagctgtgccaggtgaccagagccagaggcctgcacagcaagctgaccggcgccggcggcggcggctgcggcatcaccctgctgaagcccggcctggagcagcccgaggtggaggccaccaagcaggccctgaccagctgcggcttcgactgcctggagaccagcatcggcgcccccggcgtgagcatccacagcgccaccagcctggacagcagagtgcagcaggccctggacggcctgtag

SEQ ID NO: 334170 - DNA, 516 bp, Artificial Sequence
  derived and/or modified sequence
atgctaagtgaggtacttctggtgtctgcacctgggaaggtgattttacacggtgagcatgctgtggtccatggcaaggttgctctggcagttagcttgaatttgcgtactttccttagactgcagccacacagtaatggcaaagtggatctgtccctccctaatattggcatcaaaagagcgtgggacgtcgctagactgcagtctctcgatacctcttttctggagcagggggacgtcacgacccccacaagtgagcaggtggaaaaactgaaggaagtagccggtcttcccgacgattgcgccgtgaccgagagattggccgttttggcctttctctatctgtatttatcaatttgtagaaaacagcgcgccttgccttccctagatatagttgtctggtctgaactgcccccaggggcggggttgggatcctcagcagcatattctgtgtgtctggctgctgctctcttgaccgtgtgtgaagaaatcccaaatcccctgaaggacgggtag

SEQ ID NO: 334171 - DNA, 606 bp, Artificial Sequence
  derived and/or modified sequence
atgttgtctgaggtgctgctggtcagcgcacctgggaaggtgatcctccatggtgagcacgccgtggtgcacgggaaggtggctctggctgtttcattgaacctaaggacatttttgaggctccagccgcactcaaatggtaaggtggatctgtctctccctaacatcggcatcaaacgcgcttgggacgtagcccggctgcagtctctcgacacctctttcttggagcaaggggacgtcacgacaccaacatctgaacaggtggaaaaactcaaagaggtggcagggctcccagacgactgcgctgtaactgaacgcctggctgtgttggccttcctgtacctatatctttctatctgccgaaagcaacgtgccctcccctcactggacatcgtggtgtggtccgagcttccacccggcgccggtctcggatcatctgccgcctacagcgtctgtctggcagccgcgctcctcacagtgtgtgaggagatccccaacccactgaaagacggagactgtgtgaatagatggacaaaagaggatctcgagttgatcaacaaatgggcttttcagggagaacggatgatccacggcaatccaagctag

SEQ ID NO: 334172 - DNA, 516 bp, Artificial Sequence
  derived and/or modified sequence
atgctgtctgaggtgctgctggtgtctgcccctgggaaggtgatcctgcatggagagcacgctgtggtgcacggcaaggtggccctggccgtgtccctgaacctgcggaccttcctgcggctgcagccccacagcaatggcaaggtggacctgagcctgcccaacatcggcatcaagagggcctgggatgtggcccggctgcagagcctggacaccagcttcctggagcagggagatgtgaccacccccaccagcgagcaggtggagaagctgaaggaggtggccggcctgcctgatgactgtgctgtgacagagcggctggccgtgctggccttcctgtacctgtacctgagcatctgcaggaagcagagggccctgcccagcctggacatcgtggtgtggagcgagctgcccccaggagctggcctgggcagcagcgctgcctacagcgtgtgcctggccgccgccctgctgactgtgtgtgaggagatccccaaccccctgaaggatggatag

SEQ ID NO: 334173 - DNA, 606 bp, Artificial Sequence
  derived and/or modified sequence
atgctgtctgaggtgctgctggtgtctgcccctgggaaggtgatcctgcatggagagcacgctgtggtgcacggcaaggtggccctggccgtgtccctgaacctgcggaccttcctgcggctgcagccccacagcaatggcaaggtggacctgagcctgcccaacatcggcatcaagagggcctgggatgtggcccggctgcagagcctggacaccagcttcctggagcagggagatgtgaccacccccaccagcgagcaggtggagaagctgaaggaggtggccggcctgcctgatgactgtgctgtgacagagcggctggccgtgctggccttcctgtacctgtacctgagcatctgcaggaagcagagggccctgcccagcctggacatcgtggtgtggagcgagctgcccccaggagctggcctgggcagcagcgctgcctacagcgtgtgcctggccgccgccctgctgactgtgtgtgaggagatccccaaccccctgaaggatggagactgtgtgaaccgctggaccaaggaggacctggagctgatcaacaagtgggccttccagggcgagaggatgattcatggcaaccccagctag

SEQ ID NO: 334174 - DNA, 1952 bp, Artificial Sequence
  derived and/or modified sequence
tggggagctgctccggcttcggcgcggaggggcggcggccggggaggcggcggcggcggcaggattcccaggagccatgttgtcagaagtcctactggtgtctgctccggggaaagtcatccttcatggagaacatgccgtggtacatggcaaggtagcactggctgtatccttgaacttgagaacattcctccggcttcaaccccacagcaatgggaaagtggacctcagcttacccaacattggtatcaagcgggcctgggatgtggccaggcttcagtcactggacacaagctttctggagcaaggtgatgtcacaacacccacctcagagcaagtggagaagctaaaggaggttgcaggcttgcctgacgactgtgctgtcaccgagcgcctggctgtgctggcctttctttacttatacctgtccatctgccggaagcagagggccctgccgagcctggatatcgtagtgtggtcggagctgccccccggggcgggcttgggctccagcgccgcctactcggtgtgtctggcagcagccctcctgactgtgtgcgaggagatcccaaacccgctgaaggacggggattgcgtcaacaggtggaccaaggaggatttggagctaattaacaagtgggccttccaaggggagagaatgattcacgggaacccctccggagtggacaatgctgtcagcacctggggaggagccctccgataccatcaagggaagatttcatccttaaagaggtcgccagctctccagatcctgctgaccaacaccaaagtccctcgcaataccagggcccttgtggctggcgtcagaaacaggctgctcaagttcccagagatcgtggcccccctcctgacctcaatagatgccatctccctggagtgtgagcgcgtgctgggagagatgggggaagccccagccccggagcagtacctcgtgctggaagagctcattgacatgaaccagcaccatctgaatgccctcggcgtgggccacgcctctctggaccagctctgccaggtgaccagggcccgcggacttcacagcaagctgactggcgcaggcggtggtggctgtggcatcacactcctcaagccagggctggagcagccagaagtggaggccacgaagcaggccctgaccagctgtggctttgactgcttggaaaccagcatcggtgcccccggcgtctccatccactcagccacctccctggacagccgagtccagcaagccctggatggcctctgagaggagcccacgacactgcagccccacccagatgcccctttctggattattctgggggctgcagttcgactctgtgctggccagcgagcgcccagctcctgacactgctggagaggccccagccgcttggcgatgccagccaagctctgcagtcccagcggtgggacctagggaggcatggtctgccctctgcatcctctggagccagccgagcaggaggcctaggagggtcctctgagactccagacctgaggcgagaagggctgcttccctgaagctcccacagtcccatctgcttcaggcccccgccttggcctgtgttcttcctggccgcctgggtccaatgctcaggtgctggggcctggttcccggagaagtgtgccttctctctcccttttcagggaccgccccctgtctctcagggccaggcctctccctcctccaggaagccttcccctaccccttgtcgcccctccctcccagagcacctgctgtctgggtggctcactcagcacttggtgtggccttcccttctacctagcgggatggggctcccccaggggctgtcccggaggcggtgggcctggttaaataaggcagggtttatatgcactttcttccgatctgtacctgagaggtttgtggaaaagatggcaaatggggaataaaaagattttgtgtcaac

SEQ ID NO: 334175 - DNA, 834 bp, Artificial Sequence
  derived and/or modified sequence
cgcggtgacctcacggcggtgtgacgtacccatggcgacgacaccacgattcacggcaggtgttcgagttgcccttcccgccagccactcacctgtccccgtcttccacgccctgagggccgcggctctggaaacggggatacaggagcctggcggcgccgaagcacccgcgcaggccaagacggctccccaggccaagacggctccccaggccgcacacagccatgagccaggctgcttgacgggacctgaccccgccaggttcccgtccagtccgcggggtgactccacccacagctggccgcgccaccgctcaggagccatgttgtcagaagtcctactggtgtctgctccggggaaagtcatccttcatggagaacatgccgtggtacatggcaaggtagcactggctgtatccttgaacttgagaacattcctccggcttcaaccccacagcaatgggaaagtggacctcagcttacccaacattggtatcaagcgggcctgggatgtggccaggcttcagtcactggacacaagctttctggagcaaggtgatgtcacaacacccacctcagagcaagtggagaagctaaaggaggttgcaggcttgcctgacgactgtgctgtcaccgagcgcctggctgtgctggcctttctttacttatacctgtccatctgccggaagcagagggccctgccgagcctggatatcgtagtgtggtcggagctgccccccggggcgggcttgggctccagcgccgcctactcggtgtgtctggcagcagccctcctgactgtgtgcgaggagatcccaaacccgctgaaggacgg

SEQ ID NO: 334176 - DNA, 886 bp, Artificial Sequence
  derived and/or modified sequence
gattcacggcaggtgttcgagttgcccttcccgccagccactcacctgtccccgtcttccacgccctgagggccgcggctctggaaacggggatacaggagcctggcggcgccgaagcacccgcgcaggccaagacggctccccaggccaagacggctccccaggccgcacacagccatgagccaggctgcttgacgggacctgaccccgccaggttcccgtccagtccgcggggtgactccacccacagctggccgcgccaccgctcaggattcccaggagccatgttgtcagaagtcctactggtgtctgctccggggaaagtcatccttcatggagaacatgccgtggtacatggcaaggtagcactggctgtatccttgaacttgagaacattcctccggcttcaaccccacagcaatgggaaagtggacctcagcttacccaacattggtatcaagcgggcctgggatgtggccaggcttcagtcactggacacaagctttctggagcaaggtgatgtcacaacacccacctcagagcaagtggagaagctaaaggaggttgcaggcttgcctgacgactgtgctgtcaccgagcgcctggctgtgctggcctttctttacttatacctgtccatctgccggaagcagagggccctgccgagcctggatatcgtagtgtggtcggagctgccccccggggcgggcttgggctccagcgccgcctactcggtgtgtctggcagcagccctcctgactgtgtgcgaggagatcccaaacccgctgaaggacggggattgcgtcaacaggtggaccaaggaggatttggagctaattaacaagtgggccttccaaggggagagaatgattcacgggaacccctc

SEQ ID NO: 334177 - DNA, 516 bp, Artificial Sequence
  derived and/or modified sequence
atgctgagcgaggtgctgctggtgagcgcccccggcaaggtgatcttgcatggagagcacgctgtcgttcatggcaaagtggcgttggccgtgagcctgaacctgagaactttcttgcggttgcagccccatagcaacggaaaagtggatttgagcctcccaaatattgggataaagcgcgcttgggatgtcgcccggctccagtctctagacacttcattcctggaacagggtgatgtaacaacacctacgtctgagcaagtagaaaagttaaaggaggtagctggactgccagacgattgcgcagtaacagagcgactggctgtgcttgctttcctgtacctctatctatctatctgcagaaagcagagggccctacccagcctggacatcgttgtgtggtccgaactgcctcctggggctgggctgggatctagtgccgcttactctgtgtgcctagccgccgccctgctgacagtttgtgaggaaattcccaatcctttgaaggacggttag

SEQ ID NO: 334178 - DNA, 606 bp, Artificial Sequence
  derived and/or modified sequence
atgctgagcgaggtgctgctggtgagcgcccccggcaaggtgatcctgcacggggagcatgcagtggtgcatgggaaggttgcccttgctgtctccctgaacctccggaccttcctccgcctccaaccgcacagcaacggcaaggtcgacttgtccctcccaaatattggtatcaagagagcatgggatgtggccagactgcagagtctggacacttcctttctagagcagggggacgtaaccacccccacatcggagcaggtcgagaaattgaaagaggttgccgggctgccagacgactgtgccgtcacggaacgactggctgtgctggcctttttgtatctctatctgagcatttgcaggaagcagcgggcactccctagcctagatatcgtggtctggtccgagcttcctcctggagccgggctaggctcaagcgccgcatatagtgtgtgcctggcagctgccctcctcacagtgtgtgaggagattccgaatcctctcaaggacggcgactgcgtaaacaggtggacaaaagaggatttggaactgattaacaagtgggcttttcagggggagcgtatgatccatggaaatccttcttag

SEQ ID NO: 334179 - DNA, 516 bp, Artificial Sequence
  derived and/or modified sequence
atgctttccgaagttttactcgtctctgctccaggaaaggtcatcctgcacggagagcacgccgtcgtgcatgggaaggtagcacttgccgtctcgctcaatcttcgcactttccttagactgcagccacactcaaacgggaaggtggacctgagtctgcccaacatcgggatcaagcgtgcctgggatgttgctcggcttcagtcgctggataccagcttcttagaacagggcgacgtgacaacccccacctcggaacaggtggagaaattgaaagaggtcgccggactccccgacgactgcgccgttactgagcggctcgccgtgttggcattcctgtatctctacctatcgatctgcagaaagcagcgcgcactgccaagtctggatattgttgtctggagcgagcttccacctggagcaggattggggagctcagcagcgtactctgtttgtctggccgcagcccttctgacagtgtgcgaagaaattcctaatcccttgaaagatggatag

SEQ ID NO: 334180 - DNA, 606 bp, Artificial Sequence
  derived and/or modified sequence
atgctgagcgaagtgctgttggtctctgcgcctggcaaggttattcttcatggcgagcacgccgttgtccatgggaaggtagctctcgcagtcagtctgaatctccggactttcctgcgcttacagccgcactcaaatgggaaagttgatctcagtctgcctaacattggcatcaagcgggcatgggatgtggctcgcttacagagcctggacacttcatttctggaacaaggcgatgtcacaactcccacaagcgaacaagttgaaaagctgaaagaggtagctggcctgcccgacgattgcgctgtaactgagcggctggccgtacttgccttcctttatttgtacctctctatctgtaggaaacagcgggcattgccaagcctcgacatcgtggtgtggagtgagctgccacctggtgctggtctgggctctagcgctgcatactctgtctgcctggccgcagctctcctcactgtctgcgaggaaatccctaatccactgaaggacggggactgtgtgaatcggtggacaaaggaagacctagaacttatcaataaatgggcctttcagggagagagaatgattcacggcaatccttcctag

SEQ ID NO: 334181 - DNA, 516 bp, Artificial Sequence
  derived and/or modified sequence
atgctgagcgaggtgctgctggtgagcgcccccggcaaggtgatcctgcacggcgagcacgccgtggtgcacggcaaggtggccctggccgtgagcctgaacctgagaaccttcctgagactgcagccccacagcaacggcaaggtggacctgagcctgcccaacatcggcatcaagagagcctgggacgtggccagactgcagagcctggacaccagcttcctggagcagggcgacgtgaccacccccaccagcgagcaggtggagaagctgaaggaggtggccggcctgcccgacgactgcgccgtgaccgagagactggccgtgctggccttcctgtacctgtacctgagcatctgcagaaagcagagagccctgcccagcctggacatcgtggtgtggagcgagctgccccccggcgccggcctgggcagcagcgccgcctacagcgtgtgcctggccgccgccctgctgaccgtgtgcgaggagatccccaaccccctgaaggacggctag

SEQ ID NO: 334182 - DNA, 606 bp, Artificial Sequence
  derived and/or modified sequence
atgctgagcgaggtgctgctggtgagcgcccccggcaaggtgatcctgcacggcgagcacgccgtggtgcacggcaaggtggccctggccgtgagcctgaacctgagaaccttcctgagactgcagccccacagcaacggcaaggtggacctgagcctgcccaacatcggcatcaagagagcctgggacgtggccagactgcagagcctggacaccagcttcctggagcagggcgacgtgaccacccccaccagcgagcaggtggagaagctgaaggaggtggccggcctgcccgacgactgcgccgtgaccgagagactggccgtgctggccttcctgtacctgtacctgagcatctgcagaaagcagagagccctgcccagcctggacatcgtggtgtggagcgagctgccccccggcgccggcctgggcagcagcgccgcctacagcgtgtgcctggccgccgccctgctgaccgtgtgcgaggagatccccaaccccctgaaggacggcgactgcgtgaacagatggaccaaggaggacctggagctgatcaacaagtgggccttccagggcgagagaatgatccacggcaaccccagctag

SEQ ID NO: 334183 - DNA, 291 bp, Artificial Sequence
  derived and/or modified sequence
atgccactgctggaagggagcgtgggtgttgaggacctggttctgctggaacctcttgtggaagagtcactgttgaagaacttgcagctccgatatgagaataaagagatctatacctacatagggaacgtagtgatttcagttaatccttatcagcagttgccaatctacggccctgagttcattgcgaagtaccaggattacacattctacgagctgaagccacatatttacgccttggccaacgtggcctaccagtcactccgtgaccgagatcgggatcagtgctag

SEQ ID NO: 334184 - DNA, 291 bp, Artificial Sequence
  derived and/or modified sequence
atgcccctgctggagggctctgtgggcgtggaggacctggtgctgctggagcccctggtggaggagagcctgctgaagaacctgcagctgcgctatgagaacaaggagatctacacctacatcggaaatgtggtgatctctgtgaacccctaccagcagctgcccatctacggccctgagttcatcgccaagtaccaggactacaccttctatgagctgaagccccacatctatgccctggccaacgtggcctaccagagcctgcgggaccgggaccgggaccagtgctag

SEQ ID NO: 334185 - DNA, 560 bp, Artificial Sequence
  derived and/or modified sequence
gctgagagttggagaatcaagtctctcttcaggagcctgggctggaagaggcagcaaaagggaaaatcagaagagtggacactggcaagaggagggcagcctttttcccagcttccttgcaccatggacagctcccattaagccacctctccatcctggggccaggactcttatgccccattcctgtcaaattgagatttcatccaccattctccaaggacagtgaagttataccctagttccagtgttgggatcagtggcccctctggacatgcctctcctggaaggttctgtgggggtggaggatcttgtcctcctggaacccttggtggaggagtcactgctcaagaatcttcagcttcgctatgaaaacaaggagatttatacctacattgggaatgtggtgatctcagtgaatccctatcaacagcttcccatctatgggccagagttcattgccaaatatcaagactatactttctatgagctgaagccccatatctacgcattggcaaatgtggcgtaccagtcactgagggacagggaccgagaccagtgta

SEQ ID NO: 334186 - DNA, 291 bp, Artificial Sequence
  derived and/or modified sequence
atgcccctgctggagggcagcgtgggcgtggaggacctggtgctgctcgaaccactggttgaggagagcttgctgaaaaaccttcaactgcgctatgagaacaaagagatttacacctatatcgggaatgtggttatttcggtgaatccataccagcagcttcccatttacggcccagagtttattgccaaatatcaagactataccttttacgagctaaagccgcacatatacgccctggccaacgtggcctatcagtctctaagagatcgcgatagagaccagtgttag

SEQ ID NO: 334187 - DNA, 291 bp, Artificial Sequence
  derived and/or modified sequence
atgcctctgctcgagggttctgtcggtgttgaagatctggtgcttcttgagccattagtggaagagagtttgctgaagaatttgcagttgagatacgaaaacaaagagatatatacctacatcggcaacgtcgtcatctctgtgaacccttaccagcagcttcccatctacggacccgagtttattgctaagtaccaagattataccttctacgagctaaaacctcatatctatgctctggcaaacgtcgcataccagtcgctgcgcgatagggaccgcgatcagtgctag

SEQ ID NO: 334188 - DNA, 291 bp, Artificial Sequence
  derived and/or modified sequence
atgcccctgctggagggcagcgtgggcgtggaggacctggtgctgctggagcccctggtggaggagagcctgctgaagaacctgcagctgagatacgagaacaaggagatctacacctacatcggcaacgtggtgatcagcgtgaacccctaccagcagctgcccatctacggccccgagttcatcgccaagtaccaggactacaccttctacgagctgaagccccacatctacgccctggccaacgtggcctaccagagcctgagagacagagacagagaccagtgctag

SEQ ID NO: 334189 - protein, 971 aa, Artificial Sequence
  derived and/or modified sequence
MKMADAKQKRNEQLKRWIGSETDLEPPVVKRQKTKVKFDDGAVFLAACSSGDTDEVLKLLHRGADINYANVDGLTALHQACIDDNVDMVKFLVENGANINQPDNEGWIPLHAAASCGYLDIAEFLIGQGAHVGAVNSEGDTPLDIAEEEAMEELLQNEVNRQGVDIEAARKEEERIMLRDARQWLNSGHINDVRHAKSGGTALHVAAAKGYTEVLKLLIQAGYDVNIKDYDGWTPLHAAAHWGKEEACRILVDNLCDMEMVNKVGQTAFDVADEDILGYLEELQKKQNLLHSEKRDKKSPLIESTANMDNNQSQKTFKNKETLIIEPEKNASRIESLEQEKVDEEEEGKKDESSCSSEEDEEDDSESEAETDKTKPLASVTNANTSSTQAAPVAVTTPTVSSGQATPTSPIKKFPTTATKISPKEEERKDESPATWRLGLRKTGSYGALAEITASKEGQKEKDTAGVTRSASSPRLSSSLDNKEKEKDSKGTRLAYVAPTIPRRLASTSDIEEKENRDSSSLRTSSSYTRRKWEDDLKKNSSVNEGSTYHKSCSFGRRQDDLISSSVPSTTSTPTVTSAAGLQKSLLSSTSTTTKITTGSSSAGTQSRSYLTPVRDEESESQRKARSRQARQSRRSTQGVTLTDLQEAEKTIGRSRSTRTREQENEEKEKEEKEKQDKEKQEEKKESETSREDEYKQKYSRTYDETYQRYRPVSTSSSTTPSSSLSTMSSSLYASSQLNRPNSLVGITSAYSRGITKENEREGEKREEEKEGEDKSQPKSIRERRRPREKRRSTGVSFWTQDSDENEQEQQSDTEEGSNKKETQVNTITLYETSSTSAGDRYDSLLGRSGSYSYLEERKPYSSRLEKDDSTDFKKLYEQILAENEKLKAQLHDTNMELTDLKLQLEKATQRQERFADRSLLEMEKRERRALERRISEMEEELKMLPDLKADNQRLKDENGALIRVISKLSK

SEQ ID NO: 334190 - DNA, 2916 bp, Artificial Sequence
  derived and/or modified sequence
atgaaaatggcggatgccaaacagaagcggaatgagcagctcaaaagatggattggaagtgaaacagacctagagccacctgtggttaaaaggcagaagacaaaagtaaagtttgatgacggagctgtcttcctcgctgcttgctctagtggtgacacggacgaagtgctcaagcttctgcatcggggtgctgatatcaactacgccaatgtagatggattaacggctctccaccaggcctgcatcgacgataacgtggacatggttaaattccttgttgagaatggtgctaatataaatcagccagataatgaggggtggatacccctccacgctgcagcttcttgtggatatctggacatagcagagttcttaataggacagggagcccacgtcggggcagtcaactcagagggtgacacccccctggatattgcagaagaagaggctatggaggaacttttacagaatgaggtcaaccgccagggggtagatatcgaggccgccagaaaagaagaagagcgcatcatgttgcgcgacgccaggcagtggctcaacagtgggcacattaatgatgtgcgacacgccaagagcgggggaacagcgctgcatgtcgctgcagctaaagggtacaccgaggtgctcaagcttttaatccaggcaggctatgatgtgaatatcaaagactatgatggatggacacctcttcacgccgccgctcactgggggaaagaggaggcttgtaggatactggtagacaacttgtgcgacatggaaatggtcaacaaagtgggacaaactgcattcgacgtcgcggacgaggacattctcgggtacctggaagagttgcaaaagaaacagaacctgcttcattccgagaagagagataagaagagtcctttgatcgagtcgactgcaaatatggacaacaaccagagtcagaaaacgtttaaaaacaaggaaaccctaatcatcgaacccgagaaaaatgcttcacggattgaaagtctcgagcaggagaaagttgatgaggaggaggaggggaaaaaagatgaatcatcatgtagctcagaagaggatgaagaagatgactcggaatctgaagcggagacagataagactaaaccactggcaagcgttacaaatgctaacaccagctctactcaggctgccccagtggccgttactacccccacggtgtctagtggacaggccacacccacttcaccaattaagaagttccccacaaccgcaaccaagattagtcctaaggaggaagagaggaaggacgaaagtcccgccacctggcggctgggactaaggaaaactggaagctacggggcactagcggagattacagctagcaaagaaggacaaaaggagaaggataccgccggcgttactagatctgccagttcaccacgtctctcctcaagccttgacaacaaggagaaggagaaggactctaagggtaccagactggcatacgttgctccaacaattccaaggcgcctggccagtaccagcgacattgaagagaaggagaacagggacagtagttccctccgcacttcttctagttatactcggcgaaagtgggaggatgacctgaagaagaattcctcggtgaatgaaggttcaacctaccataagtcttgctcctttggtaggaggcaagatgacctcattagtagcagtgtcccaagcaccacatcgacacccactgtgacaagcgccgccgggctgcaaaagagtctattgtcttccacatctactacaactaagataacaaccggatccagtagtgctggtacccaaagccggagctatttaacccccgtccgtgacgaagagtctgaatcacaaagaaaggctcgctcccggcaggcccggcagtcaaggcggagtactcagggcgtcaccttaacagacttacaggaggcggagaagacaatcgggcgaagtcgatcaacccgcacccgagaacaggaaaatgaggaaaaagaaaaagaggaaaaggagaaacaagacaaagagaaacaggaagaaaagaaggaatccgagacaagcagagaggacgagtataagcagaaatacagcagaacttacgacgaaacctaccaaagatatagacccgtgagtacaagctcgagcactactccctccagctctctctctaccatgtcgtcgtcactgtatgccagttcacagttgaaccgtcccaattcactggtgggcatcacaagtgcatactcacggggtatcacaaaagaaaacgagagggaaggcgagaagagggaggaagagaaggagggggaggataagtcccagcctaaatctattagagagcggagaaggccacgagagaagaggaggtccacaggcgtgagcttctggacgcaggatagcgatgagaatgagcaggaacagcagtctgacacggaggagggcagcaacaagaaagagacccaggtcaataccattaccctctacgaaactagctctacttccgccggcgacaggtatgacagtcttttggggcgatcaggatcctatagctaccttgaggaacgtaagccctactcgtctaggttggagaaagatgattctactgactttaagaagctttacgagcaaatactggctgagaatgagaaactgaaggcccaactgcacgataccaatatggagttaacagaccttaaattgcagctcgagaaggctactcaacggcaggaacgctttgccgaccgttccctgctggaaatggagaagagggagcgcagagctctggagaggcgcatctcagagatggaagaggaattgaagatgctccccgatctcaaggcagataatcagcgcctgaaagacgagaatggagccctgatacgggtgatatccaaactgtccaagtag

SEQ ID NO: 334191 - DNA, 2916 bp, Artificial Sequence
  derived and/or modified sequence
atgaagatggctgatgccaagcagaagagaaatgagcagctgaagcgctggattggcagcgagacagacctggagccccctgtggtgaagaggcagaagaccaaggtgaagtttgatgatggagctgtgttcctggccgcctgcagcagcggggacacagatgaggtgctgaagctgctgcacagaggagctgacatcaactatgccaacgtggatggcctgacagccctgcaccaggcctgcattgatgacaacgtggacatggtgaagttcctggtggagaatggagccaacatcaaccagcctgacaatgaaggctggatccccctgcacgccgccgccagctgtggctacctggacattgctgagttcctgattggccagggcgcccacgtgggcgctgtgaacagcgagggggacacccccctggacattgctgaggaggaggccatggaggagctgctgcagaatgaggtgaaccggcagggcgtggacatcgaggccgccaggaaggaggaggagcgcatcatgctgagagatgcccggcagtggctgaacagcggccacatcaatgatgtgagacatgccaagagcggcggcacagccctgcacgtggccgccgccaagggctacacagaggtgctgaagctgctgatccaggccggctatgatgtgaacatcaaggactatgatggctggacccccctgcacgccgccgcccactggggcaaggaggaggcctgccgcatcctggtggacaacctgtgtgacatggagatggtgaacaaggtgggccagacagcctttgatgtggctgatgaggacatcctgggctacctggaggagctgcagaagaagcagaacctgctgcacagcgagaagagggacaagaagagccccctcatcgagagcacagccaacatggacaacaaccagagccagaagaccttcaagaacaaggagaccctcatcatcgagcctgagaagaatgccagccgcatcgagagcctggagcaggagaaggtggatgaggaggaggagggcaagaaggatgagagcagctgcagcagtgaagaagatgaggaggatgattctgagagcgaggccgagacagacaagaccaagcccctggcctctgtgaccaatgccaacaccagcagcacccaggccgcccctgtggccgtgaccacccccaccgtgagcagcggccaggccacccccaccagccccatcaagaagttccccaccacagccaccaagatcagccccaaggaggaggagaggaaggatgagagccctgccacctggaggctgggcctgaggaagacaggcagctatggagccctggccgagatcacagccagcaaggagggccagaaggagaaggacacagctggggtgaccaggtctgccagcagcccccggctgagcagcagcctggacaacaaggagaaggagaaggacagcaagggcacccggctggcctacgtggcccccaccatcccccggcggctggccagcaccagtgacatcgaggagaaggaaaatagagacagcagcagcctgcggaccagcagcagctacaccaggaggaagtgggaggatgacctgaagaagaacagctctgtgaatgaaggcagcacctaccacaagagctgcagctttggaagacggcaggatgacctgatcagcagctctgtgcccagcaccaccagcacccccaccgtgaccagcgctgctggcctgcagaagagcctgctgagcagcaccagcaccaccaccaagatcaccaccggcagcagcagcgctggcacccagagccgcagctacctgacccctgtgagagatgaggagagcgagagccagaggaaggcccggagccggcaggcccggcagagccgccgcagcacccagggcgtgaccctgacagacctgcaggaggccgagaagaccatcggccgcagccgcagcaccaggacccgggagcaggagaatgaggagaaggagaaggaggagaaggagaagcaggacaaggagaagcaggaggagaagaaggagagcgagaccagccgggaggatgagtacaagcagaagtacagcaggacctatgatgagacctaccagcgctacagacctgtgtccaccagcagcagcaccacccccagcagcagcctgagcaccatgagcagcagcctgtatgccagcagccagctgaaccggcccaacagcctggtgggcatcaccagcgcctacagccggggcatcaccaaggaaaatgaaagagaaggagagaagcgggaggaggagaaggagggggaggacaagagccagcccaagagcatccgggagaggagaagaccccgggagaagagaagaagcactggagtgtccttctggacccaggacagtgatgaaaatgagcaggagcagcagagcgacacagaggagggcagcaacaagaaggagacccaggtgaacaccatcaccctgtatgagaccagcagcaccagcgctggggacagatatgacagcctgctgggccgcagcggcagctacagctacctggaggagaggaagccctacagcagccggctggagaaggatgacagcacagacttcaagaagctgtatgagcagatcctggctgaaaatgagaagctgaaggcccagctgcatgacaccaacatggagctgacagacctgaagctgcagctggagaaggccacccagaggcaggagagatttgctgacaggagcctgctggagatggagaagcgggagcggcgggccctggagcggcgcatcagcgagatggaggaggagctgaagatgctgcctgacctgaaggctgacaaccagaggctgaaggatgaaaatggagccctgatccgggtcatcagcaagctgagcaagtag

SEQ ID NO: 334192 - DNA, 2916 bp, Artificial Sequence
  derived and/or modified sequence
atgaagatggccgacgccaagcagaagcggaacgagcagctgaagcgttggattggctctgagaccgatctggagccacccgtggtgaagaggcagaagacaaaagtcaagtttgatgacggcgctgtcttcctcgctgcttgttcctctggtgatacggacgaagttttgaagctcctgcaccgtggtgcagatatcaactatgcaaatgtggatggtctgaccgcactgcaccaggcctgtattgacgacaatgtagatatggtcaaatttcttgtggagaatggggctaacattaatcaacccgataatgagggatggattcccctccatgccgccgcgagctgtgggtatctggacatcgctgagtttctgattggtcagggcgcccacgtaggcgccgtgaatagtgagggcgataccccactcgatattgcagaggaggaagctatggaggagctgctgcagaacgaagtgaatcgccaaggggtagacatcgaggcagcccgaaaagaagaagagcgtattatgttgcgtgacgccagacagtggctcaatagtgggcacataaatgacgttcgtcacgcgaaatcgggggggacggccctgcatgttgctgcagcaaaaggctacaccgaggtgctcaagctgctgatccaggctgggtatgatgtgaatattaaggattatgacggctggacacccctacacgcggctgctcactgggggaaggaagaagcctgtaggattctagtggacaatctgtgtgatatggaaatggtgaacaaggtcggacaaaccgcatttgacgtagctgatgaagacatccttggttatcttgaggagctgcaaaagaaacaaaatttactccacagtgaaaagagagataagaagtccccactgatcgaatcaaccgccaacatggataacaaccagagccaaaaaacatttaagaataaagagactctcatcattgagcctgaaaagaatgcatcgaggatcgagtctctagagcaggaaaaggtcgatgaggaagaggaggggaaaaaagacgaaagctcttgcagctctgaagaagacgaggaagacgactcagaaagcgaggcggagacagataaaaccaagcctctcgcctccgtgactaatgcaaacacgagttccacccaggccgctccagtggctgtgaccactcccactgtttcctccggccaggccactcccaccagtcccattaagaaatttcctacaaccgctacgaaaatttcaccgaaggaagaggaacgtaaagatgagtcgcccgcaacctggcggctgggcttgcgtaagacaggatcttacggcgcactggccgaaatcaccgcatcaaaggagggacagaaggaaaaagacaccgctggggtgactagaagtgcctcatctcctcgtctcagttcctctttagacaacaaagaaaaggagaaggattctaagggcactagactcgcatacgttgctccaactattccacgaagactcgcctctaccagcgacatcgaagagaaagagaaccgtgattcttcttctcttagaacctcatccagctacacacgtcgtaaatgggaggacgacttgaaaaagaattcatcggttaatgagggcagcacgtatcataaaagctgcagttttggtagacggcaagatgatcttattagctcctcggttcccagcaccacatcgaccccaactgtgacttctgcggccggcctgcagaagtctctgctgagcagtacatcaactactaccaagattactacaggatcctcttccgcaggcactcaaagccgttcatatcttactcccgtgcgggacgaggaaagcgaaagccagcggaaggcccggagtcggcaggcccgtcagtctcgccgcagcacacagggcgtaacacttacagacctccaggaagccgagaaaactattggacgatcacgctctacccgcacccgcgagcaagagaatgaggagaaggagaaagaagagaaggaaaaacaggataaagaaaagcaggaggaaaagaaagagtcggaaacatcacgggaggatgaatataagcagaaatattctcgaacctacgacgagacctatcagaggtatcgccccgtttcgacaagctcttcaacgactccctcgtcctccctgagcacgatgtcatcttcgctctacgcctcgtcacagctgaatcgccctaatagcctggtcggcatcacttcagcttatagtcgaggaatcactaaggaaaatgaacgcgagggagaaaagagggaggaggagaaagaaggcgaagacaaatctcagcctaaatctatcagagagcggagacgcccacgcgaaaagagaaggagtacgggggtttcattttggactcaagacagcgacgagaacgaacaagagcaacagagcgataccgaagaaggtagtaacaagaaggagactcaagttaataccattacgttatacgagacctcaagtacatccgccggtgacaggtacgacagccttctgggcaggagcggctcctatagctacctagaggagcgaaagccctatagttccagattagagaaggatgatagtaccgatttcaagaaactgtacgagcagattctcgccgaaaacgagaagctcaaagcacaactacacgatactaacatggaactcaccgacctgaaactccagctggagaaggctacgcaacggcaggagaggtttgctgatcgtagtctcctagaaatggagaaacgagagaggagggctttggaacgccgcatttcagagatggaggaggaactcaagatgctaccggatctcaaggctgataaccagcgactaaaggatgagaatggagcgttaatccgcgtaatttcaaagctgtccaagtag

SEQ ID NO: 334193 - DNA, 2916 bp, Artificial Sequence
  derived and/or modified sequence
atgaaaatggctgatgcaaaacagaaaagaaacgaacaattgaagcgctggataggatctgagaccgatttagagcctccggtggtcaagcgccagaagactaaggtcaagtttgatgacggagctgtgtttctcgctgcctgtagtagcggagacacagatgaagtactgaaattgttgcatagaggagccgacattaactatgccaatgtggacggtctcaccgctctgcatcaagcctgtatagacgacaatgtggacatggtgaagtttcttgtagaaaatggcgcaaatatcaaccaacccgacaatgaggggtggattcccctccatgccgctgccagctgtggatacctggacatagctgagtttctgatcggtcaaggagcacacgtgggtgccgtgaattcagagggcgatacgccattagatatcgcagaagaagaagctatggaagagctgttgcagaacgaggtaaatcggcagggcgtcgacattgaagccgcacgcaaggaagaagaaagaataatgttacgcgacgcccgacaatggctcaactcagggcatatcaatgatgttcgtcatgccaagtcaggcggtaccgctcttcacgtggcggcagccaaagggtacaccgaggtgctcaaactgctaattcaagctgggtatgatgtaaatattaaggactacgatggctggactccactgcacgccgcagcacattgggggaaagaagaagcatgtaggatccttgtggataatctgtgtgatatggaaatggttaataaggtggggcagacagcctttgacgtagccgatgaagacatcctgggatatctggaggaattgcaaaagaagcagaacctgcttcacagcgagaagcgtgataaaaagagcccactgatcgaaagtaccgcaaatatggacaacaaccagagccagaaaacatttaaaaataaagaaacacttataatagagccggagaagaatgcatcacgcattgaaagtctggaacaggagaaggtcgacgaagaggaggagggtaagaaagatgagagcagctgtagttctgaggaggacgaggaggatgactccgaaagcgaagccgagacggacaaaactaagcccctggccagcgtgaccaatgcgaacacatcctccactcaggcagctcccgtagcagtcacgactcccactgtgagctctggacaagccacacccacctcaccaataaagaagttccctacaaccgccacaaaaatcagtcccaaggaagaggagagaaaagatgaaagcccagcaacatggcggctggggctccggaagaccggcagttatggtgcactggccgaaattactgctagtaaagagggccagaaagaaaaggatactgcaggagtcactaggtcagcgtcaagtcccaggctgtcgtcttctctcgacaacaaagaaaaagagaaagactctaagggcacgcgtctagcttatgtcgctcctacgattcccaggaggctggcatctacttctgacatcgaagaaaaagaaaatcgcgacagttcctccctgcggacttcctctagctacacacgtcgaaaatgggaagacgatcttaagaaaaactctagtgttaacgaaggatccacgtaccacaaatcatgtagctttgggaggagacaagatgatttaatctcatcaagcgtgccatctaccacatccacaccaacagttacaagcgctgcaggcttacagaagagcctgctgtcttcaaccagtacgaccactaagatcaccaccggcagcagttcggcaggcacacagtctaggagctatctgactccagtgagagatgaggagagcgaatcccagaggaaagctcgctctagacaggctaggcagtcccgccgatccactcagggggtcaccttgactgacctccaagaggccgagaagaccattggacgttcccggtcaacaagaactcgggaacaggaaaatgaagaaaaagaaaaggaggaaaaggagaaacaggataaagaaaagcaggaggaaaaaaaggaatctgaaacaagtcgtgaggacgaatataagcagaaatacagcaggacctatgacgaaacataccagcgataccgaccagtgagcacatcttccagtacaaccccttccagttctctgtccactatgtccagcagtctttatgcttcttctcaactgaacaggccaaatagtctcgttggaatcacttctgcctatagcagaggcatcactaaggagaacgagcgagagggagagaagcgagaggaggagaaggaaggcgaggacaagtctcaacctaaatctatccgggaacgcaggagacccagagagaaacgtagatccacgggggtcagtttttggacacaggattctgatgagaacgagcaggagcaacagagcgacacagaggagggctccaataaaaaggagacgcaggtcaatacaatcaccttgtacgaaaccagctctacctcagcaggggacaggtacgattcactgctgggcaggagcgggtcttattcatacctagaggaacgaaaaccctatagttctaggctcgagaaagatgattccacagactttaagaagctctatgaacagatcctagctgagaacgagaagctgaaggcacagcttcatgacactaatatggagctgacggatttgaagctccagctggaaaaggccacccagagacaggaacgctttgcggaccggtcactactagaaatggaaaagcgcgaacgtagagcactcgagcgtagaatcagtgagatggaagaggaattaaaaatgctgcccgacctgaaagcagataaccagagactgaaagacgaaaatggcgctctgattcgagtcatctctaaactgtcaaagtag

SEQ ID NO: 334194 - DNA, 5405 bp, Artificial Sequence
  derived and/or modified sequence
agatctgccctgtagagccttgcggttccactgctggcctccggattcccgggagcccccagcccgacaggacaaccttccttccccgcttcctcctttccagacccggcggcaggagaggggatgaagatggcggacgcgaagcagaagcggaacgagcagctgaaacgctggatcggctccgagacggacctcgagcctccggtggtgaagcgccagaagaccaaggtgaagttcgacgatggcgccgtcttcctggctgcttgctccagcggcgacacggacgaggtcctcaagctgctgcaccgcggcgccgacatcaattacgccaatgtggacggactcactgccctgcaccaggcttgcattgatgacaatgttgatatggtgaagtttctggtagaaaatggagcaaatattaatcaacctgataatgaaggctggataccactacatgcagcagcttcctgtggatatcttgatattgcagagtttttgattggtcaaggagcacatgtaggggctgtcaacagtgaaggagatacacctttagatattgcggaggaggaggcaatggaagagctacttcaaaatgaagttaatcggcaaggggttgatatagaagcagctcgaaaggaagaagaacggatcatgcttagagatgccaggcagtggctaaatagtggtcatataaatgatgtccggcatgcaaaatctggaggtacagcacttcacgttgcagctgctaaaggctatacggaagttttaaaacttttaatacaggcaggctatgatgttaatattaaagactatgatggctggacacctcttcatgctgcagctcattggggtaaagaagaagcatgtcgaattttagtggacaatctgtgtgatatggagatggtcaacaaagtgggccaaacagcctttgatgtagcagatgaagacattttaggatatttagaagagttgcaaaagaaacaaaatctgctccatagtgaaaaacgggacaagaaatctccactaattgaatcaacagcaaatatggacaataatcagtcacagaagacctttaaaaacaaagagacgttgattattgaaccagagaaaaatgcatcccgtattgaatctctggaacaagaaaaggttgatgaagaagaagaaggaaagaaggatgagtctagctgctctagtgaagaagatgaggaagatgactcggaatcagaagctgaaacagataagacaaaacccctggcttctgtaactaatgccaacacttctagtacacaagcagctcctgtagctgttacaacacctactgtgtcatcaggtcaagcaacacctacatcacctattaaaaagtttccaaccacagctacaaaaatttctcccaaagaagaagagagaaaagatgagtctcctgcaacttggaggttaggacttagaaagacgggcagctatggtgcacttgctgaaatcacagcatctaaagagggtcagaaagaaaaagatactgcaggtgttacacgttcagcttcaagtcccagactttcctcctctttggataataaagaaaaggagaaagatagtaaaggaactaggcttgcatatgttgcacctacaataccaagacgactagccagtacatctgacattgaagagaaagaaaacagagattcttcaagtttgcgaacaagtagttcatatacaaggagaaaatgggaagatgatcttaaaaaaaatagctcagttaatgaaggatcaacgtatcataaaagttgctcctttggtagaagacaagatgatttgattagttctagtgttccaagcaccacatcaacaccaacagttacctctgcagctgggcttcagaaaagcctgctttccagcacaagcactactacaaagattacaacgggttcttcctcagcaggcacacaaagcagatcatacctcactcctgttagggatgaagagtctgaatcccaaagaaaagcaagatctagacaagcaagacaatctagaagatcaacacagggagtgacattaactgatcttcaagaagctgagaaaacaataggaagaagtcgttctacccgaaccagagaacaagaaaatgaagaaaaagaaaaagaggaaaaagagaaacaagataaagagaaacaagaagaaaagaaggagtcagaaacatctagagaagatgaatataaacaaaagtactccagaacgtatgatgagacttaccagcgttataggccagtatcaacttcaagttcaaccactccatcctcttcactttctactatgagcagttcactgtatgcttcaagtcaactaaacaggccaaatagtcttgtaggcataacttctgcttactccagaggaataacaaaagaaaatgaaagagagggagaaaaaagagaagaggagaaagaaggagaagataaatcacaacctaaatcaatcagagaacgacgacgaccaagagagaaaagaagatctacaggagtttcattttggacacaagatagtgatgaaaatgaacaagaacaacaatcagacacagaagagggatccaataagaaagaaactcaggtaaataccattactttatatgaaaccagttctacatcagctggtgatcgatatgattccttgctgggtcgctctggatcatacagttacttagaagaaagaaaaccttacagcagcaggctagaaaaggatgactcaactgactttaaaaagctttatgaacaaattctagctgaaaatgaaaagctgaaggcacagctacatgatacaaatatggaactaacagatcttaaattacagttggaaaaggccacccagagacaagaaagatttgctgatagatcactgttggaaatggaaaaaagggaacgaagagctctagaaagaagaatatctgaaatggaagaagagctcaaaatgttaccagacctaaaagcagacaaccagaggctaaaggatgaaaatggggccttgatcagagttataagcaaactttccaaataaaaaaaaaaaaagcagcaagtaatggaattgcacatattagtaacccagtggaccataattggcagtcactggaagtctgggaagaatccttggagactgtcattttcggatatcctgccaaatgccctcttatctagaatttttgtttcattttgtttaattttctggggtgtttttgttgttgttggtttgttttttgttttttttttttaatcaagaccattgtttcatgttaatgcagctgctgagaagatttttttttaatgactgagaaaacttgtttacagctccagcatataaggaaagtgttcaaggccagatatgcctcagatatttaaccagtaagccttagttgtacataaatacttttgtgtcaacaaaaactttcagctctcacagaagacagttactcaacattttttgatgtgccacagtttcgagtttttcgatatttaaattttttggcttttcatctaagtttgggtttgtattttttccttctaaactcttcatgtggcagagtcttctatgttttcacagctttttcattacagaaaagaacacttgctcttctgtgattattgtcatgtattaggctaatgctgtgttgtctcccacctggaactgaattgcttggtggaacatatgctttcactgtttgtgcaatatgcatttatttcttatatgaatgctttaaagtcatttgaggttagatcttttaattcctattttctgcttcattggtcactttttttttattgtagtataagatgttagattctgtaatcttcacattcattttagcaggtactgagtgatgctgtatatacaaataagtgtattgttttgatttttagaccaccacatggcatgcttgactatttcttatttcaaatgtctgctaatgcagagtaggctactccatgatagtgttaaaaaacaaaatttgctaacaatgtgatataaagactttaaaagttacacattatgtggagccctatctttacaaaagtttcctactgtaaagtgcttttattttcagttttcacttgatagtactcaaccataattaaagttgcataagataattgctttacatttcacatacctatatttatctgagtgctgtctaaaactgttgtgctagccaaagtaatgctatgaaatcatttgcagaattaacccgtgagttaatgttaaatgcactgttattgccatgtgaagaggcatcgactttgataccaccatcatgttcagaccattttatacatttcagtggcctttttttttttttaaggaaaaaaaagcgcaaaaccaagtacatagtgacgatggcttttatttggacaaatagcttttatattttcattaaaccatgcaaaaaatactacatctttctggcacataactgtctccttaaccactgaacagttcagccatttgaataaattgtacattgtaaagcttatagtagctgattgtattattgattgtattgtatactatattaaatgtgaatttgtaccccttcattttaaaaggtcattgtgttctactgcctattttagattactttggggttggggaagggtgttttggtaagcaggattttaagtcctctctctctcgattggttttatgaagatataaggttatgctcttactaccaagctcaggattcttgattttaaaggtacaaggatagttgtgggagttttatttttggttatatttgaactgtatgaatggtaggtctgaatattgagaatttccatggtcttatgtggaggtaaaatatacagataactgatcagtttgagtgactgcaacatgttctggttgcacaacagttaggcatgctatggtttatatttgtgaagtttggatgcctgtgaagaatgattaaatacatgtttctaatattttagtgttttgtatttaggttatttattctttgtatctaaaactgaacagctactgtgctatattgattttattggtagtattgagcagaccttgtttctgcatgaaactagttgcaaaacccactattttggaaataaaaatgtattttgacatatacaaataaaatgaataaaactattttaaatgtgtgaacttttaatgaagacattttaaattttgttctgagatatttaaattctgcatgggtattttttcactaattgctttacttggataccaatttgaataatttctgaaattgtaatattgtgataatttgcacagcattgtacatgcacatctgtaaatgcaatcttaattgccatatttatgcaatctgtgtaccaatttggacaaatgtttatatattttacataaagctgtctgtatgcagaatctga

SEQ ID NO: 334195 - DNA, 2916 bp, Artificial Sequence
  derived and/or modified sequence
atgaagatggccgacgccaagcagaagagaaacgagcagctgaagagatggatcggcagcgagaccgacctggagccccccgtggtgaagagacagaagaccaaggtgaagttcgacgacggcgccgtgttcctggccgcctgcagcagcggcgacaccgacgaggtgctgaagctgctgcacagaggcgccgacatcaactacgccaacgtggacggcctgaccgccctgcaccaggcctgcatcgacgacaacgtggacatggtgaagttcctggtggagaacggcgccaacatcaaccagcccgacaacgagggctggatccccctgcacgccgccgccagctgcggctacctggacatcgccgagttcctgatcggccagggcgcccacgtgggcgccgtgaacagcgagggcgacacccccctggacatcgccgaggaggaggccatggaggagctgctgcagaacgaggtgaacagacagggcgtggacatcgaggccgccagaaaggaggaggagagaatcatgctgagagacgccagacagtggctgaacagcggccacatcaacgacgtgagacacgccaagagcggcggcaccgccctgcacgtggccgccgccaagggctacaccgaggtgctgaagctgctgatccaggccggctacgacgtgaacatcaaggactacgacggctggacccccctgcacgccgccgcccactggggcaaggaggaggcctgcagaatcctggtggacaacctgtgcgacatggagatggtgaacaaggtgggccagaccgccttcgacgtggccgacgaggacatcctgggctacctggaggagctgcagaagaagcagaacctgctgcacagcgagaagagagacaagaagagccccctgatcgagagcaccgccaacatggacaacaaccagagccagaagaccttcaagaacaaggagaccctgatcatcgagcccgagaagaacgccagcagaatcgagagcctggagcaggagaaggtggacgaggaggaggagggcaagaaggacgagagcagctgcagcagcgaggaggacgaggaggacgacagcgagagcgaggccgagaccgacaagaccaagcccctggccagcgtgaccaacgccaacaccagcagcacccaggccgcccccgtggccgtgaccacccccaccgtgagcagcggccaggccacccccaccagccccatcaagaagttccccaccaccgccaccaagatcagccccaaggaggaggagagaaaggacgagagccccgccacctggagactgggcctgagaaagaccggcagctacggcgccctggccgagatcaccgccagcaaggagggccagaaggagaaggacaccgccggcgtgaccagaagcgccagcagccccagactgagcagcagcctggacaacaaggagaaggagaaggacagcaagggcaccagactggcctacgtggcccccaccatccccagaagactggccagcaccagcgacatcgaggagaaggagaacagagacagcagcagcctgagaaccagcagcagctacaccagaagaaagtgggaggacgacctgaagaagaacagcagcgtgaacgagggcagcacctaccacaagagctgcagcttcggcagaagacaggacgacctgatcagcagcagcgtgcccagcaccaccagcacccccaccgtgaccagcgccgccggcctgcagaagagcctgctgagcagcaccagcaccaccaccaagatcaccaccggcagcagcagcgccggcacccagagcagaagctacctgacccccgtgagagacgaggagagcgagagccagagaaaggccagaagcagacaggccagacagagcagaagaagcacccagggcgtgaccctgaccgacctgcaggaggccgagaagaccatcggcagaagcagaagcaccagaaccagagagcaggagaacgaggagaaggagaaggaggagaaggagaagcaggacaaggagaagcaggaggagaagaaggagagcgagaccagcagagaggacgagtacaagcagaagtacagcagaacctacgacgagacctaccagagatacagacccgtgagcaccagcagcagcaccacccccagcagcagcctgagcaccatgagcagcagcctgtacgccagcagccagctgaacagacccaacagcctggtgggcatcaccagcgcctacagcagaggcatcaccaaggagaacgagagagagggcgagaagagagaggaggagaaggagggcgaggacaagagccagcccaagagcatcagagagagaagaagacccagagagaagagaagaagcaccggcgtgagcttctggacccaggacagcgacgagaacgagcaggagcagcagagcgacaccgaggagggcagcaacaagaaggagacccaggtgaacaccatcaccctgtacgagaccagcagcaccagcgccggcgacagatacgacagcctgctgggcagaagcggcagctacagctacctggaggagagaaagccctacagcagcagactggagaaggacgacagcaccgacttcaagaagctgtacgagcagatcctggccgagaacgagaagctgaaggcccagctgcacgacaccaacatggagctgaccgacctgaagctgcagctggagaaggccacccagagacaggagagattcgccgacagaagcctgctggagatggagaagagagagagaagagccctggagagaagaatcagcgagatggaggaggagctgaagatgctgcccgacctgaaggccgacaaccagagactgaaggacgagaacggcgccctgatcagagtgatcagcaagctgagcaagtag

SEQ ID NO: 334196 - protein, 271 aa, Artificial Sequence
  derived and/or modified sequence
MEDSHKSTTSETAPQPGSAVQGAHISHIAQQVSSLSESEESQDSSDSIGSSQKAHGILARRPSYRKILKDLSSEDTRGRKGDGENSGVSAAVTSMSVPTPIYQTSSGQYIAIAPNGALQLASPGTDGVQGLQTLTMTNSGSTQQGTTILQYAQTSDGQQILVPSNQVVVQTASGDMQTYQIRTTPSATSLPQTVVMTSPVTLTSQTTKTDDPQLKREIRLMKNREAARECRRKKKEYVKCLENRVAVLENQNKTLIEELKTLKDLYSNKSV

SEQ ID NO: 334197 - protein, 136 aa, Artificial Sequence
  derived and/or modified sequence
MTNSGSTQQGTTILQYAQTSDGQQILVPSNQVVVQTASGDMQTYQIRTTPSATSLPQTVVMTSPVTLTSQTTKTDDPQLKREIRLMKNREAARECRRKKKEYVKCLENRVAVLENQNKTLIEELKTLKDLYSNKSV

SEQ ID NO: 334198 - protein, 200 aa, Artificial Sequence
  derived and/or modified sequence
MEDSHKSTTSETAPQPGSAVQGAHISHIAQQVSSLSESEESQDSSDSIGSSQKAHGILARRPSYRKILKDLSSEDTRGRKGDGENSGVSAAVTSMSVPTPIYQTSSGQYIAIAPNGALQLASPGTDGVQGLQTLTMTNSGSTQQGTTILQYAQTSDGQQILVPSNQVVVQTASGDMQTYQIRTTPSATSLPQTVVMTSPV

SEQ ID NO: 334199 - protein, 170 aa, Artificial Sequence
  derived and/or modified sequence
MEDSHKSTTSETAPQPGSAVQGAHISHIAQQVSSLSESEESQDSSDSIGSSQKAHGILARRPSYRKILKDLSSEDTRGRKGDGENSGVSAAVTSMSVPTPIYQTSSGQYIAIAPNGALQLASPGTDGVQGLQTLTMTNSGSTQQGTTILQYAQTSDGQQILVPSNQVVVQ

SEQ ID NO: 334200 - DNA, 2439 bp, Artificial Sequence
  derived and/or modified sequence
agttttgcccccctcccctcccccgcccccgcccccgcccccaggcttgtgtagatcatgccgccagtagcggccctgactgccgaggaaacggtagcttaggacagttggctgttaagtgacactgattctccccgccccgcctgacccccgagaaggaggcttgtcccccgctgcgtgagggggtggggaagtgggtagtgaattcggatctacctgggaggggggagtggaagttcccgccccggagagcggcgaggcggcagccacagttgattatggaagattcccacaagagtaccacgtcagagacagcacctcaacctggttcagcagttcagggagctcacatttctcatattgctcaacaggtatcatctttatcagaaagtgaggagtcccaggactcatccgacagcataggctcctcacagaaagcccacgggatcctagcacggcgcccatcttacagaaaaattttgaaagacttatcttctgaagatacacggggcagaaaaggagacggagaaaattctggagtttctgctgctgtcacttctatgtctgttccaactcccatctatcagactagcagcggacagtacattgccattgccccaaatggagccttacagttggcaagtccaggcacagatggagtacagggacttcagacattaaccatgacaaattcaggcagtactcagcaaggtacaactattcttcagtatgcacagacctctgatggacagcagatacttgtgcccagcaatcaggtggtcgtacaaactgcatcaggagatatgcaaacatatcagatccgaactacaccttcagctacttctctgccacaaactgtggtgatgacatctcctgtgactctcacctctcagacaactaagacagatgacccccaattgaaaagagaaataaggttaatgaaaaacagagaagctgctcgagaatgtcgcagaaagaagaaagaatatgtgaaatgcctggaaaaccgagttgcagtcctggaaaatcaaaataaaactctaatagaagagttaaaaactttgaaggatctttattccaataaaagtgtttgattcctaagaaagaaaatatttttgtggacatgcataaaaattaaatggatttcctagtggagttttataaattaaaaggtcaaaactgaagctttttatttaggcttttccaaatcaaggataaatatcttacgcacgatatctagtgacagaggagaaagtggaaaatgacctcaaggaagctacgggcacaactggaagctttgtagaaattaaacatattcaaggagcaagaaatgaactttcagcagtctaaattttctaaataaccaatagttgccaatctaaaatggcagagaagatgaaatttgataaactgaattttttttaaaaatccatttaccctacaggtttgcatttgtttgctgaaatttacctttttttagttatatatatgtgtgtgtgtgtgtgtaatttctgccaataaattctaaattacaaaggtaagagaaaacctagtacattactaaatatataaagtatatgttctgattatgtatacttgttctagtgtcaagtctttttaagtgggtttttaaaagtttgttattggacttgaatggatttttgagactaggttaattatttttgaggtcttatcctaaaaggcatctaaggtacatgaatggagtatggtgattttataacattttttatcagaatggaaaaagaactgtttaaaagtttgatacttttaaatagttggtttttttgcttactctggtaatgattttctacaaatacataataaattgtttttttgagtctatattctgtatgcagttgaatatccattacttattctgctgtgctttaatagaatggaatgtttacaggcccttaaaatattatttttaaaaaaccttctgaagatacataccaaagtttttccaagaagattttataatcaatttaataatgtaaggtttatcagattctataatagtatagttattaaggcaattttatgttagagactattttgtaatgtagtgagtggtacctttataagaaaagtgactgccaatatatttttatagctgatctttataaattctaatgttgagtttttaatgattattttaaatgtttatatagtttagtaaaatttgcatctcaaagtatcatttttatattatgggacgttttcagattggctaatatttgcattgtaaattttgtatgcagtttatctaaaattcaaaaatactgtcagtacaccagcgtttaacatctatattccaatttgtatacagtttaaaattgtactgcaaaactattgtgtgctcttacacagtatgcatcatattgttgtctgtgaaattaaaggacatttgatagtcta

SEQ ID NO: 334201 - DNA, 816 bp, Artificial Sequence
  derived and/or modified sequence
atggaagattcccataaatccaccacatccgagactgccccacagccaggttctgctgttcagggcgcacacatatcccatatcgcccagcaggtctcaagtctgtccgaatctgaggagtctcaggattcttccgacagtatcgggtcatcacagaaggctcacggtatcctagctagacgtccaagctaccgcaagatcctgaaggatctgtcgagtgaggacaccagaggccgcaagggcgatggcgaaaactctggggttagtgcagccgtgactagtatgagtgttcccacccctatttaccagactagctcaggccagtacatcgccatcgctcccaatggtgcactgcagctggcatcccccggcacagacggcgtccaaggccttcagactttaaccatgacaaattccggatcaacccagcaggggaccactatccttcagtacgctcagaccagcgacggacagcagatcctggttcccagcaaccaggtggttgtccaaacggcgtcaggagacatgcagacttatcagattagaaccactccttctgcaactagtcttccacagacagtcgtgatgacatcacctgtcacactaaccagtcaaaccacaaagacagatgatccgcagcttaaacgggagattaggttgatgaaaaatagggaggcagctagggagtgtagacgcaaaaagaaagagtatgtaaaatgtctggagaacagggtcgctgtgttagaaaaccagaataaaacactgatagaggagctcaagactctgaaagacctatacagtaataagagcgtgtag

SEQ ID NO: 334202 - DNA, 603 bp, Artificial Sequence
  derived and/or modified sequence
atggaggattcccataaatccactacctcagaaacagctccacagcctggatcggctgtgcagggggcacatatctcccacattgcacagcaggtaagcagtctcagtgaaagtgaagaaagccaggacagcagcgatagcatagggtcttcccaaaaagcacacggcatactggcccggcggccgtcatatcgtaagattctgaaagaccttagttccgaggataccagggggcggaagggcgacggcgaaaattcgggcgtttccgctgctgtaacttccatgtctgtgcccacgcctatctatcagacaagtagtggacagtatattgccattgcaccgaacggagccctacaactggcctccccgggcaccgacggagtgcagggccttcagaccttgacaatgacaaactcaggcagcacccagcagggaacaactatactgcaatacgcccaaacaagcgatggtcagcagatcctggtgccatccaatcaggttgtggtgcagacagcctccggggacatgcagacctaccaaattaggactacaccatctgcaacttcacttcctcagaccgtggtgatgacctctcccgtctag

SEQ ID NO: 334203 - DNA, 513 bp, Artificial Sequence
  derived and/or modified sequence
atggaagattcccacaagagtacgacctcggagaccgcccctcagcctggctccgcagtgcagggagctcatatctcacatattgcacaacaggtttctagcctcagcgagagtgaagaatctcaggacagctcagattcaattgggagttctcagaaggcacacgggattttggccaggcgccccagctaccgcaaaattctgaaggacctcagctctgaggataccagaggccgcaaaggggacggcgagaattcaggagtctccgccgccgtgacatcgatgtcagtgcctactcccatttatcagacttcttccggtcaatacatagctatcgccccaaatggcgcgctgcaattagcttctcccggtacggacggagtccagggcttacagactctgacaatgactaattccggatcaacacaacagggcacgaccatactgcagtacgctcagacaagtgacggtcaacagattctagtgccttccaaccaggtcgtggtccagtag

SEQ ID NO: 334204 - DNA, 816 bp, Artificial Sequence
  derived and/or modified sequence
atggaggacagccacaagagcaccaccagcgagacagccccccagcccggcagcgctgtgcagggcgcccacatcagccacatcgcccagcaggtgagcagcctgtctgagagcgaggagagccaggacagcagtgacagcatcggcagcagccagaaggcccacggcatcctggcccggcggcccagctacaggaagatcctgaaggacctgagcagcgaggacacccggggcaggaaaggagatggagagaacagcggcgtgtctgctgctgtgacctccatgtctgtgcccacccccatctaccagaccagcagcggccagtacatcgccatcgccccaaatggagccctgcagctggccagccctggaacagatggagtgcagggcctgcagaccctgaccatgaccaacagcggcagcacccagcagggcaccaccatcctgcagtatgcccagaccagtgatggccagcagatcctggtgcccagcaaccaggtggtggtgcagacagccagcggggacatgcagacctaccagatccgcaccacccccagcgccaccagcctgccccagacagtggtgatgaccagccctgtgaccctgaccagccagaccaccaagacagatgacccccagctgaagcgggagatccggctgatgaagaaccgggaggccgccagagaatgtagaaggaagaagaaggagtatgtgaagtgcctggagaacagagtggccgtgctggagaaccagaacaagaccctcatcgaggagctgaagaccctgaaggacctgtacagcaacaagtctgtgtag

SEQ ID NO: 334205 - DNA, 603 bp, Artificial Sequence
  derived and/or modified sequence
atggaggacagccacaagagcaccaccagcgagacagccccccagcccggcagcgctgtgcagggcgcccacatcagccacatcgcccagcaggtgagcagcctgtctgagagcgaggagagccaggacagcagtgacagcatcggcagcagccagaaggcccacggcatcctggcccggcggcccagctacaggaagatcctgaaggacctgagcagcgaggacacccggggcaggaaaggagatggagagaacagcggcgtgtctgctgctgtgacctccatgtctgtgcccacccccatctaccagaccagcagcggccagtacatcgccatcgccccaaatggagccctgcagctggccagccctggaacagatggagtgcagggcctgcagaccctgaccatgaccaacagcggcagcacccagcagggcaccaccatcctgcagtatgcccagaccagtgatggccagcagatcctggtgcccagcaaccaggtggtggtgcagacagccagcggggacatgcagacctaccagatccgcaccacccccagcgccaccagcctgccccagacagtggtgatgaccagccctgtgtag

SEQ ID NO: 334206 - DNA, 513 bp, Artificial Sequence
  derived and/or modified sequence
atggaggacagccacaagagcaccaccagcgagacagccccccagcccggcagcgctgtgcagggcgcccacatcagccacatcgcccagcaggtgagcagcctgtctgagagcgaggagagccaggacagcagtgacagcatcggcagcagccagaaggcccacggcatcctggcccggcggcccagctacaggaagatcctgaaggacctgagcagcgaggacacccggggcaggaaaggagatggagagaacagcggcgtgtctgctgctgtgacctccatgtctgtgcccacccccatctaccagaccagcagcggccagtacatcgccatcgccccaaatggagccctgcagctggccagccctggaacagatggagtgcagggcctgcagaccctgaccatgaccaacagcggcagcacccagcagggcaccaccatcctgcagtatgcccagaccagtgatggccagcagatcctggtgcccagcaaccaggtggtggtgcagtag

SEQ ID NO: 334207 - DNA, 816 bp, Artificial Sequence
  derived and/or modified sequence
atggaggacagccacaagagcaccaccagcgagaccgccccccagccaggctccgctgtgcagggcgcgcatataagccacatcgcgcaacaagtcagctctttgtccgagagtgaagagtcccaagactccagcgattccattggctctagccagaaagcccacggaatcctggcgaggcggccaagctacaggaaaattctgaaagatctgagttccgaagacactagagggcgaaagggagacggtgagaatagtggcgtgtctgccgccgtgacgtccatgagcgtgcccacgccaatctatcagacaagttctggccaatatatagccattgcaccaaacggcgctctacagctagcgagcccgggaacagatggagtgcagggccttcagaccctgacaatgacaaattctggctctacccaacaggggaccaccatcctacagtacgcccaaacaagcgacggtcagcagattctcgtgccaagcaatcaagtagtggtgcagacagcaagcggggatatgcagacttatcagattagaacaacgccttccgcgacttccctgccacagacagtcgtcatgactagccccgtgactctcacaagccagactaccaaaacggacgatccacagctgaagcgcgagatccggttgatgaagaacagggaggcggcccgagaatgtcgaagaaagaagaaagagtacgtgaagtgcctggaaaatagagtggccgtgctcgagaaccagaataagaccctcattgaagaactgaagactctcaaggatctctatagcaataaaagcgtctag

SEQ ID NO: 334208 - DNA, 603 bp, Artificial Sequence
  derived and/or modified sequence
atggaggacagccacaagagcaccaccagcgagaccgccccccagcctggctccgccgtgcagggggcgcatattagccatatcgcccagcaggtgtcatctctgagcgagtctgaagaatcacaagactcttccgactccatcggttcctctcagaaggcgcatggcatcctggcacgccgaccaagctatcgtaaaatcctcaaagacctgagttccgaggatacaagaggaagaaaaggtgatggtgagaatagtggggtgagcgcagccgtgacttcaatgtccgtgccaacccccatctatcagacctcttctggccagtacatagccatagcaccaaacggcgctcttcagctcgcaagccccggcacggatggcgtgcaggggttgcagacactcaccatgactaacagcggctccactcagcagggtaccacaatcttacagtacgcccagacatcggacggccagcaaatcctcgtgccttccaaccaggttgtggtccagaccgcttctggagacatgcagacctatcagattagaaccaccccgtctgccacatccctgccacagaccgtggtgatgacttcacctgtatag

SEQ ID NO: 334209 - DNA, 513 bp, Artificial Sequence
  derived and/or modified sequence
atggaggacagccacaagagcaccaccagcgagaccgccccccagcccggaagcgcagtccagggagcccacatttctcatatcgcccaacaggtatcaagcctgagcgaaagtgaagagtcgcaggactcatcggattccatcggttccagccagaaggcccatgggattctcgccagacggccatcctacaggaaaatattgaaggaccttagtagtgaagatacccgcggcaggaagggagacggcgagaactctggggtttccgcggctgtgacttcaatgtctgtgccaacgccaatttatcagacaagcagtggacagtacatagccatcgctcccaacggagccctccagcttgcttcgcccggtacagatggagtccagggtttgcagacactgaccatgacaaattcaggcagcacccagcagggaacaaccattctgcagtacgctcagactagtgatggccaacaaatattagtgccttctaaccaggtggtggttcagtag

SEQ ID NO: 334210 - DNA, 816 bp, Artificial Sequence
  derived and/or modified sequence
atggaagacagccacaaatctacaaccagcgagacagccccacagccgggaagtgctgtacagggggcacacatttcccacattgcccagcaggtcagttctctgagcgaatccgaggaaagtcaagactcctccgatagtataggaagcagtcagaaagcccatggcattctggcacgaaggccctcctacagaaagatactgaaggatttgtcttccgaggatactcgcggaagaaaaggcgacggagaaaattccggcgtgagcgctgcagtaacttcaatgtccgtgcctactcctatctaccagacttcatctgggcagtacatcgccattgcccctaatggggcactgcagctcgccagtccagggaccgatggtgttcagggcctccagactctgacgatgacgaactctggctccacacagcagggcacgacaatacttcagtacgcacaaacaagcgacggacagcaaatcctggtgccctctaatcaggtggtcgtccagacagcatctggagatatgcagacctaccagatcagaaccacccccagtgcaacttccttgccacagaccgtggtcatgacttcccccgtcacgttgacatcccagacaaccaagaccgatgacccgcagctgaagcgagagatccgattgatgaagaatcgggaggctgccagagaatgcaggaggaagaagaaggaatacgtgaaatgcttggagaaccgtgtagctgtccttgagaatcagaataagacactcatcgaggaactaaagacccttaaggatctgtacagtaataagagtgtctag

SEQ ID NO: 334211 - DNA, 603 bp, Artificial Sequence
  derived and/or modified sequence
atggaagattcacacaagagtacaacctcagagacagctccccagcccggaagcgccgtccagggagctcacatctctcacatcgcccagcaagtgtcttccctgagtgagagtgaagagtctcaggattcaagcgattccataggctctagtcaaaaggcccatggaattcttgctagacggccatcatatagaaaaatactcaaggacctttcatctgaggatacgcgcggacggaagggcgatggggaaaatagcggcgtgagtgccgcagttacctccatgtctgtgccaacacctatctaccagactagcagtggccaatatatagccatcgcccctaatggggcactgcagctcgcgtcccctggcacagacggtgtgcagggtctccagaccctcaccatgacaaacagcggctccacacagcaaggcaccaccattctgcagtatgctcagacgtctgatggccaacagatcctggttccttccaaccaggtcgttgtccaaaccgcctccggcgatatgcaaacctatcagattcggactacgccttcggcaacttctctgccacagactgtggtgatgactagtccggtatag

SEQ ID NO: 334212 - DNA, 513 bp, Artificial Sequence
  derived and/or modified sequence
atggaagactcacacaaatcgactactagcgagacggccccacagcccggatcagcagtgcaaggtgcccacatatcccacatcgcacagcaggtttctagcttatctgaatccgaggagtctcaagactctagtgattccattggcagtagccagaaagcccacggaatcttggcacggagacctagctaccgcaaaatcctgaaggatctgtcatctgaggacacacgaggacgcaagggcgatggtgagaactccggggtctcagccgctgtgaccagcatgagtgtaccaactcctatctatcaaacatccagcggtcagtatatcgctattgctcccaatggcgcactccagttggcctcccccggaaccgatggggtacaagggcttcagactcttaccatgaccaatagtggctcaacacaacagggaaccacgattctacaatacgcccagactagcgacgggcagcagatcctggtcccgtccaaccaggtggtcgtgcagtag

SEQ ID NO: 334213 - DNA, 2181 bp, Artificial Sequence
  derived and/or modified sequence
gaggcggcagccacagttgattatggaagattcccacaagagtaccacgtcagagacagcacctcaacctggttcagcagttcagggagctcacatttctcatattgctcaacaggtatcatctttatcagaaagtgaggagtcccaggactcatccgacagcataggctcctcacagaaagcccacgggatcctagcacggcgcccatcttacagaaaaattttgaaagacttatcttctgaagatacacggggcagaaaaggagacggagaaaattctggagtttctgctgctgtcacttctatgtctgttccaactcccatctatcagactagcagcggacagtacattgccattgccccaaatggagccttacagttggcaagtccaggcacagatggagtacagggacttcagacattaaccatgacaaattcaggcagtactcagcaaggtacaactattcttcagtatgcacagacctctgatggacagcagatacttgtgcccagcaatcaggtggtcgtacaaactgcatcaggagatatgcaaacatatcagatccgaactacaccttcagctacttctctgccacaaactgtggtgatgacatctcctgtgactctcacctctcagacaactaagacagatgacccccaattgaaaagagaaataaggttaatgaaaaacagagaagctgctcgagaatgtcgcagaaagaagaaagaatatgtgaaatgcctggaaaaccgagttgcagtcctggaaaatcaaaataaaactctaatagaagagttaaaaactttgaaggatctttattccaataaaagtgtttgattcctaagaaagaaaatatttttgtggacatgcataaaaattaaatggatttcctagtggagttttataaattaaaaggtcaaaactgaagctttttatttaggcttttccaaatcaaggataaatatcttacgcacgatatctagtgacagaggagaaagtggaaaatgacctcaaggaagctacgggcacaactggaagctttgtagaaattaaacatattcaaggagcaagaaatgaactttcagcagtctaaattttctaaataaccaatagttgccaatctaaaatggcagagaagatgaaatttgataaactgaattttttttaaaaatccatttaccctacaggtttgcatttgtttgctgaaatttacctttttttagttatatatatgtgtgtgtgtgtgtgtaatttctgccaataaattctaaattacaaaggtaagagaaaacctagtacattactaaatatataaagtatatgttctgattatgtatacttgttctagtgtcaagtctttttaagtgggtttttaaaagtttgttattggacttgaatggatttttgagactaggttaattatttttgaggtcttatcctaaaaggcatctaaggtacatgaatggagtatggtgattttataacattttttatcagaatggaaaaagaactgtttaaaagtttgatacttttaaatagttggtttttttgcttactctggtaatgattttctacaaatacataataaattgtttttttgagtctatattctgtatgcagttgaatatccattacttattctgctgtgctttaatagaatggaatgtttacaggcccttaaaatattatttttaaaaaaccttctgaagatacataccaaagtttttccaagaagattttataatcaatttaataatgtaaggtttatcagattctataatagtatagttattaaggcaattttatgttagagactattttgtaatgtagtgagtggtacctttataagaaaagtgactgccaatatatttttatagctgatctttataaattctaatgttgagtttttaatgattattttaaatgtttatatagtttagtaaaatttgcatctcaaagtatcatttttatattatgggacgttttcagattggctaatatttgcattgtaaattttgtatgcagtttatctaaaattcaaaaatactgtcagtacaccagcgtttaacatctatattccaatttgtatacagtttaaaattgtactgcaaaactattgtgtgctcttacacagtatgcatcatattgttgtctgtgaaattaaaggacatttgatagtc

SEQ ID NO: 334214 - DNA, 745 bp, Artificial Sequence
  derived and/or modified sequence
cccttccagtcgtgcgtctcctcctttccctcgcccccaaataaaagtaaagcccgaaaccgcccgccgcggggtggctttcgcctcagaagccgccctttgcagtcgcaggcgctagctctccgtgggaggtctcgagttgattatggaagattcccacaagagtaccacgtcagagacagcacctcaacctggttcagcagttcagggagctcacatttctcatattgctcaacaggtatcatctttatcagaaagtgaggagtcccaggactcatccgacagcataggctcctcacagaaagcccacgggatcctagcacggcgcccatcttacagaaaaattttgaaagacttatcttctgaagatacacggggcagaaaaggagacggagaaaattctggagtttctgctgctgtcacttctatgtctgttccaactcccatctatcagactagcagcggacagtacattgccattgccccaaatggagccttacagttggcaagtccaggcacagatggagtacagggacttcagacattaaccatgacaaattcaggcagtactcagcaaggtacaactattcttcagtatgcacagacctctgatggacagcagatacttgtgcccagcaatcaggtggtcgtacaaactgcatcaggagatatgcaaacatatcagatccgaactacaccttcagctacttctctgccacaaactgtggtgatgacatctcctgtg

SEQ ID NO: 334215 - DNA, 549 bp, Artificial Sequence
  derived and/or modified sequence
cagggccggcgtcggtcaaggtcaattggcagttgattatggaagattcccacaagagtaccacgtcagagacagcacctcaacctggttcagcagttcagggagctcacatttctcatattgctcaacaggtatcatctttatcagaaagtgaggagtcccaggactcatccgacagcataggctcctcacagaaagcccacgggatcctagcacggcgcccatcttacagaaaaattttgaaagacttatcttctgaagatacacggggcagaaaaggagacggagaaaattctggagtttctgctgctgtcacttctatgtctgttccaactcccatctatcagactagcagcggacagtacattgccattgccccaaatggagccttacagttggcaagtccaggcacagatggagtacagggacttcagacattaaccatgacaaattcaggcagtactcagcaaggtacaactattcttcagtatgcacagacctctgatggacagcagatacttgtgcccagcaatcaggtggtcgtacaaa

SEQ ID NO: 334216 - DNA, 816 bp, Artificial Sequence
  derived and/or modified sequence
atggaggacagccacaagagcaccaccagcgagaccgccccccagcccggcagcgccgtgcagggcgcccacatcagccacatcgcccagcaggtgagcagcctgagcgagagcgaggagagccaggacagcagcgacagcatcggcagcagccagaaggcccacggcatcctggccagaagacccagctacagaaagatcctgaaggacctgagcagcgaggacaccagaggcagaaagggcgacggcgagaacagcggcgtgagcgccgccgtgaccagcatgagcgtgcccacccccatctaccagaccagcagcggccagtacatcgccatcgcccccaacggcgccctgcagctggccagccccggcaccgacggcgtgcagggcctgcagaccctgaccatgaccaacagcggcagcacccagcagggcaccaccatcctgcagtacgcccagaccagcgacggccagcagatcctggtgcccagcaaccaggtggtggtgcagaccgccagcggcgacatgcagacctaccagatcagaaccacccccagcgccaccagcctgccccagaccgtggtgatgaccagccccgtgaccctgaccagccagaccaccaagaccgacgacccccagctgaagagagagatcagactgatgaagaacagagaggccgccagagagtgcagaagaaagaagaaggagtacgtgaagtgcctggagaacagagtggccgtgctggagaaccagaacaagaccctgatcgaggagctgaagaccctgaaggacctgtacagcaacaagagcgtgtag

SEQ ID NO: 334217 - DNA, 603 bp, Artificial Sequence
  derived and/or modified sequence
atggaggacagccacaagagcaccaccagcgagaccgccccccagcccggcagcgccgtgcagggcgcccacatcagccacatcgcccagcaggtgagcagcctgagcgagagcgaggagagccaggacagcagcgacagcatcggcagcagccagaaggcccacggcatcctggccagaagacccagctacagaaagatcctgaaggacctgagcagcgaggacaccagaggcagaaagggcgacggcgagaacagcggcgtgagcgccgccgtgaccagcatgagcgtgcccacccccatctaccagaccagcagcggccagtacatcgccatcgcccccaacggcgccctgcagctggccagccccggcaccgacggcgtgcagggcctgcagaccctgaccatgaccaacagcggcagcacccagcagggcaccaccatcctgcagtacgcccagaccagcgacggccagcagatcctggtgcccagcaaccaggtggtggtgcagaccgccagcggcgacatgcagacctaccagatcagaaccacccccagcgccaccagcctgccccagaccgtggtgatgaccagccccgtgtag

SEQ ID NO: 334218 - DNA, 513 bp, Artificial Sequence
  derived and/or modified sequence
atggaggacagccacaagagcaccaccagcgagaccgccccccagcccggcagcgccgtgcagggcgcccacatcagccacatcgcccagcaggtgagcagcctgagcgagagcgaggagagccaggacagcagcgacagcatcggcagcagccagaaggcccacggcatcctggccagaagacccagctacagaaagatcctgaaggacctgagcagcgaggacaccagaggcagaaagggcgacggcgagaacagcggcgtgagcgccgccgtgaccagcatgagcgtgcccacccccatctaccagaccagcagcggccagtacatcgccatcgcccccaacggcgccctgcagctggccagccccggcaccgacggcgtgcagggcctgcagaccctgaccatgaccaacagcggcagcacccagcagggcaccaccatcctgcagtacgcccagaccagcgacggccagcagatcctggtgcccagcaaccaggtggtggtgcagtag

SEQ ID NO: 334219 - DNA, 411 bp, Artificial Sequence
  derived and/or modified sequence
atgactaactctggaagcacccagcagggaaccacaatcctgcagtacgcacaaacctccgacggccagcagatcctggtgccttccaatcaggtggtggtgcagaccgccagcggggacatgcagacctatcagattcgtactactccaagcgcgacaagtttgccgcagaccgtggttatgacgagtccagtcactttaacttcccagacaactaaaactgacgacccccagctgaaaagagagatccgtctgatgaaaaaccgggaggctgcacgggagtgcagacggaaaaaaaaggagtacgtaaaatgccttgagaatcgtgtggcagtacttgagaatcaaaataagacactgatcgaagagctgaaaactttaaaggacctttatagtaataagagtgtatag

SEQ ID NO: 334220 - DNA, 411 bp, Artificial Sequence
  derived and/or modified sequence
atgaccaacagcggcagcacccagcagggcaccaccatcctgcagtatgcccagaccagtgatggccagcagatcctggtgcccagcaaccaggtggtggtgcagacagccagcggggacatgcagacctaccagatccgcaccaccccatctgccaccagcctgccccagacagtggtgatgaccagccctgtgaccctgaccagccagaccaccaagacagatgacccccagctgaagcgggagatccggctgatgaagaaccgggaggccgcccgggagtgcaggaggaagaagaaggagtatgtgaagtgcctggagaacagagtggccgtgctggagaaccagaacaagaccctgattgaggagctgaagaccctgaaggacctgtacagcaacaagtctgtgtag

SEQ ID NO: 334221 - DNA, 411 bp, Artificial Sequence
  derived and/or modified sequence
atgaccaacagcggcagcacccagcagggcaccaccatcctgcagtatgctcagactagcgacggtcaacagattttggtaccctccaaccaggtcgtagttcaaaccgcttcgggtgatatgcagacatatcagatccggacaacaccatcggcgaccagcctgccccagaccgtagtgatgacctctccagtgaccctcacctctcagactacgaagactgatgacccgcagttgaagagggaaatccgtctcatgaaaaacagagaagctgccagagagtgtcgaagaaaaaagaaggagtatgttaaatgtctcgaaaatcgtgtggcagtcctggaaaatcaaaataagacactgatcgaggaacttaaaacgctgaaggacctgtacagcaacaaatccgtatag

SEQ ID NO: 334222 - DNA, 411 bp, Artificial Sequence
  derived and/or modified sequence
atgaccaattccgggtcaactcagcagggtactacaattctgcagtacgctcaaactagcgatgggcagcagatcctggttccctccaaccaggtcgtggttcaaacagcttccggcgacatgcagacataccagatcaggaccacgccatctgcgacttcccttcctcagactgtggtgatgaccagccccgtgacgctgacttcgcagaccaccaagactgatgatccccaactgaaaagagagattagactcatgaaaaatcgcgaggctgccagggagtgtcgcagaaagaaaaaggagtacgttaagtgcctagagaatcgggtggcagtgctggaaaaccagaacaaaactctgatcgaggaattgaaaactctaaaagacctatattccaataagagcgtatag

SEQ ID NO: 334223 - DNA, 970 bp, Artificial Sequence
  derived and/or modified sequence
tccgcgcctcggtgcagagctgcgctgcgcccttccagtcgtgcgtctcctcctttccctcgcccccaaataaaaagacgaggtcttgctacattgtccaggatggagaagtaggaattcttaaggatattgttatggagggaaaaaaatcattgattatggaagattcccacaagagtaccacgtcagagacagcacctcaacctggttcagcagttcagggagctcacatttctcatattgctcaacagttgccattgccccaaatggagccttacagttggcaagtccaggcacagatggagtacagggacttcagacattaaccatgacaaattcaggcagtactcagcaaggtacaactattcttcagtatgcacagacctctgatggacagcagatacttgtgcccagcaatcaggtggtcgtacaaactgcatcaggagatatgcaaacatatcagatccgaactacaccttcagctacttctctgccacaaactgtggtgatgacatctcctgtgactctcacctctcagacaactaagacagatgacccccaattgaaaagagaaataaggttaatgaaaaacagagaagctgctcgagaatgtcgcagaaagaagaaagaatatgtgaaatgcctggaaaaccgagttgcagtcctggaaaatcaaaataaaactctaatagaagagttaaaaactttgaaggatctttattccaataaaagtgtttgattcctaagaaagaaaatatttttgtggacatgcataaaaattaaatggatttcctagtggagttttataaattaaaaggtcaaaactgaagctttttatttaggcttttccaaatcaaggataaatatcttacgcacgatatctagtgacagaggagaaagtggaaaatgacctcaaggaagctacgggcacaactggaagctttgtagaaattaaacatattcaaggagc

SEQ ID NO: 334224 - DNA, 411 bp, Artificial Sequence
  derived and/or modified sequence
atgaccaacagcggcagcacccagcagggcaccaccatcctgcagtacgcccagaccagcgacggccagcagatcctggtgcccagcaaccaggtggtggtgcagaccgccagcggcgacatgcagacctaccagatcagaaccacccccagcgccaccagcctgccccagaccgtggtgatgaccagccccgtgaccctgaccagccagaccaccaagaccgacgacccccagctgaagagagagatcagactgatgaagaacagagaggccgccagagagtgcagaagaaagaagaaggagtacgtgaagtgcctggagaacagagtggccgtgctggagaaccagaacaagaccctgatcgaggagctgaagaccctgaaggacctgtacagcaacaagagcgtgtag

SEQ ID NO: 334225 - protein, 2078 aa, Artificial Sequence
  derived and/or modified sequence
MPGEATETVPATEQELPQPQAETAVLPMSSALSVTAALGQPGPTLPPPCSPAPQQCPLSAANQASPFPSPSTIASTPLEVPFPQSSSGTALPLGTAPEAPTFLPNLIGPPISPAALALASPMIAPTLKGTPSSSAPLALVALAPHSVQKSSAFPPNLLTSPPSVAVAESGSVITLSAPIAPSEPKTNLNKVPSEVVPNPKGTPSPPCIVSTVPYHCVTPMASIQSGVASLPQTTPTTTLAIASPQVKDTTISSVLISPQNPGSLSLKGPVSPPAALSLSTQSLPVVTSSQKTAGPNTPPDFPISLGSHLAPLHQSSFGSVQLLGQTGPSALSDPTVKTISVDHSSTGASYPSQRSVIPPLPSRNEVVPATVAAFPVVAPSVDKGPSTISSITCSPSGSLNVATSFSLSPTTSLILKSSPNATYHYPLVAQMPVSSVGTTPLVVTNPCTIAAAPTTTFEVATCVSPPMSSGPISNIEPTSPAALVMAPVAPKEPSTQVATTLRIPVSPPLPDPEDLKNLPSSVLVKFPTQKDLQTVPASLEGAPFSPAQAGLTTKKDPTVLPLVQAAPKNSPSFQSTSSSPEIPLSPEATLAKKSLGEPLPIGKPASSMTSPLGVNSSASVIKTDSYAGPDSAGPLLKSSLITPTVAAFPLESADPAGVAPTTAKGTSTYTTTASPFLEGTVSLAPKNHPVKEGTLTTLPLVPTASENCPVAPSPQNTCAPLATLVLAPEIPKSVPSPSLPPAGTPPGTKKVDGISHTSALAPVASSPKECPTEDSGASATASSKGTLTYLADSPSPLGVSVSPQTKRPPTKKGSAGPDTPIGNLSSPVSPVEASFLPENSLSFQGSKDSPATTHSPTPPSPKGAPTPSAVTPLSPKGVTLPPKETPTPSVVNLPFPKEGPATPAPKQAPALSMTSSSPKKARATPAPKGIPASPSPKGAPTPPAATPPSPKGGPATPSPKWAPTPPAATPPSPKGGPATPSPKGAPTPPAATPPSPKGGPATPSPKGAPTPPAVTPPSPKGSPAATPFPKGASTPPAATPPSPKGSPAATPLPKGAPTTPAATLPSPKGGPATPSLKGAPTPPAATPPSPKGGPATPSPKGAPMPPAATPPSPKGGLATPPHKGAPTTPAATPPSPKGGLATPPPKGAPTTPAATPPSPKGGLATPPPKGAPTTPAATPPSPKGGLATPSPKGAPTTPAATPPSPKGGLATPSPKGAPTTPAATPPSPKGGLATPSPKGAPTTPAATPPSPKGGPATPPPKGAPTPPAATPPSLKGGLATPPHKGAPNPAVVTPPSPKGGPATSPPKGAPTPPAATPPSPKGSPGTPPPKGAPTPPAVTPPSPKGTPTLPATTPSSKGGPTTPSSKEGPTPPAATPSHKGGPAMTPPSPKRGPAIPSPKGDPTSPAVIPLSPKKAPATPVTREGAATPSKGDLTPPAVTPVSLKKAPATSAPKGGPATPSSKGDPTLPAVTPPSPKEPPAPKQVATSSSPKKAPATPAPMGAPTLPAVIPSSPKEVPATPSSRRDPIAPTATLLSKKTPATLAPKEALIPPAMTVPSPKKTPAIPTPKEAPATPSSKEASSPPAVTPSTYKGAPSPKELLIPPAVTSPSPKEAPTPPAVTPPSPEKGPATPAPKGTPTSPPVTPSSLKDSPTSPASVTCKMGATVPQASKGLPAKKGPTALKEVLVAPAPESTPIITAPTRKGPQTKKSSATSPPICPDPSAKNGSKGPLSTVAPAPLLPVQKDSSKTAKGKDASHSPKGPLAPPESKASTPLTAAAFEKVLPKPESASVSAAPSPPVSLPLAPSPVPTLPPKQQFLPSSPGLVLESPSKPLAPADEDELLPLIPPEPISGGVPFQSVLVNMPTPKSAGIPVPTPSAKQPVTKNNKGSGTESDSDESVPELEEQDSTQATTQQAQLAAAAEIDEEPVSKAKQSRSEKKARKAMSKLGLRQVTGVTRVTIRKSKNILFVITKPDVYKSPASDTYIVFGEAKIEDLSQQAQLAAAEKFKVQGEAVSNIQENTQTPTVQEESEEEEVDETGVEVKDIELVMSQANVSRAKAVRALKNNSNDIVNAIMELTM

SEQ ID NO: 334226 - DNA, 2212 bp, Artificial Sequence
  derived and/or modified sequence
ctccctccatcccaacctggctccctcccacccaaccaactttccccccaacccggaaacagacaagcaacccaaactgaaccccctcaaaagccaaaaaatgggagacaatttcacatggactttggaaaatatttttttcctttgcattcatctctcaaacttagtttttatctttgaccaaccgaacatgaccaaaaaccaaaagtgcattcaaccttaccaaaaaaaaaaaaaaaaaaagaataaataaataactttttaaaaaaggaagcttggtccacttgcttgaagacccatgcgggggtaagtccctttctgcccgttgggcttatgaaaccccaatgctgccctttctgctcctttctccacaccccccttggggcctcccctccactccttcccaaatctgtctccccagaagacacaggaaacaatgtattgtctgcccagcaatcaaaggcaatgctcaaacacccaagtggcccccaccctcagcccgctcctgcccgcccagcacccccaggccctgggggacctggggttctcagactgccaaagaagccttgccatctggcgctcccatggctcttgcaacatctccccttcgtttttgagggggtcatgccgggggagccaccagcccctcactgggttcggaggagagtcaggaagggccacgacaaagcagaaacatcggatttggggaacgcgtgtcaatcccttgtgccgcagggctgggcgggagagactgttctgttccttgtgtaactgtgttgctgaaagactacctcgttcttgtcttgatgtgtcaccggggcaactgcctgggggcggggatgggggcagggtggaagcggctccccattttataccaaaggtgctacatctatgtgatgggtggggtggggagggaatcactggtgctatagaaattgagatgcccccccaggccagcaaatgttcctttttgttcaaagtctatttttattccttgatatttttctttttttttttttttttttgtggatggggacttgtgaatttttctaaaggtgctatttaacatgggaggagagcgtgtgcggctccagcccagcccgctgctcactttccaccctctctccacctgcctctggcttctcaggcctctgctctccgacctctctcctctgaaaccctcctccacagctgcagcccatcctcccggctccctcctagtctgtcctgcgtcctctgtccccgggtttcagagacaacttcccaaagcacaaagcagtttttccccctaggggtgggaggaagcaaaagactctgtacctattttgtatgtgtataataatttgagatgtttttaattattttgattgctggaataaagcatgtggaaatgacccaaacataatccgcagtggcctcctaatttccttctttggagttgggggaggggtagacatggggaaggggctttggggtgatgggcttgccttccattcctgccctttccctccccactattctcttctagatccctccataaccccactcccctttctctcacccttcttataccgcaaacctttctacttcctctttcattttctattcttgcaatttccttgcaccttttccaaatcctcttctcccctgcaataccatacaggcaatccacgtgcacaacacacacacacactcttcacatctggggttgtccaaacctcatacccactccccttcaagcccatccactctccaccccctggatgccctgcacttggtggcggtgggatgctcatggatactgggagggtgaggggagtggaacccgtgaggaggacctgggggcctctccttgaactgacatgaagggtcatctggcctctgctcccttctcacccacgctgacctcctgccgaaggagcaacgcaacaggagaggggtctgctgagcctggcgagggtctgggagggaccaggaggaaggcgtgctccctgctcgctgtcctggccctgggggagtgagggagacagacacctgggagagctgtggggaaggcactcgcaccgtgctcttgggaaggaaggagacctggccctgctcaccacggactgggtgcctcgacctcctgaatccccagaacacaacccccctgggctggggtggtctggggaaccatcgtgcccccgcctcccgcctactcctttttaagctt

SEQ ID NO: 334227 - DNA, 651 bp, Artificial Sequence
  derived and/or modified sequence
atgctggcaagtcccgcacgcccaaccctgcgcatgctcgccaatcacgccctgtccacaccacattgcgcatgtagccccgctccagcaccgaggaccgccagcgcctcccggaggagatgcgttccagttgaagcccgagccgctggcgtgtttggggatcgccttgccggagtctttgggtcacggggactgaaacatggcggtgttcaggccccacgtccgcgagtcgtgagggcggagcccagggcgggatttgccgtggtgagaagtcccaggcgcttgtgtggacggtctcatgctccgcagccaccagcacatctcggcttgggaccagggtgcttccccgcagttgccgtcgtcgtacccgttccaggcagccgagctcatcgccctttcgctgctctcttggtggagggcagcttcctcggcgaccctccgattccccctcgaagaagtggggtactggcacgcggttctgcgggtgccgattgcctggcttcatcagttactccagggccttcactttggatcccccttctgctggtcgccggttgcgtgagctgttttgtggggctggctgtctgtgtgtggatgcaggccagagtgagtccagcctggccagccggtctgtttctgctgcctcgctag

SEQ ID NO: 334228 - DNA, 219 bp, Artificial Sequence
  derived and/or modified sequence
atgtcataccagcaacagcaatgcaagcagccttgccagcctccacctgtgtgccctaccccaaagtgtccagagccgtgcccaccccctaaatgccctgagccttgtccacctcctaagtgcccgcagccatgtcctccccagcagtgtcagcagaagtgcccacctgtcaccccaagccctccttgccaacctaagtgccctcctaagtcgaagtag

SEQ ID NO: 334229 - DNA, 597 bp, Artificial Sequence
  derived and/or modified sequence
atggagagcagccgctgggacaaggaccccccaggagagcggcggccccagcagagccagcactggaggagctgtggggtgggcggggccggggaggccacccggggcggcctcttccctgtgcccttccccagcggggacagctggccagaggtgacccagcactggatgaggttccagggccagggcccctggtgccccggcctgtggaccaccccagcccacagccactgcaagccccagacaggagctgtggacaatgccagcccccggcagccccacgccccagaccagcacgagaagaatgccggccggcagcacctgcacctgtggagcctggcctgccccccctggctgcacagcatcccccacatcaagggcaccatcctgtctgaggccctgagcggcttcctggtgtctgacaggaggaccaagacagtggccggcctgcgctggctgtggctgaggaaggaggccacccccacagccagcaggaccaccctgagcagcagcctggccccccggggccggggcgtgaacaccctgggccggggcggctgcaccctgatggtgctgagcagtgacctgtgtgactag

SEQ ID NO: 334230 - DNA, 933 bp, Artificial Sequence
  derived and/or modified sequence
gtgggatgtctctctctcccccactctctgtttccctttctttttttgtcccctctctccagggctcctgatttctcttcagcctgacgctcttttcagttaacggcaaggcggtgcacccaagtccggtggtgtcctacctggtgacctcctacctgtgctgggacgccagcgacttgatgctgcactccggagccgtgtcctacctaagcccagtgggcatgtgaagcagagggcagcccttgaatgcgcggcggctgagctaccgcgggtgggccgtgcagcagggcgcagcgaggcggacatccaaacagcggaactcagacgctgactccgagcgcaccccgggccttcccatttcatacaccctcgaggatgagacccaagcacctccaaggaatagcacccgaggtcttcaggacaccgaccggtagccatggccagatgcccggccaaccccttcagcgtggccacgccctggatattcgacctcccctgaggccccaccccctgatatcaggccacgccctccgaggggaccggtggcaaactccagccctcgctctagggcccgccctttgcggctttgtccctgcccactgggtcctcacagtacctccaccccagaggcccagcatcccctcccgttctgcagacacttgtccagcgtcccgctgagctcggcagtgtggctagtttgtgtggccctgcccctggtgcccagccagggtggtctgcatggaacttctttcccggagttccggcctcagctccgatgtccacccttgtccccaggtggacacagcaccgcccagcatttggtgcaactccacccttctgcagaacgggcccctccctgggaaggcatggcttgcaataacatccctctgtaccttttctggcttccccgccacaataaaacctctcagcctc

SEQ ID NO: 334231 - DNA, 717 bp, Artificial Sequence
  derived and/or modified sequence
atgcccggccggaccggcctggccggcgagatgcccgtgggctggggaccaggcagagccggcgcatcggaacccaacgagtccacttgcgctcccgaagccctagacggccaccttggtgttgcgagacgtgagggaccaatcctgggaactctcctagggagagggaaaggacattgtcaggccctcagccaactgggccactgtccgagtccagcgtggaacaattacagtggaatgatggacattggagtggcacccagccgagtggggccatcggggcattgtggggttctaagaagtcacagtcggcctggagagttagcagtggtgatgaaccataaagtacccaggcacaggcctgtttcaagcgtgggaaccgagctgttatgggttcggtgtgctcccaaaatggtacaactaccgatctgttgcctgctgttgactccagcaccagggattgggccccgagcgcacggacacttgcataccaacctcgagactagggggctccctcggggtacgcgggagtctcagcaggcagagggggaaggggaagctatccaggaaggacggggcgcctgcaagagagcacagcgaaaagagggagagggtcccagaggtccgtgtgtggtccgcgcaggcggagttggctggggcacacggcaggttgctggtgaacccccactagtcgactgctccacagctgggacgtag

SEQ ID NO: 334232 - DNA, 1326 bp, Artificial Sequence
  derived and/or modified sequence
atgcagtggaggagaggacagacgtccggaactgggtagagatgggcctgccgtgggtgcgatctgctggggacacagacccacgcagcaggggagaggacagacgtccggaactggtgctgtcccacgtccccacccctgtggccagctccgcccactcagcctcagccttgctggggcctggcccgacctcaggagtccctgctggcctggccacccttgtgccttcgcctcagccatcggggaggctcgggtggtctcagggccaacgccaggtgagacctcagggggggtcaggggcttctgaacaaaaacggcacccccatacctgatggggctcctctgagcccacctggactgaccccctgtggccgccaggggcagctggtggcctgcctgaatgtgggggcagtgtcacccctgagcccagagagccggagcacagcagggtccaggatggccccagctacagacactgcctggcttcctccacaccccgagatccagctgcgtctcctctgtcccggggaaacttacgggaaacttatgggcggaagtccctctgcagggcccactacccagagccagccacatgcactcaggccagggctcaggggccgtgggggctggtggccccagcccttctggatccactccccacccctcactcactccgtggggaccttcatctgcctagatgggctggtctgtgctctgacggccccaggactgggtgtcggcctcaccccagcgccctggcggcctcccggccagagtagaatgttggaagggcatggcccatggccgacgccaggctcccggccagggcccacctgtgtttgtctcctcaccccggcctcctccagcctcaggccctgcctgtcagacaggggcacttgcccaggggctcctcagggagcagttggtacctgcagagcaagcccccagagcccctgccacaggcaccccagcctcaggtcaggtctggaatggacacagcccccagaccaagaccagggcctcctcaccccggggtcccctcccttggtgtcgggtgtcacccaaactccctggacgtcacccttctgccctccacgccccacaccctgggtaggagccgccttcacagctgctaacccctgccctccagcccccactgcctcttcggtaacggggctgtgactggcctaagccctgggcctccacagggcccctgtccagcccaccttgctcaaccgcagcgttccgcatcacgcctgccccttagtggttggggtgtgcatgtatatttatacactgtaattacataaatacaatttaataatc

SEQ ID NO: 334233 - DNA, 6237 bp, Artificial Sequence
  derived and/or modified sequence
atgccaggagaggcaaccgagactgtgcccgcaaccgagcaggagttgccacagccgcaggcagaaaccgcagtgcttcctatgtcttccgcgctgagcgtgaccgctgccctgggccagccagggcccacattgccccctccttgctcccccgcccctcaacagtgcccactgtctgccgctaaccaagcatctccttttccaagcccgtccacaatcgcctccactcccctggaagtgcctttcccccaaagctcgtctgggaccgcactgcccctcggcactgctccagaagcccccactttcttgcccaacctgattggccctccaattagcccggccgccctggctctggcaagtccgatgatcgcacccaccctaaaagggaccccttcatctagcgcacctctggccctggtggcattggcaccacattcagtccagaagtcttccgcatttcctcctaacttgctcacttccccgccgtccgtggccgtcgcagagtccggaagcgttatcaccctgagtgcccccatcgcaccatccgagcctaagactaatttgaacaaagtccctagtgaggtggtgcccaaccctaaagggactccttccccgccttgcatagttagcaccgtgccatatcactgcgtaacccccatggcttctattcaaagtggtgtggccagccttcctcagaccacgcctaccacaaccctggcgatagctagcccgcaggtgaaggacactaccatctcttctgtgctaatctccccccaaaacccgggaagtctgagcttaaaaggccccgtatcccctcccgccgcattgagcctctccacccagtcactgccagtggtcaccagttcacagaagaccgcggggccaaatactccacctgatttccctatatcactgggcagccacctggccccgctgcatcagtcctcattcggaagtgtgcagctccttggacagaccggaccatccgccttgtcagaccccacagtgaaaactatcagcgtggatcacagctccactggggcctcatacccctcgcagcgtagtgtgattccccctctcccaagccggaacgaagtggtgccagccactgtcgctgctttccccgtggtggctccatcggtggacaaagggccctcaactatctcttcaatcacctgctccccctctggttcccttaatgtggctacctcattctccctctcacccactaccagtctcattctgaaatcttcccctaatgcgacataccactacccgctagtggcacagatgccagtttctagtgtagggactacacctctcgtagtcaccaatccatgtacgatcgctgctgcgccaacaaccacattcgaagtggcaacttgtgtgtctccgccgatgtcaagcggccctatctcaaacatcgagcccacctcacctgcagcactcgtgatggcaccggtggctccgaaagagcccagtacacaggtcgcgacaaccctgcggatcccagtcagccctccactgcctgacccagaagatctcaagaatttgccctcctcagttcttgtaaaatttcccacacaaaaggacttacagactgtcccagccagcctcgagggggctcccttcagtccagcgcaggctgggctgacaaccaaaaaagaccctacggtgctgcctctcgttcaagcagcccctaagaattcaccaagttttcagtccacctctagctctcctgaaattcctctgtcccccgaggccacactagccaagaaaagcttgggggaacccctgcctattggcaagcctgcctcctctatgacctcccccctcggagtgaactcttcagcctcagttatcaaaactgacagctatgccggccccgactctgctggaccactgcttaagtccagtctaattacgcctacagtagccgcgtttccccttgagtccgccgaccctgcaggcgttgcacctactactgctaagggtacaagcacatataccaccactgccagtcctttcttagaaggtaccgttagtctcgctcctaagaatcatccagtcaaggaaggtacactcacgacccttccacttgttccaaccgctagtgagaactgccctgtggccccctctccacaaaacacctgtgcccctctggcaaccctcgtgctggctcctgagatacccaagagtgtcccttctccgagtctgcctccggcaggcacccccccagggaccaagaaagtggatggcatttctcacacctccgctctcgcacctgtggcctcctctcctaaggagtgtcccactgaggacagcggtgccagcgccaccgcaagctctaagggtactctcacctaccttgccgacagcccctcacccttgggcgtgtctgtgtccccccagactaagcgccctcctactaaaaagggctcagcggggccagatactcctatcgggaatctgagctcccctgtttctcccgtcgaagcttcatttctgcccgagaacagtcttagcttccaggggagcaaggactcccctgctaccacccacagccccacccccccctcgccaaagggtgccccaacaccgagtgccgtcacgcctctcagtcccaagggtgtcacgctgccgccgaaggagacaccaaccccaagtgtggtgaacctcccttttcctaaagaaggccccgccacacctgctcctaaacaagcgccggccttgtccatgacctccagctctccaaagaaagcccgggcaacccccgcccccaagggtatccctgcctcaccatcacctaaaggggccccaaccccccccgctgcaacccctccctctcctaaaggtggccccgctacaccttctccaaaatgggcccctacccctccagccgccaccccaccatccccaaaggggggcccggccacaccatcaccaaaaggtgcacctactcctcccgcggccactcctcctagtccaaaggggggaccggcgactccttccccaaagggagctcccaccccaccagccgtgactcccccgtcaccgaaaggatctcctgcggccacgccttttcctaaaggagcctcaacccctccagccgcgacccctccatcccccaaggggagtcccgccgcgacacccctcccaaagggcgcaccgaccactcccgcagcaacacttccttctcccaaaggcggacccgccaccccctcactgaagggcgccccaacaccacccgcagctacccccccaagccctaagggaggaccggcaactccttctccaaaaggcgcaccaatgccccccgccgcgactccaccttcccctaagggaggcttggccactcctccgcataaaggcgcccctacaactcctgctgccacaccaccgagtccaaaaggtggattagctacacctccccctaaaggtgctcctactactcccgccgccacacctccctctcccaagggaggtctggccaccccccctccgaagggcgcacctacaactccagctgccactccgcccagtcccaagggggggttggcaacccctagtcctaaaggggcccccacaactccagctgcgacccccccaagtccgaagggcggattggccacgccctcacccaagggggcgccaactactcctgcggccactcctccgagcccgaagggaggtcttgctactcccagccctaaaggagcacccacaacaccagctgccactcctccgtccccaaagggtgggccagcaacaccgccacccaagggcgccccaaccccccctgccgccaccccaccgtccctgaaaggtggcctcgctactcccccccacaaaggggcacctaatccagccgtcgtaactccccctagcccaaaggggggccccgccacttcaccccctaaaggtgctcccacacccccagctgcaacccctcccagtcccaaagggtctcctgggactccgccgccaaagggagcaccaaccccaccagcggttaccccccctagccctaagggaacacctaccctcccagccactacccctagcagcaagggcggccctaccacaccgagttcaaaggaggggcctacacctcccgcggcaactccaagtcataaggggggccctgccatgacacccccctctcccaagcgcggacccgccatccccagccccaagggtgacccaaccagcccggccgtaattcccctgagcccaaaaaaggcgccagcgacccctgttaccagagaaggggccgctaccccatctaaaggcgatctgacacctcccgccgtcactccggtttctctgaaaaaagctcctgcgacttctgccccaaagggaggccccgccacccctagttcaaagggtgaccctacacttccagctgtaaccccccctagtccaaaggagccccctgcccccaagcaggtagctacctcgtccagccccaagaaggcacccgctacacctgcccctatgggcgccccaaccttgcctgctgtcatcccatcctctcctaaggaggtccccgccactccttctagtagacgagatccgatcgcaccaactgcaaccctgttgagtaagaaaaccccagccacccttgcccctaaggaggctctgataccacccgctatgacagttcccagccccaaaaaaacacctgcaatccctaccccgaaagaggccccagccacaccttctagcaaagaggcaagtagccctcccgcggtcacccctagtacatacaagggggccccatccccaaaggaactcctcatccctccagccgtgaccagccccagtccaaaagaggcacctactccaccagcggtgacacctcctagcccagaaaagggccccgcgacccccgcacccaaagggacccctacgtccccccccgtgactccatcgtcactgaaggacagtccaacatcacctgcatctgtcacctgcaagatgggagccaccgtcccacaggcctccaagggtctgcccgctaaaaagggacccactgccttgaaggaggtgctcgtggctcccgctcctgagagcactcctattataaccgcccccaccaggaagggtcctcaaaccaaaaaatcttccgcgacctccccaccaatctgtccagatccttctgctaaaaacggtagcaaagggccactgagtaccgttgctcccgcgcctctcctgccagtgcagaaggactcaagcaagacggccaaagggaaggacgcatcacattctcctaagggtccactggcgccgccagagagcaaagccagcactccacttacggctgcagcttttgagaaggtgctccccaaaccggagtccgccagtgtttctgctgccccgtcccctcctgtgagcctgccgctcgcaccttccccagtccccaccctaccccccaaacagcagttcttaccttcaagccccggcctggtccttgagtccccgagcaagcctttggctcccgcagatgaagatgagctgcttcctctaattcccccagagccaatctcaggtggggtccctttccaaagcgttctggtcaacatgccaacgcccaaaagtgctggtattcctgtaccaaccccttccgctaaacagccggtcaccaagaataacaaagggagcggcacagaaagcgattccgatgaatccgtaccggaactggaggagcaggatagcactcaggctaccacccagcaagcacaactggcggctgctgctgaaatcgatgaggaaccagtgtctaaggctaaacaatcccgcagcgaaaagaaggccagaaaagctatgtccaagctggggctgaggcaggtcacaggagtgacacgggtaactattaggaagtccaagaacatcctctttgtcattactaagccggacgtctataagagtcccgcatcagacacttacatcgtctttggagaggcaaagatcgaggacctgagccagcaggcccaattagcagcggctgagaagttcaaggtgcagggcgaagctgtgtctaatattcaagaaaacacgcagactccaacagttcaggaggagagcgaggaagaggaggtggacgaaactggcgtggaggtaaaagatatcgagttagtcatgagccaggcaaacgtctctcgtgcaaaggcagtcagggctctcaagaacaactctaatgacatcgtgaatgcgatcatggagctaacaatgtag

SEQ ID NO: 334234 - DNA, 6237 bp, Artificial Sequence
  derived and/or modified sequence
atgcctggagaggccacagagaccgtgcctgccacagagcaggagctgccccagccccaggccgagacagctgtgctgcccatgagcagcgccctgtctgtgacagctgccctgggccagcccggccccaccctgcccccaccctgcagccctgccccccagcagtgccccctgtctgctgccaaccaggccagccccttccccagccccagcaccatcgccagcacccccctggaggtgcccttcccccagagcagcagcggcacagccctgcccctgggcacagcccctgaggcccccaccttcctgcccaacctgattggcccccccatcagccctgctgccctggccctggccagccccatgattgcccccaccctgaagggcacccccagcagcagcgcccccctggccctggtggccctggccccccacagcgtgcagaagagcagcgccttcccccccaacctgctgaccagccccccatctgtggccgtggccgagagcggcagcgtcatcaccctgagcgcccccatcgcccccagcgagcccaagaccaacctgaacaaggtgcccagcgaggtggtgcccaaccccaagggcacccccagccccccctgcatcgtgtccacagtgccctaccactgtgtgacccccatggccagcatccagagcggcgtggccagcctgccccagaccacccccaccaccaccctggccatcgccagcccccaggtgaaggacaccaccatcagctctgtgctgatcagcccccagaaccctggcagcctgagcctgaagggccctgtgagccccccagctgccctgagcctgagcacccagagcctgcctgtggtgaccagcagccagaagacagctggccccaacaccccaccagacttccccatcagcctgggcagccacctggcccccctgcaccagagcagctttggatctgtgcagctgctgggccagacaggccccagcgccctgagtgaccccaccgtgaagaccatctctgtggaccacagcagcactggagccagctaccccagccagaggagcgtcatcccccccctgcccagcagaaatgaggtggtgcctgccaccgtggccgccttccctgtggtggcccccagcgtggacaagggccccagcaccatcagcagcatcacctgcagccccagcggcagcctgaatgtggccaccagcttcagcctgagccccaccaccagcctcatcctgaagagcagccccaatgccacctaccactaccccctggtggcccagatgcctgtgtcctctgtgggcaccacccccctggtggtgaccaacccctgcaccatcgctgctgcccccaccaccacctttgaggtggccacctgtgtgtccccacccatgagcagcggccccatcagcaacatcgagcccaccagccctgctgccctggtgatggcccctgtggcccccaaggagcccagcacccaggtggccaccaccctgcgcatccctgtgtccccacccctgcctgaccctgaggacctgaagaacctgcccagctctgtgctggtgaagttccccacccagaaggacctgcagacagtgcctgccagcctggagggcgcccccttcagccctgcccaggccggcctgaccaccaagaaggaccccaccgtgctgcccctggtgcaggccgcccccaagaacagccccagcttccagagcaccagcagcagccctgagatccccctgagccctgaggccaccctggccaagaagagcctgggggagcccctgcccatcggcaagccagccagctccatgaccagccccctgggcgtgaacagcagcgccagcgtcatcaagacagacagctatgccggcccagattctgctggccccctgctgaagagcagcctcatcacccccaccgtggccgccttccccctggagagcgctgaccctgctggggtggcccccaccacagccaagggcaccagcacctacaccaccacagccagccccttcctggagggcaccgtgtccctggcccccaagaaccaccctgtgaaggagggcaccctgaccaccctgcccctggtgcccacagccagcgagaactgccctgtggcccccagcccccagaacacctgtgcccccctggccaccctggtgctggcccctgagatccccaagtctgtgcccagccccagcctgcccccagctggcaccccacctggcaccaagaaggtggatggcatcagccacaccagcgccctggcccctgtggccagcagccccaaggaatgtcccacagaagattctggggccagcgccacagccagcagcaagggcaccctgacctacctggccgacagccccagccccctgggcgtgtctgtgagcccccagaccaagaggcctcccaccaagaagggcagcgctggccctgacacccccatcggcaacctgagcagccctgtgtcccctgtggaggccagcttcctgcctgagaacagcctgtccttccagggcagcaaggacagccctgccaccacccacagccccaccccacccagccccaagggggcccccacccccagcgctgtgacccccctgagccccaagggcgtgaccctgccccccaaggagacccccaccccatctgtggtgaacctgcccttccccaaggagggccctgccaccccagcccccaagcaggccccagccctgtccatgaccagcagcagccccaagaaggcccgggccaccccagcccccaagggcatcccagccagccccagccccaagggggcccccaccccacctgctgccaccccacccagccccaagggcggccctgccacccccagccccaagtgggcccccaccccacctgctgccaccccacccagccccaagggcggccctgccacccccagccccaagggggcccccaccccacctgctgccaccccacccagccccaagggcggccctgccacccccagccccaagggggcccccaccccacctgctgtgaccccacccagccccaagggcagccctgctgccacccccttccccaagggggccagcaccccacctgctgccaccccacccagccccaagggcagccctgctgccacccccctgcccaagggggcccccaccaccccagctgccaccctgcccagccccaagggcggccctgccacccccagcctgaagggggcccccaccccacctgctgccaccccacccagccccaagggcggccctgccacccccagccccaagggggcccccatgcctcctgctgccaccccacccagccccaagggcggcctggccaccccaccccacaagggggcccccaccaccccagctgccaccccacccagccccaagggcggcctggccaccccaccacccaagggggcccccaccaccccagctgccaccccacccagccccaagggcggcctggccaccccaccacccaagggggcccccaccaccccagctgccaccccacccagccccaagggcggcctggccacccccagccccaagggggcccccaccaccccagctgccaccccacccagccccaagggcggcctggccacccccagccccaagggggcccccaccaccccagctgccaccccacccagccccaagggcggcctggccacccccagccccaagggggcccccaccaccccagctgccaccccacccagccccaagggcggccctgccaccccaccacccaagggggcccccaccccacctgctgccaccccacccagcctgaagggcggcctggccaccccaccccacaagggggcccccaacccagctgtggtgaccccacccagccccaagggcggccctgccaccagcccccccaagggggcccccaccccacctgctgccaccccacccagccccaagggcagccctggcaccccaccacccaagggggcccccaccccacctgctgtgaccccacccagccccaagggcacccccaccctgcctgccaccacccccagcagcaaaggaggccccaccacccccagcagcaaggagggccccaccccacctgctgccacccccagccacaagggcggccctgccatgaccccacccagccccaagaggggccctgccatccccagccccaagggggaccccaccagccctgctgtgatccccctgagccccaagaaggccccagccacccctgtgacccgggagggcgccgccacccccagcaagggggacctgaccccacctgctgtgacccctgtgtccctgaagaaggccccagccaccagcgcccccaagggcggccctgccacccccagcagcaagggggaccccaccctgcctgctgtgaccccacccagccccaaggagcccccagcccccaagcaggtggccaccagcagcagccccaagaaggccccagccaccccagcccccatgggcgcccccaccctgcctgctgtgatccccagcagccccaaggaggtgcctgccacccccagcagcagaagagaccccatcgcccccacagccaccctgctgagcaagaagaccccagccaccctggcccccaaggaggccctgatccccccagccatgacagtgcccagccccaagaagaccccagccatccccacccccaaggaggccccagccacccccagcagcaaggaggccagcagccccccagctgtgacccccagcacctacaagggggcccccagccccaaggagctgctgatccccccagctgtgaccagccccagccccaaggaggcccccaccccacctgctgtgaccccacccagccctgagaagggccctgccaccccagcccccaagggcacccccaccagcccccctgtgacccccagcagcctgaaggacagccccaccagccctgcctctgtgacctgcaagatgggcgccaccgtgccccaggccagcaagggcctgcctgccaagaagggccccacagccctgaaggaggtgctggtggccccagcccctgagagcacccccatcatcacagcccccaccaggaagggcccccagaccaagaagagcagcgccaccagcccccccatctgcccagaccccagcgccaagaatggcagcaagggccccctgagcacagtggccccagcccccctgctgcctgtgcagaaggacagcagcaagacagccaagggcaaggatgccagccacagccccaagggccccctggcccctcctgagagcaaggccagcacccccctgacagctgctgcctttgagaaggtgctgcccaagccagagagcgcctctgtgtctgctgcccccagcccccctgtgtccctgcccctggcccccagccctgtgcccaccctgccccccaagcagcagttcctgcccagcagccctggcctggtgctggagagccccagcaagcccctggccccagcagatgaagatgagctgctgcccctcatccccccagagcccatcagcggcggcgtgcccttccagagcgtgctggtgaacatgcccacccccaagtctgctggcatccctgtgcccacccccagcgccaagcagcctgtgaccaagaacaacaagggcagcggcacagaaagtgacagtgatgaatctgtgcctgagctggaggagcaggacagcacccaggccaccacccagcaggcccagctggccgctgctgctgagattgatgaggagcctgtgtccaaggccaagcagagccgctctgagaagaaggccaggaaggccatgagcaagctgggcctgcggcaggtgactggagtgaccagggtgaccatcaggaagagcaagaacatcctgtttgtgatcaccaagccagatgtgtacaagagccctgccagtgacacctacatcgtgtttggagaggccaagattgaggacctgagccagcaggcccagctggccgctgctgagaagttcaaggtgcagggcgaggccgtgagcaacatccaggagaacacccagacccccaccgtgcaggaggagagcgaggaggaggaggtggatgaaacaggagtggaggtgaaggacatcgagctggtgatgagccaggccaacgtgtcccgggccaaggctgtgcgggccctgaagaacaacagcaatgacatcgtgaatgccatcatggagctgaccatgtag

SEQ ID NO: 334235 - DNA, 6629 bp, Artificial Sequence
  derived and/or modified sequence
ggagtctgcttagttctgaggactgcgtgggtccgcgcagagagctcctgctaggcctgcgcgtcccgttctaaattcttaccctttagtccttgtcaccacccccgccgtgggaacggcctgacagtcactcgtcaaaggaagtggctgccggcagctcttgacccggaatcggatcctagtcccaccccctccgctccaggcttccttctgcaacaggcgtgggtcacgctctcgctcggtctttctgccgccatcttggttccgcgttccctgcacaaaatgcccggcgaagccacagaaaccgtccctgctacagagcaggagttgccgcagccccaggctgagacagctgtgctacctatgtcttcagccttgagtgtcactgctgccttagggcagcctggacctaccctcccccctccttgctctcctgccccacaacagtgccctctctcagctgctaaccaggcttccccattcccttccccctctactattgcctcgacccctttagaagttccttttccccagtcatcctctggaacagccctacctttgggaactgcccctgaagccccaaccttcctaccaaacctaatagggcctcccatctccccagctgccttagctctagcctctcccatgatagctccaactctgaaagggaccccttcctcttcagctcccttagctctggttgccctggctccccactcagttcagaagagttctgcttttccacctaaccttcttacttcacctccttcagtggctgtagctgagtcagggtcagtgataactctgtcagctcccattgctccctcagaaccaaagactaatcttaataaagttccctctgaggtagtccctaatccaaaaggcacccccagccctccatgtatagtcagtactgttccttaccactgtgtgactcccatggcctctattcaatctggagtggcctcccttcctcagacaacacccacaactaccctagccatcgcttcccctcaagtcaaagataccaccatttcctcagttctgatttctccacaaaacccaggaagcctcagcctgaaggggcctgttagtccacctgctgccttatctctttcaactcagtctcttcctgtggtgacctcttctcaaaagactgcgggtcccaacacccccccagattttcccatttctctgggctctcatcttgcacctttacatcagagttcttttggttctgtccaacttttaggtcaaacaggtcctagtgctttgtcagaccctacagtgaagaccatttctgtagatcattcttccacaggggcctcttatccttctcagagatctgtaattcctccccttccttccagaaatgaggtagttcctgctactgtggctgcctttccagtggtggctccatctgttgacaaaggtccctctaccatctctagcataacctgcagcccttctggctccttaaatgtagctacctctttttcattatctcctacaacctctctcattctcaaaagctctcctaatgccacttatcattatcctttagtggcccaaatgcccgtttcttctgttggaaccaccccacttgtggtgactaacccctgtacaattgctgcagcacctactactacctttgaggtagctacttgtgtttctcctccaatgtcatcaggtcccataagtaacatagaaccaacttcccctgctgccttggttatggcacctgtggctcccaaagagccttctactcaagtagcaaccactctgaggataccagtctctcctcctctgccagaccctgaagacctcaaaaatctccccagttcagtattggttaaatttccaacacaaaaagacctccaaactgtacctgcctctcttgaaggagcccctttctctccagcccaagcaggactcaccaccaagaaagaccctactgtattaccgttagtccaggcagcccctaaaaattccccttctttccaaagtacatcctcttctccagagatacctctttctcctgaagccaccctagcaaagaaaagccttggggagcctctccctataggtaagccagccagcagtatgacctcccctctgggtgttaactcctcggcctctgtaatcaagacagattcttatgcaggcccagactctgctggtccgcttctcaaaagttctctcattaccccaacagtggctgcatttcctttggaaagtgctgaccctgccggggtggctcccacaactgccaaaggtacctcaacttatacaactacagccagcccttttctagaaggaactgtctctttagctcctaaaaaccacccagttaaggaaggtactcttactactttacccttggttcctacagcttcagaaaattgccctgtggctccatccccccagaatacctgtgctcctctggctaccttagtgctggcccctgaaatcccaaagtctgtgccctcaccctctcttcccccagctgggactcctccaggtacaaaaaaggttgatggtatttctcatacttcagcattggcacctgttgcttcctctcccaaagagtgcccaactgaggactctggtgcttctgctactgcatcttccaaaggaactctgacttacctagctgattccccatctcctttaggggttagtgtgtctcctcagactaaaagacctccaaccaagaagggttctgctggccctgatactcctattggaaatctctcatcccctgtttctccagttgaagcttcatttcttccagagaatagtctttctttccaaggctctaaagactcaccagccacgacgcattctcccactcctccatcccccaaaggggcccctactccctcagctgtgactcctctgtctcccaaaggagtaacactaccccccaaagagacccccactccttcagtggtgaatctgcccttccccaaagagggtccagctactccagcacccaaacaggctcctgctctatccatgacttcttcctcccccaaaaaggcccgagcaactccagcccctaaaggaatcccagcttccccatcccccaaaggggcccccacacccccagctgcaactcctccctcccctaaaggaggcccagctaccccatccccgaaatgggcccccacacccccagctgcaactcctccctccccaaaaggaggtccagctactccatcccccaaaggggcccccacacccccagctgcaactcctccctcccccaaaggaggtccagctactccatcccccaaaggggcccccacacccccagctgtgactcctccctcccccaaaggaagtccagcagctaccccattccccaaaggggcatccacacccccagctgcaactcctccctcccccaaaggaagtccagcagctaccccactccccaaaggggcccccacaaccccagctgcaactcttccctccccaaaaggaggtccagctaccccatccctcaagggggcccccactcccccagctgcgactcctccctccccaaaaggaggcccagctaccccatcccccaaaggggcccccatgcccccagctgcaactcctccctccccaaaaggaggtctagctaccccaccccacaaaggggcacccacaaccccagctgcaactcctccctccccaaaaggaggtctagctaccccacccccaaaaggggcccccacaaccccagctgcaactcctccttccccaaaaggaggtctagctaccccacccccaaaaggggcccccacaaccccagctgcaactcctccttccccaaaaggaggtctagctaccccatcccccaaaggggcccccacaaccccagctgcaactcctccctccccaaaaggaggtctagctaccccatcccccaaaggggcccccacaaccccagctgcaactcctccctccccaaaaggaggtctggctaccccatcccccaaaggggcccccacaaccccagctgcaactcctccctccccaaaaggaggcccagctaccccaccccccaaaggggcccccactcccccagctgcaactcctccctccctaaaaggaggtctagctaccccaccccacaaaggggcccccaatcccgcagttgtaactcctccctctccaaaaggaggcccagctacctcaccccccaaaggggcccccactcctccagctgcaactcctccctccccaaaaggaagcccaggtaccccaccccccaaaggggcccccactcccccagctgtaactcctccctcccctaaagggacccctactctcccagctacaactccctcctctaaaggaggcccaactactccatcctccaaagagggccccactcccccagctgcaaccccctcccacaaaggaggtcccgctatgactcctccctcccccaaaagaggaccagctatcccatctcccaaaggggaccccacttccccagcagtgattcctctctcccccaaaaaggctccagcaactccagtcaccagagaaggcgcagccaccccatccaaaggagatctcactcccccagcagtgactcctgtctccctcaaaaaggccccagcaacttcagcccccaaaggaggcccagctaccccatcctccaaaggggatcccaccctcccagcagtgactcctccttcccccaaggagcccccagcccccaaacaagttgccacttcttcctctcccaaaaaggccccagcaactccagcccccatgggggcccccactctgccagctgtgattccttcttcccccaaagaggtcccagctaccccatcctccagaagggaccccattgccccaacagcgactcttctctctaaaaagaccccagcaactctagcccccaaagaggccctcattcccccagctatgactgttccctcccctaaaaagaccccagcaattccaacccccaaagaagccccagctaccccatcctccaaagaggcctccagtcccccagcagtgactccttccacttacaaaggggccccatcccccaaagagctcctcattccaccagctgtgacttctccttcccccaaagaggcacctactcctccagctgtgactcctccatcccccgaaaagggcccagcaactccagcccccaaagggactcccacttccccacctgtgactccttcctccctcaaagactcccctacttccccagcttctgtcacatgtaaaatgggggccactgttcctcaagcatctaaagggcttccagcaaagaaaggccccacagctctgaaagaagtacttgttgccccagctccagaaagcacgccaatcatcacagctcccactcggaaaggtccacagaccaaaaagagttctgctacttcacctcctatatgcccagatccctcagctaagaatggttctaaaggacccctttccacagtggctccagcccctctactccctgttcagaaagactcttcaaagacagcaaaaggcaaagatgcttctcattccccaaagggccccttggctcctcctgagtctaaggcgtccacccctctaacagcagctgcctttgagaaggtccttcctaaacctgaatcagcatctgtctctgcagcaccctccccaccagtctctctgcctcttgctccctccccagttcccactctgcctcctaaacagcaatttctgccgtcctctcctgggctggtgttggaatcaccctctaaaccccttgcccctgctgatgaggatgagctgctgcctctgattcccccggaaccaatctctgggggagtgcctttccagtcggtcctcgtcaacatgcccacccctaaatctgctggaatccctgtcccaaccccctctgccaagcaacctgttacgaagaacaacaaggggtctggaacagaatctgacagtgatgaatcagtaccagagcttgaagaacaggattccacccaggcaaccacacaacaagcccagctggcggcagcagctgaaattgatgaagaaccagtcagtaaagcaaaacagagtcggagtgaaaagaaggcacggaaggctatgtccaaactgggtcttcggcaggttacaggagttactagagtcactatccggaaatctaagaatatcctctttgtcatcacaaaaccagatgtctacaagagccctgcttcagatacttacatagtttttggggaagccaagatcgaagatttatcccagcaagcacaactagcagctgctgagaaattcaaagttcaaggtgaagctgtctcaaacattcaagaaaacacacagactccaactgtacaagaggagagtgaagaggaagaggtcgatgaaacaggtgtagaagttaaggacattgaattggtcatgtcacaagcaaatgtgtcgagagcaaaggcagtccgagccctgaagaacaacagtaatgatattgtaaatgcgattatggaattaacaatgtaaccatatggaagcaactttttttggtgtctcaaaggagtaactgcagcttggtttgaaatttgtactgtttctatcataaataaagttatggcttcttgttggatgaattc

SEQ ID NO: 334236 - DNA, 6237 bp, Artificial Sequence
  derived and/or modified sequence
atgcccggcgaggccaccgagaccgtgcccgccaccgagcaggagctccctcagccacaggcggaaactgccgtgttacccatgtcttcagccctgtccgtaaccgccgccctcggtcagccaggccccactctccctcctccgtgctcccccgccccgcaacagtgccccctcagcgctgcaaatcaggccagcccttttccatcaccttccacaatagcgtcgaccccactggaagtccctttcccccagtcttcttctggcacggcactaccgctcggcactgccccagaggctccaacttttctgcccaacctcataggacctccgatctcacccgctgcactggccctggcttcccctatgatcgcaccaaccctgaaaggcaccccgtcctcttctgctccactggcactggtagcgctcgcaccccatagcgtgcaaaaatcctccgcctttcctcccaacctcctgacaagtcccccctcagtggcagtggccgaaagtggttcagtgataaccctatcagcacccatcgcgccgagcgaacctaagaccaaccttaacaaagtccccagcgaggtcgtaccaaacccaaagggcactccatcgccaccatgcatcgtctcaaccgtgccctaccattgcgtgacaccaatggccagtatccaaagtggcgtagccagcttgccgcagaccacaccaaccactacacttgcaattgctagcccacaggtgaaagatacgaccattagtagcgtactgatctcaccccaaaaccccggctccctaagtcttaaagggcccgtatcaccacccgcagcgctgagcctcagtactcagtcgctgcctgtggtgacatcttcacagaaaaccgccgggccaaatacaccccctgatttcccgatatccctcggcagtcacctcgctcctctacatcagagttccttcggctcagtgcagctgctgggacagaccgggccatccgcattgtccgatccgacagtgaaaaccatttccgtcgaccacagtagcacgggagcatcctatccctcacaaaggtctgtgattccaccgttaccatcaagaaatgaggtagtccccgccaccgttgccgccttccccgtggtggctcccagtgtggataagggcccgtcgactatttcatccatcacgtgctcaccttctggttcactgaacgtggcgacgagcttctcactgtcccctacgaccagtttgatccttaaatcctccccaaatgccacgtatcattatcccctggtggcccaaatgccggtgtcttccgttgggaccacacccctagtggttacgaatccttgcaccattgcagcagcccccaccaccacgtttgaagtagctacatgtgtaagccccccaatgagctcaggcccgatcagcaatattgagccgacttctcccgccgcactggtgatggccccagtggcgcccaaggagccaagcacgcaggtagcaacgactttgaggattcctgtcagtccacccttgcctgaccccgaggacctcaaaaatctgccatcttcagtgctagtcaaattccctacccaaaaggatctgcagaccgtacccgcgagcctcgagggtgccccgttcagccccgcgcaggccggcctcaccactaaaaaggaccctacagtactgccactggtccaagccgcccccaagaattctcctagtttccaatctaccagttccagtccagagattccgcttagtcccgaagcaactctggccaagaagagtctgggagagcctctgcctattggcaaacccgcatctagcatgactagtccactgggcgtgaatagtagtgcctcagtgattaaaacagatagctacgccggcccagactccgctgggcctctactgaagagctctttgatcacgccaaccgtggctgcctttcccctcgaaagtgccgatcccgccggggttgcccccactaccgcgaaaggcactagtacctacacaacaacggcttctccattcttagaaggaacagtatcattagctcccaagaaccatccggttaaagagggcactctgactacgttacctctggtcccaacagcctcagaaaactgcccagtggccccctcgcctcagaacacctgcgcaccactggccacactggtgctggccccggaaatccccaaaagtgtgccttcaccgtctctgccccccgctggcactccacccggaacaaagaaggtagacggaatctctcacacttcagcacttgcccccgtggcctcgagccccaaagaatgtccgacagaggattccggtgctagtgccacggcgagttctaaaggaacgctgacttatctcgccgactctccttcaccattaggtgtgagcgtgagtccccagaccaagcgtcctcctaccaagaagggcagcgcaggcccagacacccctatcgggaacctctctagcccggtgtcacctgtagaagcttcattcctgcctgaaaattctctctctttccagggcagtaaggactcacccgccacaacgcactctccaacaccaccaagccccaagggcgctccaaccccctctgctgtgacgcctctgagccctaagggggttaccctgcctccaaaggaaacaccgactccatctgtggttaacctcccattccctaaagaggggcccgctacccctgcccctaagcaggcacccgcgctctcaatgacatcctcgagtcccaagaaagcccgcgcaacccccgctcccaaaggaatccctgccagtccttcccctaagggtgctcctaccccccccgcagcaacaccgccttcgcccaaggggggtcccgcgaccccatctccaaaatgggcccccactcccccagcagccacgcctccctccccaaagggcgggcccgccacaccttcaccaaaaggcgcaccaacaccccctgcggcaacaccaccatccccgaaagggggccccgcaaccccatcccctaagggcgctcctacacctcccgccgtgacccccccatcaccgaagggctcacccgctgcaactccgtttccaaaaggggctagcacgccaccggcagctactccgccctctccaaagggatcgcccgctgctacaccactgcctaagggagccccaacaactcccgctgccacactgccatctcccaaggggggtcccgcaacaccaagtctcaagggtgctcctacaccacctgcagcgaccccgccctcccccaaaggcggccccgccacaccgtcacccaagggtgccccaatgcccccagcggcaaccccacccagtcccaaaggcggcctggccacccccccccataagggcgctcccaccactccggcggcaaccccgccatccccgaagggagggctggctactcccccgcccaagggggcccccaccacaccagccgcaacaccaccatcgcctaaaggcggactggctactccacctcccaaaggcgcccccaccacccctgccgccaccccgcccagtcccaagggaggcctcgccacgccatcaccaaagggagccccgacaacacccgccgctacaccacccagccccaaaggcgggctggccacaccttctcctaaaggagccccaacaacccctgcagcgaccccccctagtccaaagggggggctcgctacaccgagtcccaaaggtgcccccaccacacccgcagccactcccccatctcctaaaggcgggcccgcaacccctccacctaaaggcgcccctacaccccccgcagccactccaccctcgctgaaaggagggcttgcaacccctccccacaagggcgcgcctaaccctgcagtggttacacctccctcacccaaagggggtccagcaacctctccccccaaaggggctccgaccccccccgccgccactccacctagcccaaagggatcgcccggaaccccccccccaaagggagccccaactccccccgccgtcacacctcccagtccaaaggggactcccacgctgcctgccaccacgccatcatccaagggagggccaacaacccctagtagcaaggagggaccaacaccccccgctgccacaccttcacataaaggcggccctgccatgactcctccgtcccctaaaagaggccctgccatcccgtccccaaaaggtgaccccacttcccctgctgtaataccattgtcacccaaaaaggcccccgccacccccgtcacacgcgagggggctgcgactcctagtaaaggtgatttgactccgcctgcggttacccctgtgtctttgaagaaagccccggccacttcagcccctaagggtggcccggcaactcctagctctaagggagaccctaccctgcccgccgtcaccccaccttcacctaaagaaccgcccgcacctaaacaggtagcgacctcatcgagtccaaaaaaggccccggctactcccgcccctatgggcgcccctactttacccgccgtcatccctagtagccccaaggaggtccccgccaccccttcctccagaagagatccaatcgctccaactgcaactctgctgtccaagaagacaccagcaactttggcccccaaggaggccctcatccccccagctatgaccgtgccctcgcctaaaaaaactcccgcaatcccaaccccaaaggaggcccctgctacaccctcttccaaggaagcctcatctccaccagccgtgaccccttctacctataagggtgcgccctctcctaaagaactgctgatacccccggccgtaacgagcccatcccccaaggaggctcctactcctccagctgtgaccccgcctagtcccgagaaaggaccagccacaccagctccgaagggtaccccaacctcgccccccgttacaccctccagcctgaaggactccccaacctctccagcctccgtcacttgtaagatgggtgccacggtaccccaggctagcaaggggctgccggcaaagaagggccctaccgcgctgaaggaggtcctggtcgcccctgcccctgagtcgaccccaatcatcaccgcgccaacacggaagggaccgcaaacaaaaaaatcatctgctacttccccccctatttgtcccgatccctctgccaagaatggtagtaagggacctctttccacagtggcccccgctcccttgctgccagtacagaaggacagtagtaaaaccgctaaagggaaagatgcctctcattcaccaaaagggccactcgctccccccgagagtaaagcctcaacaccgttgactgccgcagcgttcgaaaaggtgctccctaaacctgaatctgcctctgtttccgcagctccctccccacctgtctccctccccctggccccctcaccggtcccgacattgcctccaaaacagcagtttctgccttcttcaccaggcctggttctggaatcaccctcgaagccactcgctccggctgatgaggatgagcttctgccgctgattcctcctgagccgatcagtggaggtgttccattccaaagcgttctggtgaatatgcctacacccaagtccgcaggaatacccgtgccaacccccagcgcaaaacaaccagtgaccaagaacaataaaggttccggtactgagtcggatagtgatgagtctgtgcctgagctggaggaacaggactcgactcaggccacaacacaacaggcacaactggctgctgccgcagaaatcgatgaagaaccagtaagcaaggcaaagcaatcgaggtcagagaaaaaggcccgcaaagcgatgtcaaagcttgggctgcgccaggttacaggagtcacccgggtcaccattcgcaagtcgaaaaacatcctgttcgtaatcactaaacccgatgtctacaaatctcccgccagcgatacatacattgttttcggtgaagccaagattgaagacctaagccagcaggcccaactggcagcagctgagaaatttaaggtccagggggaagcagtaagtaacattcaagaaaatacccagactccaactgtccaagaggaaagtgaggaggaggaggtggacgaaaccggcgttgaggtgaaagacatcgaactggtcatgtcccaagctaatgtaagccgagccaaagcagtgcgggcacttaaaaacaacagcaacgacatcgtgaatgccattatggagttaacaatgtag

SEQ ID NO: 334237 - DNA, 6236 bp, Artificial Sequence
  derived and/or modified sequence
atgccaggcgaggccactgaaacggtgcctgccacagaacaggagctcccccaaccccaggcggagacagctgtgcttccgatgagctccgctctctctgttactgccgcattgggacaacctgggcctaccctgcccccaccatgcagccccgctccccagcagtgtcccctcagtgcggcaaatcaagcgagcccattcccttcccctagtaccatcgcctccacgcccctagaggtaccgttcccccagtcttcctctggaaccgcattacccctcggcactgcaccagaggcaccaaccttcttgccaaacctgattggcccacccatcagccccgcagccctcgctttagcaagcccgatgatcgcacccacacttaagggaacccctagttcatcagccccactggctttggtcgcattagcgcctcatagcgtccagaagagcagtgcctttccacctaaccttttaacctcccccccttccgtcgcagtcgccgagagtggctctgttattacactctccgcccctattgcaccctccgagcctaaaacaaatctgaataaggtgccctctgaggtggtccctaacccgaagggcactccttcccctccctgcattgtcagtacggtcccctatcactgtgttacgcctatggcaagtattcagagcggcgtcgcatcactcccgcagacaacgccaactactaccttagctatcgcctcccctcaggtgaaggatacaaccatctcctccgtactaattagcccgcagaatccaggttcgctttcgttgaaaggaccggtgagcccgccagcggctctgagcctcagcacacaatctctccctgttgttactagctctcaaaaaacggccggaccaaatacaccacccgatttcccaatctcccttggcagccatttggctcctcttcaccagagtagtttcggctcagtgcagctgcttggccagaccggtccatccgctctaagcgaccccactgtcaagaccatctcagtggaccactcatctacaggggctagctacccatcccaaagatcagttatccccccactgccctcccgcaatgaggtggtgcccgctaccgttgccgcttttccagtggtcgccccttcagtggataagggtccttctacaatcagctcaatcacctgcagcccttcaggaagtttaaatgtcgccacatccttcagcctcagccctacaacatcacttatcttgaagtctagtcccaatgccacctatcattatccactggtggcccagatgcccgtatcatcagtcggaactacgcctctcgtggtcactaacccctgtactatagccgctgccccaaccacaacgttcgaagtggccacctgcgtcagtcctcctatgagctctggccctatctctaatattgagccaacaagtccggcagctttggtaatggctccagtggcaccaaaggagccgagtactcaggtagccactactctgcgcattcctgtctcgcccccactaccagacccggaagacctgaagaacctgccatcgtccgtcttagtgaaattccccacacaaaaggacctgcagactgtacccgcttctctggagggcgctccattcagcccagcccaggccggtttaacaactaagaaggacccaaccgtgctgcctctggtacaggccgcacctaagaattctccctcgttccagagcacaagctcatcacctgagatccccctgagcccagaagccacactggcaaagaagagtttgggagagcccctgccaattggcaaacccgcatctagcatgaccagtcctctgggcgttaactcttcagcatctgtcatcaagactgacagctacgccggtcccgacagtgcaggaccactcctgaagtcttctctgatcactccgactgtggctgcttttccgctcgaaagtgcggaccctgctggggtcgcccctactacagctaaaggcactagcacatatacaacaaccgctagtccctttctggaagggactgtgagcctggccccaaagaaccaccccgtcaaagagggaacattgaccacactcccactggtccccaccgcctcggaaaattgtccagttgctccttcacctcagaatacatgtgctcccctagccacattggtgctggccccagagattcccaagtctgtcccttcaccttctttgccacccgctggtacccctcccggtaccaagaaagtggatggaatctctcacacaagtgccttagcgccagtggcgtcatcacctaaagaatgcccaacagaggatagtggagcttctgccacagccagtagcaagggcaccctcacgtacctagcagactctccgtctccgctgggggtgagcgtctcccctcagacaaaaaggccacccactaaaaaggggtccgcgggacctgacactcctattggaaatctgagctcccctgtctcccccgttgaggcttcgttccttcctgagaacagcttgtctttccagggatctaaggatagcccagcgacaacgcattcgcctacgcctccatcccccaaaggggcacctacaccctctgcagtaactcccttgtcgccaaagggtgtgacactcccccctaaagaaactccgaccccatccgttgtgaacctcccctttcctaaagaaggcccagccacccctgccccaaagcaggccccagctctcagtatgacaagttcatctccgaaaaaggccagagcaacacccgcacccaagggtatcccagcatctccatccccaaagggcgctcccacgccacccgctgctactcccccaagcccaaaagggggtccggctacaccctcccctaagtgggcacctactcccccagcagctacccctccatcccctaaaggcggtccagccacaccgagccccaaaggggctcctacaccccctgccgctaccccgccatctccaaagggaggcccagctacccctagtccgaagggggcaccaacccctcctgcagtgactcccccttctcccaagggcagccctgcggcaaccccattccccaagggcgctagtacgccccctgcagcaacacctcccagccctaaaggctccccagccgctacgccgttacctaagggcgcacctaccactcctgccgctaccctgccttcccctaaggggggacctgccacaccttcactgaaaggggctccgactcctccagccgctacaccaccatccccgaagggaggaccagcgacaccaagcccgaagggggctcccatgcctccagccgcaacccccccatccccaaaagggggattggctacccctcctcacaagggcgctccaactaccccagctgccaccccacccagcccgaagggaggactcgccaccccccctccaaaaggagccccaacgaccccagctgccacaccaccgtcacccaagggtggactggccacaccgccaccgaagggcgctcctacaacaccagctgccaccccccctagccctaaaggcggtctcgcaaccccctctccaaaaggagcacccacaacgccagcggcaactcctccttccccaaagggcggtttagccaccccaagccccaaaggtgcaccaactacaccggctgctacgcctccgagccccaagggagggctggcaactccttctcccaaaggtgcacctacgacccccgcagctacaccccctagcccaaagggcggacctgcaaccccacccccaaaaggcgctcctacgccacctgccgctacacccccttcactgaaggggggtctggcgaccccaccacataaaggagctcctaatccagctgtggtcacaccccctagccctaaaggagggcctgccacctcaccaccaaagggcgcacctactccccctgccgcaacaccccctagcccaaaggggtccccagggacacctccacccaaaggggctcctaccccacccgctgtgacaccgccatctccgaaaggcactcctacattgccagccacgacgccttcctccaaggggggtccaacgacaccgagctcaaaggagggccctaccccacccgcagcaactccttctcataagggagggccagctatgacaccaccctccccaaagcggggtccagccatcccatcccctaagggagacccgactagccccgcagtgatacctctctcccccaagaaagctccagccaccccagtcacccgtgagggggctgccacccccagcaagggtgacttgacacctcctgctgtcacgcccgtcagcttgaagaaagctcctgcaactagcgctcccaagggcggaccagccaccccctcctcaaagggggatcccacactacctgcggtgactccccctagccctaaggaaccacctgctccgaaacaggtggctacaagcagctcacccaagaaggctcctgccacccctgcaccaatgggagctccaacactgcctgccgttattcctagctctcctaaagaggtgcccgctaccccaagcagtcgtagggatcccattgcacctaccgccacactactgagcaagaaaacccccgctaccctggctcccaaagaagccctcatcccacccgctatgaccgtcccctctcccaagaagacccccgcaattcccactccaaaggaggccccagcgactccatcctcaaaagaagcctcaagcccaccagcagtgaccccaagcacatacaaaggcgctccttctccgaaggagttgttgatcccccctgctgtgaccagtccatctcccaaagaggcaccaacgccccctgcggtgacgcctccgtctcctgagaaaggcccagctacacccgcaccaaaaggtacgccaacatcacccccagtcacgccctcatctctgaaggatagtcccacaagccccgcatctgtcacgtgcaagatgggggcaactgtgccacaagcaagtaagggactgccagcaaagaagggcccaacagccctgaaggaagtactggtcgctcctgcaccggagagtactcctattatcactgcacccacccggaagggcccacaaaccaagaagtcgagcgctactagccccccaatatgtccggatccgtccgcaaaaaacggctctaagggaccacttagcacagtagctcctgcccctctcttgccagtacaaaaggactcaagcaagacagccaagggcaaggacgccagccattcgcccaaaggccctctggcgccaccagagagcaaagccagtacccccctcactgccgctgcttttgagaaggtgctccctaagcccgaatccgcttcagtaagcgcagcccctagcccacctgtgtccctccctcttgccccttcccctgttcctacccttcctccaaaacagcagtttctcccctcatctcccggattggtcctggaatcaccgtctaagccactggctccagcagatgaggatgagctactaccattaattccacctgagcctatctctgggggagtccccttccagtctgtgctggtcaatatgcccacccctaaatcagcgggtataccagtacccactccatccgctaagcagcctgtaactaagaataacaagggctcgggaacagaatctgatagcgacgaatcagtgcccgagcttgaggaacaggatagtactcaggcaactacccagcaggcccagttagccgcagctgctgagattgacgaagaacctgtatccaaggcaaaacaatccagatccgaaaagaaggcccgtaaagccatgtctaagctgggattgaggcaggtcacaggcgtgacaagagtaactatacgtaagagcaaaaacatcctcttcgttattacgaaacctgacgtctacaaatcccccgctagtgatacttatatcgtgttcggcgaggccaagatagaagaccttagtcaacaggcccagctcgcagcagcagagaagttcaaagtgcagggcgaggccgtttcgaatatccaagaaaacacccagactcccacagtccaggaggaatcagaagaagaggaagtggatgagaccggtgttgaagttaaggatattgagttggtgatgtcccaagctaacgtgtcaagagccaaggccgtgcgggctcttaagaacaactccaatgatatcgttaatgccatcatggaattaaccatgta

SEQ ID NO: 334238 - DNA, 490 bp, Artificial Sequence
  derived and/or modified sequence
ggagtcgcgctgcgcacgggggcccgggaagggtttgggctgcggacgtctggggtgaccatgaagaactggggcgctggggtgagggaacggggtgcagaacccacagttgggtgcgctgctccaagagggaacttgggggtagcatttgggactcgaaggagttgggtccaggtaggcaggggaacctggggtgcactgctgagcagacctgggcgcccgagaacggcccagcctctgggtctgactttgggataggacaggagctgtggggcatcctgcctctctgcggagtctgaaggctcctctccttaacagctgggctttttccctccttcccaatcgagtctgggcgtccagcccccgagtgctcgtcacgctggaccctggcgcggagccctggcatcacgactcggaggccgagactctctcctggagtcacccaggagagatggagccatctcagtgtgtggaggagctggaggatgat

SEQ ID NO: 334239 - DNA, 6237 bp, Artificial Sequence
  derived and/or modified sequence
atgcccggcgaggccaccgagaccgtgcccgccaccgagcaggagctgccccagccccaggccgagaccgccgtgctgcccatgagcagcgccctgagcgtgaccgccgccctgggccagcccggccccaccctgccccccccctgcagccccgccccccagcagtgccccctgagcgccgccaaccaggccagccccttccccagccccagcaccatcgccagcacccccctggaggtgcccttcccccagagcagcagcggcaccgccctgcccctgggcaccgcccccgaggcccccaccttcctgcccaacctgatcggcccccccatcagccccgccgccctggccctggccagccccatgatcgcccccaccctgaagggcacccccagcagcagcgcccccctggccctggtggccctggccccccacagcgtgcagaagagcagcgccttcccccccaacctgctgaccagcccccccagcgtggccgtggccgagagcggcagcgtgatcaccctgagcgcccccatcgcccccagcgagcccaagaccaacctgaacaaggtgcccagcgaggtggtgcccaaccccaagggcacccccagccccccctgcatcgtgagcaccgtgccctaccactgcgtgacccccatggccagcatccagagcggcgtggccagcctgccccagaccacccccaccaccaccctggccatcgccagcccccaggtgaaggacaccaccatcagcagcgtgctgatcagcccccagaaccccggcagcctgagcctgaagggccccgtgagcccccccgccgccctgagcctgagcacccagagcctgcccgtggtgaccagcagccagaagaccgccggccccaacaccccccccgacttccccatcagcctgggcagccacctggcccccctgcaccagagcagcttcggcagcgtgcagctgctgggccagaccggccccagcgccctgagcgaccccaccgtgaagaccatcagcgtggaccacagcagcaccggcgccagctaccccagccagagaagcgtgatcccccccctgcccagcagaaacgaggtggtgcccgccaccgtggccgccttccccgtggtggcccccagcgtggacaagggccccagcaccatcagcagcatcacctgcagccccagcggcagcctgaacgtggccaccagcttcagcctgagccccaccaccagcctgatcctgaagagcagccccaacgccacctaccactaccccctggtggcccagatgcccgtgagcagcgtgggcaccacccccctggtggtgaccaacccctgcaccatcgccgccgcccccaccaccaccttcgaggtggccacctgcgtgagcccccccatgagcagcggccccatcagcaacatcgagcccaccagccccgccgccctggtgatggcccccgtggcccccaaggagcccagcacccaggtggccaccaccctgagaatccccgtgagcccccccctgcccgaccccgaggacctgaagaacctgcccagcagcgtgctggtgaagttccccacccagaaggacctgcagaccgtgcccgccagcctggagggcgcccccttcagccccgcccaggccggcctgaccaccaagaaggaccccaccgtgctgcccctggtgcaggccgcccccaagaacagccccagcttccagagcaccagcagcagccccgagatccccctgagccccgaggccaccctggccaagaagagcctgggcgagcccctgcccatcggcaagcccgccagcagcatgaccagccccctgggcgtgaacagcagcgccagcgtgatcaagaccgacagctacgccggccccgacagcgccggccccctgctgaagagcagcctgatcacccccaccgtggccgccttccccctggagagcgccgaccccgccggcgtggcccccaccaccgccaagggcaccagcacctacaccaccaccgccagccccttcctggagggcaccgtgagcctggcccccaagaaccaccccgtgaaggagggcaccctgaccaccctgcccctggtgcccaccgccagcgagaactgccccgtggcccccagcccccagaacacctgcgcccccctggccaccctggtgctggcccccgagatccccaagagcgtgcccagccccagcctgccccccgccggcaccccccccggcaccaagaaggtggacggcatcagccacaccagcgccctggcccccgtggccagcagccccaaggagtgccccaccgaggacagcggcgccagcgccaccgccagcagcaagggcaccctgacctacctggccgacagccccagccccctgggcgtgagcgtgagcccccagaccaagagaccccccaccaagaagggcagcgccggccccgacacccccatcggcaacctgagcagccccgtgagccccgtggaggccagcttcctgcccgagaacagcctgagcttccagggcagcaaggacagccccgccaccacccacagccccaccccccccagccccaagggcgcccccacccccagcgccgtgacccccctgagccccaagggcgtgaccctgccccccaaggagacccccacccccagcgtggtgaacctgcccttccccaaggagggccccgccacccccgcccccaagcaggcccccgccctgagcatgaccagcagcagccccaagaaggccagagccacccccgcccccaagggcatccccgccagccccagccccaagggcgcccccaccccccccgccgccaccccccccagccccaagggcggccccgccacccccagccccaagtgggcccccaccccccccgccgccaccccccccagccccaagggcggccccgccacccccagccccaagggcgcccccaccccccccgccgccaccccccccagccccaagggcggccccgccacccccagccccaagggcgcccccaccccccccgccgtgaccccccccagccccaagggcagccccgccgccacccccttccccaagggcgccagcaccccccccgccgccaccccccccagccccaagggcagccccgccgccacccccctgcccaagggcgcccccaccacccccgccgccaccctgcccagccccaagggcggccccgccacccccagcctgaagggcgcccccaccccccccgccgccaccccccccagccccaagggcggccccgccacccccagccccaagggcgcccccatgccccccgccgccaccccccccagccccaagggcggcctggccacccccccccacaagggcgcccccaccacccccgccgccaccccccccagccccaagggcggcctggccacccccccccccaagggcgcccccaccacccccgccgccaccccccccagccccaagggcggcctggccacccccccccccaagggcgcccccaccacccccgccgccaccccccccagccccaagggcggcctggccacccccagccccaagggcgcccccaccacccccgccgccaccccccccagccccaagggcggcctggccacccccagccccaagggcgcccccaccacccccgccgccaccccccccagccccaagggcggcctggccacccccagccccaagggcgcccccaccacccccgccgccaccccccccagccccaagggcggccccgccacccccccccccaagggcgcccccaccccccccgccgccaccccccccagcctgaagggcggcctggccacccccccccacaagggcgcccccaaccccgccgtggtgaccccccccagccccaagggcggccccgccaccagcccccccaagggcgcccccaccccccccgccgccaccccccccagccccaagggcagccccggcacccccccccccaagggcgcccccaccccccccgccgtgaccccccccagccccaagggcacccccaccctgcccgccaccacccccagcagcaagggcggccccaccacccccagcagcaaggagggccccaccccccccgccgccacccccagccacaagggcggccccgccatgaccccccccagccccaagagaggccccgccatccccagccccaagggcgaccccaccagccccgccgtgatccccctgagccccaagaaggcccccgccacccccgtgaccagagagggcgccgccacccccagcaagggcgacctgaccccccccgccgtgacccccgtgagcctgaagaaggcccccgccaccagcgcccccaagggcggccccgccacccccagcagcaagggcgaccccaccctgcccgccgtgaccccccccagccccaaggagccccccgcccccaagcaggtggccaccagcagcagccccaagaaggcccccgccacccccgcccccatgggcgcccccaccctgcccgccgtgatccccagcagccccaaggaggtgcccgccacccccagcagcagaagagaccccatcgcccccaccgccaccctgctgagcaagaagacccccgccaccctggcccccaaggaggccctgatcccccccgccatgaccgtgcccagccccaagaagacccccgccatccccacccccaaggaggcccccgccacccccagcagcaaggaggccagcagcccccccgccgtgacccccagcacctacaagggcgcccccagccccaaggagctgctgatcccccccgccgtgaccagccccagccccaaggaggcccccaccccccccgccgtgaccccccccagccccgagaagggccccgccacccccgcccccaagggcacccccaccagcccccccgtgacccccagcagcctgaaggacagccccaccagccccgccagcgtgacctgcaagatgggcgccaccgtgccccaggccagcaagggcctgcccgccaagaagggccccaccgccctgaaggaggtgctggtggcccccgcccccgagagcacccccatcatcaccgcccccaccagaaagggcccccagaccaagaagagcagcgccaccagcccccccatctgccccgaccccagcgccaagaacggcagcaagggccccctgagcaccgtggcccccgcccccctgctgcccgtgcagaaggacagcagcaagaccgccaagggcaaggacgccagccacagccccaagggccccctggccccccccgagagcaaggccagcacccccctgaccgccgccgccttcgagaaggtgctgcccaagcccgagagcgccagcgtgagcgccgcccccagcccccccgtgagcctgcccctggcccccagccccgtgcccaccctgccccccaagcagcagttcctgcccagcagccccggcctggtgctggagagccccagcaagcccctggcccccgccgacgaggacgagctgctgcccctgatcccccccgagcccatcagcggcggcgtgcccttccagagcgtgctggtgaacatgcccacccccaagagcgccggcatccccgtgcccacccccagcgccaagcagcccgtgaccaagaacaacaagggcagcggcaccgagagcgacagcgacgagagcgtgcccgagctggaggagcaggacagcacccaggccaccacccagcaggcccagctggccgccgccgccgagatcgacgaggagcccgtgagcaaggccaagcagagcagaagcgagaagaaggccagaaaggccatgagcaagctgggcctgagacaggtgaccggcgtgaccagagtgaccatcagaaagagcaagaacatcctgttcgtgatcaccaagcccgacgtgtacaagagccccgccagcgacacctacatcgtgttcggcgaggccaagatcgaggacctgagccagcaggcccagctggccgccgccgagaagttcaaggtgcagggcgaggccgtgagcaacatccaggagaacacccagacccccaccgtgcaggaggagagcgaggaggaggaggtggacgagaccggcgtggaggtgaaggacatcgagctggtgatgagccaggccaacgtgagcagagccaaggccgtgagagccctgaagaacaacagcaacgacatcgtgaacgccatcatggagctgaccatgtag

SEQ ID NO: 334240 - protein, 323 aa, Artificial Sequence
  derived and/or modified sequence
MMQNPQILAALQERLDGLVETPTGYIESLPRVVKRRVNALKNLQVKCAQIEAKFYEEVHDLERKYAVLYQPLFDKEELKEKAKIEDEKKDEEKEDPKGIPEFWLTVFKNVDLLSDMVQEHDEPILKHLKDIKVKFSDAGQPMSFVLEFHFEPNEYFTNEVLTKTYRMRSEPDDSDPFSFDGPEIMGCTGCQIDWKKGKNVTLKTIKKKQKHKGRGTVRTVTKTVSNDSFFNFFAPPEVPESGDLDDDAEAILAADFEIGHFLRERIIPRSVLYFTGEAIEDDDDDYDEEGEEADEEGEEEGDEENDPDYDPKKDQNPAECKQQ

SEQ ID NO: 334241 - protein, 349 aa, Artificial Sequence
  derived and/or modified sequence
MMQNPQILAALQERLDGLVETPTGYIESLPRVVKRRVNALKNLQVKCAQIEAKFYEEVHDLERKYAVLYQPLFDKRFEIINAIYEPTEEECEWKPDEEDEISELKEKAKIEDEKKDEEKEDPKGIPEFWLTVFKNVDLLSDMVQEHDEPILKHLKDIKVKFSDAGQPMSFVLEFHFEPNEYFTNEVLTKTYRMRSEPDDSDPFSFDGPEIMGCTGCQIDWKKGKNVTLKTIKKKQKHKGRGTVRTVTKTVSNDSFFNFFAPPEVPESGDLDDDAEAILAADFEIGHFLRERIIPRSVLYFTGEAIEDDDDDYDEEGEEADEEGEEEGDEENDPDYDPKKDQNPAECKQQ

SEQ ID NO: 334242 - protein, 208 aa, Artificial Sequence
  derived and/or modified sequence
MVQEHDEPILKHLKDIKVKFSDAGQPMSFVLEFHFEPNEYFTNEVLTKTYRMRSEPDDSDPFSFDGPEIMGCTGCQIDWKKGKNVTLKTIKKKQKHKGRGTVRTVTKTVSNDSFFNFFAPPEVPESGDLDDDAEAILAADFEIGHFLRERIIPRSVLYFTGEAIEDDDDDYDEEGEEADEEGEEEGDEENDPDYDPKKDQNPAECKQQ

SEQ ID NO: 334243 - DNA, 5202 bp, Artificial Sequence
  derived and/or modified sequence
cgggcgccgggcacgcgggccaggccttccccacaactgatggggttgaaatttcctttccggctcagcagggagaaaagatatggtggggtgcttaacagaggaggttagacaccggcgggaaccagaggagcccaagcgcggcgcctgggcctcggggctgcaggagtcctcggtgggggtatggaggtcgccggggaaggaggacggttcagttgctaggcaacccggcctggacccgcctctcgctcgcgttgctgggagactacaaggccgggaggagggcggcgaaagggccctacgtgctgacgctaattgtatatgagcgcgagcggcgggctcttgggtcttttttagcgccatctgctcgcggcgccgcctcctgctcctcccgctgctgctgccgctgccgccctgagtcactgcctgcgcagctccggccgcctggctccccatactagtcgccgatatttggagttcttacaacatggcagacattgacaacaaagaacagtctgaacttgatcaagatttggatgatgttgaagaagtagaagaagaggaaactggtgaagaaacaaaactcaaagcacgtcagctaactgttcagatgatgcaaaatcctcagattcttgcagcccttcaagaaagacttgatggtctggtagaaacaccaacaggatacattgaaagcctgcctagggtagttaaaagacgagtgaatgctctcaaaaacctgcaagttaaatgtgcacagatagaagccaaattctatgaggaagttcacgatcttgaaaggaagtatgctgttctctatcagcctctatttgataagcgatttgaaattattaatgcaatttatgaacctacggaagaagaatgtgaatggaaaccagatgaagaagatgagatttcggaggaattgaaagaaaaggccaagattgaagatgagaaaaaagatgaagaaaaagaagaccccaaaggaattcctgaattttggttaactgtttttaagaatgttgacttgctcagtgatatggttcaggaacacgatgaacctattctgaagcacttgaaagatattaaagtgaagttctcagatgctggccagcctatgagttttgtcttagaatttcactttgaacccaatgaatattttacaaatgaagtgctgacaaagacatacaggatgaggtcagaaccagatgattctgatcccttttcttttgatggaccagaaattatgggttgtacagggtgccagatagattggaaaaaaggaaagaatgtcactttgaaaactattaagaagaagcagaaacacaagggacgtgggacagttcgtactgtgactaaaacagtttccaatgactctttctttaacttttttgcccctcctgaagttcctgagagtggagatctggatgatgatgctgaagctatccttgctgcagacttcgaaattggtcactttttacgtgagcgtataatcccaagatcagtgttatattttactggagaagctattgaagatgatgatgatgattatgatgaagaaggtgaagaagcggatgaggaaggggaagaagaaggagatgaggaaaatgatccagactatgacccaaagaaggatcaaaacccagcagagtgcaagcagcagtgaagcaggatgtatgtggccttgaggataacctgcactgtaatagcctaaacacaactcttatttacttacagccttatgtttttgtattttcttggtagactaggtaatttttttttaaaggacaggaaactgatattttaaagaccaatttgttctacctagcattttaactagtttttctgccagctatgttgaatgcacaaattctgtcacgcatgttcattcattgctacataatttggttcttctggaatatttttatgtagctcttggagtacagctatgaaaattaacaactgttaaaggaaataccttttttttttttttgtaattttttccttgaagaaccaaagtattttttcagctggttgttgaatagggttaagtccgcttggattagctgtgcctttcattactttgttacagaaatgcagtgacttatactaagacaatttattgtttaaaaaaaaaattggcaagacaactatatggttaagaatttccagtatgaccacacccaataactgttattagagtgttaatggattattgtgttttaggtgacatagttaactgtaaagtaacctgactcagtatagttactggtaccacagtgaggtgaataaaacgggattttcagaagttagcctgaatttaactgtatttttaaatttaacctccattaactaagcatcttttctttgtggtagggtctaccttctgcttccctggaaaggatgaatttacatcatttgacaagcctattttcaagttatttgttgtttgtttgcttgtttttgtttttgcagctaaaataaaaatttcaaatacaattttagttcttacaagataatgtcttaattttgtaccaattcaggtagaagtagaggcctaccttgaattaagggttatactcagtttttaacacattgttgaagaaaaggtaccagctttggaacgagatgctatactaataagcaagtgtaaaaaaaaaaaaaaaagaggaagaaaatcttaagtgattgatgctgttttcttttaaaaaaaaaaaaaaaaattcattttctttgggttagagctagagagaaggccccaagcttctatggtttcttctaattcttattgcttaaagtatgagtatgtcacttacccgtgcttctgtttactgtgtaattaaaatgggtagtactgtttacctaactacctcatggatgtgttaaggcatattgagttaaatctcatataatgtttctcaatcttgttaaaagctcaaaattttgggcctatttgtaatgccagtgtgacactaagcattttgttcacaccacgctttgataactaaactggaaaacaaaggtgttaagtacctctgttctggatctgggcagtcagcactctttttagatctttgtgtggctcctatttttatagaagtggagggatgcactatttcacaaggtccaagatttgttttcagatatttttgatgactgtattgtaaatactacagggatagcactatagtattgtagtcatgagacttaaagtggaaataagactatttttgacaaaagatgccattaaatttcagactgtagagccacatttacaatacctcaggctaattactgttaattttggggttgaacttttttttgacagtgagggtggattattggattgtcattagaggaaggtctagatttcctgctcttaataaaattacattgaattgatttttagaggtaatgaaaacttcctttctgagaagttagtgttaaggtcttggaatgtgaacacattgtttgtagtgctatccattcctctcctgagattttaacttactactggaaatccttaaccaattataatagctttttttctttattttcaaaatgatttcctttgctttgattagacactatgtgctttttttttttaaccatagttcatcgaaatgcagctttttctgaacttcaaagatagaatcccatttttaatgaactgaagtagcaaaatcatctttttcattctttaggaaatagctattgccaaagtgaaggtgtagataatacctagtcttgttacataaaggggatgtggtttgcagaagaattttctttataaaattgaagttttaagggacgtcagtgtttatgccatttttccagttccaaaatgattccattccattctagaaatttgaagtatgtaacctgaaatccttaataaaatttggatttaattttataaaatgtactggtgatattttgggtgtttttttttaaatgaatgtatatactttttttttgaagagtggagagtagtgatgtctagagggagctattttgtgctgaggccactatgttctgtaaatatataattttaagagcaacctcacaatccctgctaagtggagtttattatttgaagactaaaatggaattccatagttcctgataggttatattctgggttattattctgagttatctacaaacatttttgagatttgtctttacactctgattgtagtttccagcagcccatgcacactgccaagtaagtctcattttttcctgttagaaatggtgaaatatcatataatcacttataaagaaaactgatatgaaaaaattttagagttgtttgctttatggtcactcaagtagggtaagtgttccacaaattccacaagttgatagtttaacatggatgtctgaaagccacatatataatttcttaggattcttaaattagtaaatctagcttactgaagcagtattagcatcactattttagattgcaaaaataccttaattgtgtggaactggcttgtagagtggtacttaagaaaaatgggattctacctctatttctgttttagcacacttaatcaggaaaggatatattaactttcataaaaatatttttgttgtgtgaataggttaatgatatggtaaggcccctaaaataactgaattaattgtttattgtaattgtaggccattcccattattaaaaataaagacaaaacttgaagtaactgaaaatcttatcgtgctatgtagaaatattgaactaatattcaaatatttgaatgctttggtttcagggattggtttaaaattggagtccttttttatgggttagtcttacaaaaatttaagcctttatatttttgactttaaatcaaaacaaatgttattttaaatgtacagaatagattggtagtgcagaagagtgtaagttcttcataggagctttagaaaagagaaatatgtgctaattcagtttttttttaatctgcactgtacatatatacttggtaattatgagcttgattttgtttttggaaatatgtgttcataatttaggtaatttgctacttaaagcactaagtctctgatacctgaaaagtacatgtaaatggtgatggtgaaataatactgcagttaacttaatagatgtatactggtgatttttgtatgctggattaaaactccagatattaaaatataacctggataaaaagccaa

SEQ ID NO: 334244 - DNA, 1896 bp, Artificial Sequence
  derived and/or modified sequence
tcgcggcgccgcctcctgctcctcccgctgctgctgccgctgccgccctgagtcactgcctgcgcagctccggccgcctggctccccatactagtcgccgatatttggagttcttacaacatggcagacattgacaacaaagaacagtctgaacttgatcaagatttggatgatgttgaagaagtagaagaagaggaaactggtgaagaaacaaaactcaaagcacgtcagctaactgttcagatgatgcaaaatcctcagattcttgcagcccttcaagaaagacttgatggtctggtagaaacaccaacaggatacattgaaagcctgcctagggtagttaaaagacgagtgaatgctctcaaaaacctgcaagttaaatgtgcacagatagaagccaaattctatgaggaagttcacgatcttgaaaggaagtatgctgttctctatcagcctctatttgataagcgatttgaaattattaatgcaatttatgaacctacggaagaagaatgtgaatggaaaccagatgaagaagatgagatttcggaggaattgaaagaaaaggccaagattgaagatgagaaaaaagatgaagaaaaagaagaccccaaaggaattcctgaattttggttaactgtttttaagaatgttgacttgctcagtgatatggttcaggaacacgatgaacctattctgaagcacttgaaagatattaaagtgaagttctcagatgctggccagcctatgagttttgtcttagaatttcactttgaacccaatgaatattttacaaatgaagtgctgacaaagacatacaggatgaggtcagaaccagatgattctgatcccttttcttttgatggaccagaaattatgggttgtacagggtgccagatagattggaaaaaaggaaagaatgtcactttgaaaactattaagaagaagcagaaacacaagggacgtgggacagttcgtactgtgactaaaacagtttccaatgactctttctttaacttttttgcccctcctgaagttcctgagagtggagatctggatgatgatgctgaagctatccttgctgcagacttcgaaattggtcactttttacgtgagcgtataatcccaagatcagtgttatattttactggagaagctattgaagatgatgatgatgattatgatgaagaaggtgaagaagcggatgaggaaggggaagaagaaggagatgaggaaaatgatccagactatgacccaaagaaggatcaaaacccagcagagtgcaagcagcagtgaagcaggatgtatgtggccttgaggataacctgcactggtctaccttctgcttccctggaaaggatgaatttacatcatttgacaagcctattttcaagttatttgttgtttgtttgcttgtttttgtttttgcagctaaaataaaaatttcaaatacaattttagttcttacaagataatgtcttaattttgtaccaattcaggtagaagtagaggcctaccttgaattaagggttatactcagtttttaacacattgttgaagaaaaggtaccagctttggaacgagatgctatactaataagcaagtgtaaaaaaaaaaaaaaaagaggaagaaaatcttaagtgattgatgctgttttcttttaaaaaaaaaaaaaaaaattcattttctttgggttagagctagagagaaggccccaagcttctatggtttcttctaattcttattgcttaaagtatgagtatgtcacttacccgtgcttctgtttactgtgtaattaaaatgggtagtactgtttacctaactacctcatggatgtgttaaggcatattgagttaaatctcatataatgtttctcaatcttgttaaaagctcaaa

SEQ ID NO: 334245 - DNA, 1838 bp, Artificial Sequence
  derived and/or modified sequence
cttttttagcgccatctgctcgcggcgccgcctcctgctcctcccgctgctgctgccgctgccgccctgagtcactgcctgcgcagctccggccgcctggctccccatactagtcgccgatatttggagttcttacaacatggcagacattgacaacaaagaacagtctgaacttgatcaagatttggatgatgttgaagaagtagaagaagaggaaactggtgaagaaacaaaactcaaagcacgtcagctaactgttcagatgatgcaaaatcctcagattcttgcagcccttcaagaaagacttgatggtctggtagaaacaccaacaggatacattgaaagcctgcctagggtagttaaaagacgagtgaatgctctcaaaaacctgcaagttaaatgtgcacagatagaagccaaattctatgaggaagttcacgatcttgaaaggaagtatgctgttctctatcagcctctatttgataagcgatttgaaattattaatgcaatttatgaacctacggaagaagaatgtgaatggaaaccagatgaagaagatgagatttcggaggaattgaaagaaaaggccaagattgaagatgagaaaaaagatgaagaaaaagaagaccccaaaggaattcctgaattttggttaactgtttttaagaatgttgacttgctcagtgatatggttcaggaacacgatgaacctattctgaagcacttgaaagatattaaagtgaagttctcagatgctggccagcctatgagttttgtcttagaatttcactttgaacccaatgaatattttacaaatgaagtgctgacaaagacatacaggatgaggtcagaaccagatgattctgatcccttttcttttgatggaccagaaattatgggttgtacagggtgccagatagattggaaaaaaggaaagaatgtcactttgaaaactattaagaagaagcagaaacacaagggacgtgggacagttcgtactgtgactaaaacagtttccaatgactctttctttaacttttttgcccctcctgaagttcctgagagtggagatctggatgatgatgctgaagctatccttgctgcagacttcgaaattggtcactttttacgtgagcgtataatcccaagatcagtgttatattttactggagaagctattgaagatgatgatgatgattatgatgaagaaggtgaagaagcggatgaggtaatgtttaccaaatgagcaaataattctctgtggttaacacattgagaagcaaattgaatgacttatgtattcctttgctataatcattctgtgatttgggataaaaacattttggaaaacatgattttagaattctacagccaaacaatgtatgtataaggtttcaataaataaattgcaaaactcagcaacatttttttatttcaaataattttgttctgctgcagggttatcagctctttgaagaagtcaaaagctgcagtaaacttttccaacgttggctgcagtaactattttcaataaaagctgtctggatgtctcaagttgtgttgggaaatttttcatattagaagctttcaaattaaattgtattatcatcaaagtctgtaatcatgaaaatctgttgatccgtagagtaacttgtattaaattttccctacattatgagccagtttacctactatgtacatacttcatggatgcattttgaactttaatataggaaggggaagaagaaggagatgaggaaaatgatccagactatgacccaaaggtgagcaaaattagtgctgctttctattaaatttaagatagctaaagtaagagt

SEQ ID NO: 334246 - DNA, 1074 bp, Artificial Sequence
  derived and/or modified sequence
ggcggaggctgcgaattccgacgggagggaggggctgtggagggacgagtccccgaggcggggagggggcgggggaggctgcgacgctcccgggctctccgcccattgggggcggccgcgcggggaggggaaacccccggcggcttcgctccacacgtggtaatgggcttcatggccactggctgggcctggttggagacccttgccctcggtctgtgcttactttgaaagttgtagagacggtggaatgtgaaaaggaaggatatttggagttcttacaacatggcagacattgacaacaaagaacagtctgaacttgatcaagatttggatgatgttgaagaagtagaagaagaggaaactggtgaagaaacaaaactcaaagcacgtcagctaactgttcagatgatgcaaaatcctcagattcttgcagcccttcaagaaagacttgatggtctggtagaaacaccaacaggatacattgaaagcctgcctagggtagttaaaagacgagtgaatgctctcaaaaacctgcaagttaaatgtgcacagatagaagccaaattctatgaggaagttcacgatcttgaaaggaagtatgctgttctctatcagcctctatttgataagcgatttgaaattattaatgcaatttatgaacctacggaagaagaatgtgaatggaaaccagatgaagaagatgagatttcggaggaattgaaagaaaaggccaagattgaagatgagaaaaaagatgaagaaaaagaagaccccaaaggaattcctgaattttggttaactgtttttaagaatgttgacttgctcagtgatatggttcaggaacacgatgaacctattctgaagcacttgaaagatattaaagtgaagttctcagatgctggccagcctatgagttttgtcttagaatttcactttgaacccaatgaatattttacaaatgaagtgctgacaaagacatacaggatgaggtcagaaccagatgattctgatcccttttcttttgatggaccagaaattatgggttgtacagggtgccagatagattggaaaaaa

SEQ ID NO: 334247 - protein, 25 aa, Artificial Sequence
  derived and/or modified sequence
MVRTDGHTLSEKRNYQVTNSMFGAS

SEQ ID NO: 334248 - DNA, 78 bp, Artificial Sequence
  derived and/or modified sequence
atggtaagaaccgatggacatactctctcagagaagcgcaattaccaggtgacaaactcaatgtttggggcgtcgtag

SEQ ID NO: 334249 - DNA, 552 bp, Artificial Sequence
  derived and/or modified sequence
atggtcagaaccgacgggcataccttaagtgagaagagaaactatcaggtgactaatagcatgtttggagcctccaggaaaaagtttgtggagggcgtggattctgactaccacgacgaaaatatgtattactcacagtccagcatgttccctcaccgatcagaaaaggacatgctggcctccccatctaccagcggccagctgtcccagttcggggcctcactctatgggcagcagtccgccctgggacttcccatgcggggtatgtctaataacactcctcagcttaacaggtctctgagtcaggggacacaactgcccagccacgtgacccctactacaggggttccaactatgagcctgcacacaccgccttcacctagcagggggatccttccaatgaaccctcgcaatatgatgaaccatagccaggttggccagggtattggtatccccagccggaccaattctatgagttcatccggactaggtagccctaatcgatcctccccatctatcatttgtatgcctaagcagcagccaagtcgctag

SEQ ID NO: 334250 - DNA, 78 bp, Artificial Sequence
  derived and/or modified sequence
atggtgaggacagatggccacaccctgtctgagaagaggaactaccaggtgaccaacagcatgtttggagccagctag

SEQ ID NO: 334251 - DNA, 552 bp, Artificial Sequence
  derived and/or modified sequence
atggtgaggacagatggccacaccctgtctgagaagaggaactaccaggtgaccaacagcatgtttggagccagcaggaagaagtttgtggagggcgtggacagcgactaccatgatgagaacatgtactacagccagagctccatgttcccccacaggtctgagaaggacatgctggccagccccagcaccagcggccagctgagccagtttggagccagcctgtatggccagcagagcgccctgggcctgcccatgaggggcatgagcaacaacaccccccagctgaacagaagcctgagccagggcacccagctgcccagccacgtgacccccaccaccggggtgcccaccatgagcctgcacaccccacccagccccagccggggcatcctgcccatgaaccccaggaacatgatgaaccacagccaggtgggccagggcatcggcatccccagcaggaccaacagcatgagcagcagcggcctgggcagccccaacagaagcagccccagcatcatctgcatgcccaagcagcagcccagcaggtag

SEQ ID NO: 334252 - DNA, 78 bp, Artificial Sequence
  derived and/or modified sequence
atggtgcggaccgacggccacaccctgagcgagaagcggaactaccaggttacaaatagtatgttcggagctagctag

SEQ ID NO: 334253 - DNA, 552 bp, Artificial Sequence
  derived and/or modified sequence
atggtgcggaccgacggccacaccctgagcgagaagcggaactaccaagtcacaaattccatgtttggcgctagtcgcaagaagtttgttgaaggtgtggattccgattatcatgacgagaatatgtattactcccagagctctatgtttccccacagaagtgagaaagacatgctcgctagcccatccactagcgggcaactgtcacaatttggcgcctcactctacggtcagcagagtgctcttggtctccccatgagagggatgagcaacaatactcctcagctgaatcggtcactgtcacaaggcacccaactaccatctcacgtgactcccactactggggttcctactatgtccctccatacgccgcccagtccttccagagggattttacccatgaaccctagaaatatgatgaaccacagccaggtcggacaaggcattggtatcccaagtagaactaactccatgtcatcatccgggttaggttctcctaatcgttctagtcctagcataatttgtatgccaaagcagcagccgtcgaggtag

SEQ ID NO: 334254 - DNA, 78 bp, Artificial Sequence
  derived and/or modified sequence
atggtgcggaccgacgggcacactttgtcagagaaacggaactatcaggttacaaattccatgttcggcgcttcatag

SEQ ID NO: 334255 - DNA, 552 bp, Artificial Sequence
  derived and/or modified sequence
atggtgcgcacggatggccacaccctctcagaaaaacgcaattaccaggtgactaactcaatgttcggggcttctagaaaaaagtttgtcgaaggagtcgacagcgattaccacgacgagaatatgtactactcacagagctccatgttccctcacaggagtgagaaagatatgctagcgtcgccttcaacatctggacagctgtcgcaattcggcgcaagtctgtacggacagcagtccgccctgggactgccaatgagggggatgtcaaacaataccccgcagctgaataggtccttgagtcaaggtacgcagctccccagccacgtgacaccaactaccggcgtgccgacaatgtccctgcatacaccccctagcccaagccggggaattctcccaatgaaccctaggaacatgatgaaccactcccaagttgggcaaggcatcggaatcccctcacgtacaaattcgatgagctctagcggactcgggtccccaaaccgctccagtcccagcattatttgcatgcctaaacaacagccaagtaggtag

SEQ ID NO: 334256 - DNA, 582 bp, Artificial Sequence
  derived and/or modified sequence
aaacacaaacacgaacacgaacacgctcagcgtccccggggagggcggactgaagccacctcaccattcatcgcccctggaccccgcagtccccctcggactcagggccagagccttctgagcagcaagcctccctgtgagtcggtgggagacaagacggagcggcggtaagggcggtagggaagtgaagcgcctctctccaccttgttagaagcgcgctgaaagcggcctgcctacccaccccatcgctgccgttttgcagtcgtcgctcccaccttccgctgccgcctggagggaagccggagcgacgggggtcacggcggcggtcagagggtaaaggtcttgctcccagcagcctccgcggtggatacgtcgccatcttggatccgcgggacaagaaaattcatgcgagggagacgtggtgggcggtccttcctgtgacacgacccttgagtgacagttctatttgattgcctccggtactgtgaggaaaggacacgactctatggtgaggactgatggacatacattatctgagaaaagaaactaccaggtgacaaacagcatgtttggtgcttcaag

SEQ ID NO: 334257 - DNA, 1085 bp, Artificial Sequence
  derived and/or modified sequence
gtcgctgtactcgggccgctgcagcagcagcagctccagatcctaggcccggtcccatccgcgagtggtggggcttccccagactccactcccctaggctcccgccagcgcggaggagccgctgccgccgcgctgcttcctgggggagaagagaaggcggcagcggccgtggccgtggccgacgagctcgagcccgctttagacggctctgccgccttcccggcagctggtgctgtctgtggcttcttaccttctctcaatacacgtatatcatctgccagttatgtgtatttctgttagtgtgtttgcaagtgtcagatgggagacactggactggctaacgggtgtcaggatcctgcaggccctgggataccgaaggctgtgcatggtggagggagaaggaatgcaactgcgatgccgcctctgccaccgcaccaggaagagggagacgtggtgggcggtccttcctgtgacacgacccttgagtgacagttctatttgattgcctccggtactgtgaggaaaggacacgactctatggtgaggactgatggacatacattatctgagaaaagaaactaccaggtgacaaacagcatgtttggtgcttcaagaaagaagtttgtagagggggtcgacagtgactaccatgacgaaaacatgtactacagccagtcttctatgtttccacatcggtcagaaaaagatatgctggcatcaccatctacatcaggtcagctgtctcagtttggggcaagtttatacgggcaacaaagtgcactaggccttccaatgagggggatgagcaacaatacccctcagttaaatcgcagcttatcacaaggcactcagttaccgagccacgtcacgccaacaacaggggtaccaacaatgtcacttcacacgcctccatctccaagcaggggtattttgcctatgaatcctaggaatatgatgaaccactcccaggttggtcagggcattggaattcctagcaggacaaatagcatgagcagttcagggttaggtagccccaacagaagctcgccaagcataatatgtatgccaaagcagcagccttctcg

SEQ ID NO: 334258 - DNA, 78 bp, Artificial Sequence
  derived and/or modified sequence
atggtgagaaccgacggccacaccctgagcgagaagagaaactaccaggtgaccaacagcatgttcggcgccagctag

SEQ ID NO: 334259 - DNA, 552 bp, Artificial Sequence
  derived and/or modified sequence
atggtgagaaccgacggccacaccctgagcgagaagagaaactaccaggtgaccaacagcatgttcggcgccagcagaaagaagttcgtggagggcgtggacagcgactaccacgacgagaacatgtactacagccagagcagcatgttcccccacagaagcgagaaggacatgctggccagccccagcaccagcggccagctgagccagttcggcgccagcctgtacggccagcagagcgccctgggcctgcccatgagaggcatgagcaacaacaccccccagctgaacagaagcctgagccagggcacccagctgcccagccacgtgacccccaccaccggcgtgcccaccatgagcctgcacaccccccccagccccagcagaggcatcctgcccatgaaccccagaaacatgatgaaccacagccaggtgggccagggcatcggcatccccagcagaaccaacagcatgagcagcagcggcctgggcagccccaacagaagcagccccagcatcatctgcatgcccaagcagcagcccagcagatag

SEQ ID NO: 334260 - DNA, 1707 bp, Artificial Sequence
  derived and/or modified sequence
atggtgctgggccccgagcagaagatgagcgacgacagcgtgagcggcgaccacggcgagagcgccagcctgggcaacatcaaccccgcctacagcaaccccagcctgagccagagccccggcgacagcgaggagtacttcgccacctacttcaacgagaagatcagcatccccgaggaggagtacagctgcttcagcttcagaaagctgtgggccttcaccggccccggcttcctgatgagcatcgcctacctggaccccggcaacatcgagagcgacctgcagagcggcgccgtggccggcttcaagctgctgtggatcctgctgctggccaccctggtgggcctgctgctgcagagactggccgccagactgggcgtggtgaccggcctgcacctggccgaggtgtgccacagacagtaccccaaggtgcccagagtgatcctgtggctgatggtggagctggccatcatcggcagcgacatgcaggaggtgatcggcagcgccatcgccatcaacctgctgagcgtgggcagaatccccctgtggggcggcgtgctgatcaccatcgccgacaccttcgtgttcctgttcctggacaagtacggcctgagaaagctggaggccttcttcggcttcctgatcaccatcatggccctgaccttcggctacgagtacgtgaccgtgaagcccagccagagccaggtgctgaagggcatgttcgtgcccagctgcagcggctgcagaaccccccagatcgagcaggccgtgggcatcgtgggcgccgtgatcatgccccacaacatgtacctgcacagcgccctggtgaagagcagacaggtgaacagaaacaacaagcaggaggtgagagaggccaacaagtacttcttcatcgagagctgcatcgccctgttcgtgagcttcatcatcaacgtgttcgtggtgagcgtgttcgccgaggccttcttcggcaagaccaacgagcaggtggtggaggtgtgcaccaacaccagcagcccccacgccggcctgttccccaaggacaacagcaccctggccgtggacatctacaagggcggcgtggtgctgggctgctacttcggccccgccgccctgtacatctgggccgtgggcatcctggccgccggccagagcagcaccatgaccggcacctacagcggccagttcgtgatggagggcttcctgaacctgaagtggagcagattcgccagagtggtgctgaccagaagcatcgccatcatccccaccctgctggtggccgtgttccaggacgtggagcacctgaccggcatgaacgacttcctgaacgtgctgcagagcctgcagctgcccttcgccctgatccccatcctgaccttcaccagcctgagacccgtgatgagcgacttcgccaacggcctgggctggagaatcgccggcggcatcctggtgctgatcatctgcagcatcaacatgtacttcgtggtggtgtacgtgagagacctgggccacgtggccctgtacgtggtggccgccgtggtgagcgtggcctacctgggcttcgtgttctacctgggctggcagtgcctgatcgccctgggcatgagcttcctggactgcggccacacctgccacctgggcctgaccgcccagcccgagctgtacctgctgaacaccatggacgccgacagcctggtgagcagatag

SEQ ID NO: 334261 - DNA, 1707 bp, Artificial Sequence
  derived and/or modified sequence
atggtactgggccccgagcaaaagatgtccgatgactctgtatcaggggatcacggcgaatctgcttccctgggcaatatcaatcctgcttactcaaaccctagccttagccagtcaccgggcgattcggaggagtacttcgctacgtacttcaacgaaaaaatctctatcccggaggaagagtactcttgcttctcattccggaaactttgggccttcactggaccaggttttttgatgtccatagcatatctcgatcccgggaacattgagtcagatttgcaatccggggccgtggccggctttaaactgctgtggatactgctgcttgcgaccctagttgggctgttgcttcaacggttggcagcccgcctcggggttgtcacaggactccatctcgctgaggtttgtcatcggcagtacccaaaagtcccgagggtaattctgtggttgatggtggagttagccatcattggctctgatatgcaggaagtcattggatccgcaatcgctattaatctcctgtctgtgggccgtatacccctctggggtggggtcttaatcacaatagccgataccttcgtgttcctgttcctggataagtacggtctccgcaaacttgaggcatttttcggattcttgattacgattatggccttaacttttggatatgagtacgtcacagttaagccatcacagagtcaggtactaaaaggcatgtttgtgccaagctgttccggatgcagaacaccccagatcgaacaggcagtcggcatcgtgggcgccgtgatcatgccccataacatgtatctgcacagcgcacttgtaaaatcccgccaggtaaaccgcaacaacaaacaggaggtgagggaggctaacaaatacttttttattgagagctgcatcgcactttttgtgtcatttatcattaatgtattcgttgtgagtgtcttcgcagaagcattcttcggtaagactaacgagcaagtggtggaggtatgcacgaatacctcctctccgcacgctggcctcttcccaaaggacaactccactctcgccgtggatatttacaaggggggtgtggtgctgggatgttatttcggaccagctgccctgtacatttgggcggtggggatccttgcagccgggcaaagttcgactatgacaggtacgtattcaggccagtttgtgatggaggggttcctgaatctgaagtggagccggttcgcccgggttgtactgacacggtccatagctataatccccacattactcgtggctgtgttccaagacgtcgaacaccttaccggaatgaacgattttctcaacgtgctccaatcccttcagctgccctttgcacttatccccatacttacttttacgagtctgcgcccggtgatgtctgactttgcaaatggcttgggatggcgcatagctggtggtattttagtgctgataatttgttcaatcaacatgtacttcgtggtggtgtacgttcgagatttaggacatgtggctttatacgtcgtggcggcggtggtatccgtcgcctatctcggattcgtcttttatctgggatggcagtgcctaattgctctgggtatgtccttcctagattgtggccacacttgtcatctggggctcaccgctcagcctgagttatacctcctgaatacaatggacgcagacagtcttgtgagccgctag

SEQ ID NO: 334262 - DNA, 1707 bp, Artificial Sequence
  derived and/or modified sequence
atggtgttaggtcccgaacagaagatgtcagatgactccgtgagcggggaccatggagaaagtgcatcactcggcaatatcaaccccgcatatagcaacccaagtctgtcccagagtcctggagacagtgaggagtattttgccacttacttcaacgaaaagatctccataccagaagaggagtattcttgtttcagtttcagaaagctgtgggcctttacgggccccggattcctgatgtccatcgcatacctggaccctggaaacatcgagtccgacttacagtccggggctgtcgccgggtttaaactgctgtggatcctgctcttggccacactcgttggcttactgctgcagcggttggccgccaggctgggcgttgtgaccgggcttcatttggctgaggtctgccataggcaatatcctaaagtgcctcgagtgatcctttggctgatggtggagctggcaattatcggttcggatatgcaagaggtgattggcagcgccatcgctattaatttactgtccgttgggcggattcctctgtgggggggagtgttgataacaatcgccgatacattcgtgttcctctttcttgataagtacggcctgaggaagctggaagcctttttcgggtttttaattacgatcatggccctgaccttcggatacgaatacgtgaccgtgaaaccctcccagtctcaagtcctcaagggcatgttcgtgccttcctgctccggatgccgcactccccaaatcgagcaggccgtaggaattgtgggagcagtcataatgcctcataatatgtacttacactctgcactggttaagagtaggcaagtgaatagaaacaacaagcaggaggtccgggaagccaataagtactttttcatcgaatcttgtatagcactgttcgtgtcatttattattaacgtctttgtcgtgtcggtgtttgccgaagcattttttggcaagaccaatgaacaagtcgtggaggtgtgtaccaacaccagcagcccacatgccggcctgttcccaaaggacaattcgacactggcagtcgatatatataagggtggagtcgtgctggggtgctatttcggcccggcagccctgtatatttgggctgttgggatccttgccgctggccagtcaagtacgatgacaggaacttactccggtcagttcgtgatggaaggattcttaaatctgaagtggtcaaggtttgccagagtggtcctaacgcgaagcattgcgattataccaactctccttgtcgccgtgttccaggatgtggaacacctaaccggtatgaatgatttcctcaatgtcctccagtcactgcaactgccgttcgccctcatccccatcctcactttcacctcgcttaggccagttatgtctgatttcgcgaacggcctgggttggcgcatcgcgggcgggatactggtactgatcatctgttccattaacatgtacttcgtggtagtctacgtgcgggacttaggccatgtggcgttgtacgtggtcgctgccgtggtctccgtcgcatatttgggattcgttttctatctgggatggcaatgcttgatcgctttgggaatgtcgttcttggactgcggtcatacttgtcatctcggactgaccgcccaacccgaattgtatttgctcaataccatggacgcagatagtctagtctctcggtag

SEQ ID NO: 334263 - DNA, 1707 bp, Artificial Sequence
  derived and/or modified sequence
atggtactggggcctgaacaaaagatgagcgatgacagcgtgtccggcgatcacggcgagtccgcttccctggggaacatcaatccagcctactccaacccttctctgtcacagagcccaggggactcagaagaatacttcgccacgtatttcaatgaaaagatctcaattccagaggaagagtatagttgtttttcattcagaaagctgtgggctttcactgggcctgggttcctgatgagcatcgcataccttgacccggggaacattgagtccgacctacaatctggcgcggtcgctggcttcaagctgctgtggattttactactggccacactggtcggactcctcctgcagcggctggcggccagattgggggtagtcactgggctgcacctcgcggaagtttgccaccgtcagtatcccaaggtgcctagagtaattctgtggctaatggtggaactggccatcattggcagtgatatgcaggaggtgataggcagtgctattgcaatcaatttgctgtcagtggggagaatcccgctgtggggtggcgttcttatcaccatagccgacacatttgtgtttctatttctggataaatacggactgagaaagttagaggcattcttcggtttccttatcaccattatggcattgacattcgggtatgaatacgttactgtaaagcccagccaatcacaggttctaaaaggtatgtttgttccgagctgttccgggtgcagaaccccacagatcgagcaggcggtggggatcgtgggggctgtcataatgccccacaacatgtaccttcactcagctctggtcaagagccgacaggtaaatcgtaacaataagcaggaagttcgagaggccaataaatacttctttatcgagtcatgcatagcgttgttcgttagcttcatcattaatgttttcgtggtttcggtatttgccgaggccttcttcggtaaaactaacgaacaagtggttgaggtgtgcactaacacctcttccccccacgctgggctgttcccgaaagacaactcgacattagcagtagacatctataaagggggcgtcgttctagggtgttatttcggaccagcggctctgtacatttgggccgtgggcatactcgccgctggacagagttccacaatgactggaacctactccgggcaatttgtgatggaggggttcttgaacctgaagtggtctagattcgctagagtcgtgctgacccggtcaattgcaatcatcccaacactgctagtggcagtgtttcaggatgttgagcatttgacaggcatgaacgactttttgaacgtcctccagtctctgcagcttccatttgctctcatccccattctcacttttaccagcctccggccagttatgtctgattttgcgaacggtttagggtggcgcattgctggaggcatcctggtgcttattatctgtagtataaacatgtactttgtagtggtctatgtgcgcgatctcggacacgtggctctgtatgttgtggccgccgtcgttagtgtggcttacctgggatttgtcttttacttaggttggcagtgtctgattgctctggggatgtcctttttggactgtgggcacacatgccacctaggcttgactgcccagccagaactgtatctgctcaataccatggacgccgacagcttagtgagcaggtag

SEQ ID NO: 334264 - DNA, 1707 bp, Artificial Sequence
  derived and/or modified sequence
atggtgctgggccctgagcagaagatgtctgatgattctgtgtctggggaccacggggagagcgccagcctgggcaacatcaacccagcctacagcaaccccagcctgagccagagccctggggacagcgaggagtactttgccacctacttcaatgagaagatcagcatccctgaggaggagtacagctgcttctccttcaggaagctgtgggccttcaccggccctggcttcctgatgagcatcgcctacctggaccccggcaacatcgagagtgacctgcagagcggggctgtggccggcttcaagctgctgtggatcctgctgctggccaccctggtgggcctgctgctgcagaggctggccgcccggctgggcgtggtgacaggcctgcacctggccgaggtgtgccaccggcagtaccccaaggtgcccagggtcatcctgtggctgatggtggagctggccatcatcggcagtgacatgcaggaggtgattggcagcgccatcgccatcaacctgctgtctgtgggccgcatccccctgtggggcggcgtgctgatcaccatcgctgacacctttgtgttcctgttcctggacaagtatggcctgaggaagctggaggccttcttcggcttcctgatcaccatcatggccctgaccttcggctatgaatatgtgacagtgaagcccagccagagccaggtgctgaagggcatgtttgtgcccagctgcagcggctgcaggaccccccagatcgagcaggccgtgggcatcgtgggcgccgtcatcatgccccacaacatgtacctgcacagcgccctggtgaagagccggcaggtgaacagaaacaacaagcaggaggtgcgggaggccaacaagtacttcttcatcgagagctgcatcgccctgtttgtgtccttcatcatcaacgtgtttgtggtgtctgtgtttgctgaggccttcttcggcaagaccaatgagcaggtggtggaggtgtgcaccaacaccagcagcccccacgccggcctcttccccaaggacaacagcaccctggccgtggacatctacaagggcggcgtggtgctgggctgctactttggacctgctgccctgtacatctgggccgtgggcatcctggccgccggccagagcagcaccatgacaggcacctacagcggccagtttgtgatggagggcttcctgaacctgaagtggagcagatttgcccgggtggtgctgaccaggagcatcgccatcatccccaccctgctggtggccgtgttccaggatgtggagcacctgaccggcatgaatgacttcctgaatgtgctgcagagcctgcagctgccctttgccctgatccccatcctgaccttcaccagcctgcggcctgtgatgtctgactttgccaacggcctgggctggagaattgctgggggcatcctggtgctgatcatctgcagcatcaacatgtactttgtggtggtgtatgtgcgggacctgggccacgtggccctgtatgtggtggccgctgtggtgtctgtggcctacctgggctttgtgttctacctgggctggcagtgcctgattgccctgggcatgtccttcctggactgtggccacacctgccacctgggcctgacagcccagcctgagctgtacctgctgaacaccatggatgctgacagcctggtgtccaggtag

SEQ ID NO: 334265 - DNA, 1707 bp, Artificial Sequence
  derived and/or modified sequence
atggtgctgggccccgagcagaagatgagcgacgacagcgtgagcggtgatcacggtgaatcagccagcttgggaaacattaatccagcatactcaaacccttctctgagccagagccccggagattctgaggagtattttgcgacatacttcaatgagaagatatccattcccgaagaggagtattcctgcttttccttcaggaagttatgggccttcactggtccaggctttctgatgtccatagcttatctcgacccaggcaatatcgaaagtgatctccagtcaggcgcggtagcaggctttaaactgctgtggattttgctcctcgctacactcgtgggcctgctgctccagaggctggccgcccgcctcggcgtcgtaactggcctacacctagctgaggtttgtcatagacagtaccccaaggtgccccgcgtgatactgtggctcatggtggagcttgcgattatcggatccgatatgcaggaggtcataggaagtgcaattgctatcaacctcctttcagtcggccggattcccctgtggggtggggtcttgatcacaatagccgacaccttcgtgtttttgtttcttgacaaatatggcctaaggaaactggaggctttctttggtttcctgatcacaatcatggctctgacattcggctacgaatacgtgaccgtcaagccatctcagtcccaggttctaaagggaatgtttgtgccctcgtgtagtgggtgccggacaccccagatcgagcaagcagtagggattgttggggcagttataatgccacataatatgtaccttcactctgctctggtaaagagccgtcaagtcaaccgtaataacaagcaggaggtccgcgaggcaaacaaatactttttcatcgagtcctgcattgctctcttcgtttcttttatcattaatgtgtttgttgtgtcagtcttcgccgaggccttctttgggaaaaccaatgaacaggtggtcgaggtgtgcacaaacacctcttcccctcacgcaggtctgtttcccaaggacaatagtaccttagcggtcgacatttataaaggcggagttgtgctgggatgctacttcggacctgccgccctgtacatttgggccgtcggcatcctggccgctgggcagtctagcactatgacaggaacttattcggggcagttcgtgatggagggtttcctgaacctcaagtggtccaggtttgccagggtggtcctcaccaggtccattgccattataccaacactgcttgtagctgtgttccaagacgtagagcacctgaccggcatgaatgactttctgaatgtcttgcagtcactccagttacccttcgccctcatacctattctaaccttcaccagcctccgccccgttatgtccgactttgcaaatgggctcggatggcgaatagccggaggcatcctagtattgatcatctgttcaatcaacatgtatttcgttgttgtgtatgtaagagatctcgggcatgtagccttgtatgtggtggccgctgttgtgagcgtggcatacttgggctttgtgttttatctaggatggcaatgccttatagctctcggtatgtctttcttggattgcggacatacttgccacctgggtctcaccgcacaacctgaactctacttactaaacaccatggacgcagactcccttgttagccgttag

SEQ ID NO: 334266 - DNA, 1707 bp, Artificial Sequence
  derived and/or modified sequence
atggtgctgggccccgagcagaagatgagcgacgacagcgtgagcggagatcacggtgagtcagcatctcttggcaacataaatcctgcttattccaatccaagcctctctcagtcaccaggcgacagcgaggagtacttcgctacatatttcaatgagaaaattagcatccctgaagaagaatactcttgcttttccttcagaaaattatgggccttcactggccctgggtttttaatgtccatcgcctatttggatcctgggaacattgagtctgacttgcagtccggtgccgtggctgggttcaaactgctgtggattctgctcttagcaacactcgtcggcttgctgctgcagaggctggcagcccggctaggcgtagttactgggctccacctagctgaggtgtgtcaccgccagtatccaaaagtgccacgagtgatactgtggctgatggtggagttagccataattgggagtgatatgcaggaggtaataggcagtgccattgcaataaacctgctgtccgttgggagaattcctctgtggggaggggtcctgataactatcgcggacacctttgtatttctctttctcgataaatatggcctccgcaagttagaggcattcttcggattccttatcaccatcatggcattgaccttcggctatgaatacgtgaccgtgaaaccaagccagtctcaagttctgaaaggcatgtttgtcccctcctgctcaggctgtcgcactcctcaaatcgagcaagctgtcggcattgtcggcgctgtcatcatgcctcacaacatgtacctgcattccgcgctggtgaagtcccggcaggtgaatcggaataacaaacaagaggtgagggaagcaaacaaatactttttcattgaaagctgtattgctctgttcgtctcctttataatcaacgtctttgtagtgtcagtgttcgcagaggcattcttcgggaaaacgaacgaacaggtggtcgaggtgtgcacaaacacttcctctcctcacgccggtctgtttcccaaggataactcgacgcttgccgttgacatttacaagggcggagtggtgttaggatgttactttgggccagctgccctgtatatatgggcggttggcatccttgctgccggtcagagttccacaatgacgggcacttactcgggtcagttcgttatggaaggatttctcaatctgaaatggtcccggttcgcccgtgtggtactcactcgatctatagctattattcctaccctgctcgtggctgtgttccaggacgtggagcatctgactgggatgaatgacttcctcaatgtcctacagtccctccagttaccttttgcactgataccgatcctcacattcaccagcttgagacctgtgatgagtgattttgctaacggcctgggatggagaatcgccggcggcatattggtgctgatcatctgttctatcaacatgtacttcgtcgttgtgtacgtgagagatttgggccacgttgcgctgtatgtggtggccgcagtagtgtctgtggcgtacctgggcttcgtgttttatcttggctggcagtgtctcatcgcccttggaatgtcatttctggactgtgggcatacttgtcaccttggtctcactgctcaacccgagctctatctgctgaacacaatggacgccgattccttggtttcccggtag

SEQ ID NO: 334267 - DNA, 1707 bp, Artificial Sequence
  derived and/or modified sequence
atggtgctgggccccgagcagaagatgagcgacgacagcgtgagcggggatcatggcgaaagcgccagcctgggaaatattaacccagcatacagcaaccctagcctctctcagtcccctggcgacagtgaggagtatttcgccacctatttcaacgaaaaaatcagtatacccgaggaagagtatagttgcttctctttcaggaagctctgggcattcactgggcccggttttcttatgtcgatcgcatatcttgaccctggtaatatcgagtcagatcttcagtcgggagccgtcgccggctttaaactgctgtggatactgctgctcgccacgttggtcgggctcctcctccagagattggccgctcgcctaggagtggtaaccggccttcacctagcagaagtttgccacagacaataccctaaggtacccagggttattttgtggctaatggtcgagctagccatcatcggtagcgacatgcaggaagtgatcgggtctgccattgctatcaacctcttgtccgtaggccgtatccctctgtggggcggggtgttgatcacaatcgctgatacgttcgtttttctatttctggacaagtacgggctacgaaagctggaggctttctttggattcctgattaccattatggcgctcacatttggctacgaatatgtgactgtgaaacccagccagagtcaggtgttgaaaggaatgtttgtcccaagctgtagcggttgcagaactccacagatcgagcaggcagtcggcatcgtaggggctgtcattatgcctcataatatgtatttgcactctgcccttgtcaaatctcggcaggtgaatcgaaacaataaacaagaggtgcgagaagcaaacaagtacttctttatcgagtcatgcattgctctgtttgtcagtttcataatcaatgtttttgtggtaagtgtcttcgctgaggccttctttggaaaaaccaatgagcaggtagtagaggtttgtaccaacacctctagtccacatgccggactgtttccaaaggataatagtacactcgcggtggacatatacaagggtggggtggtgcttggatgctactttggtcccgcagcgctctatatttgggccgtgggcattttagccgccgggcagtccagcaccatgactggtacctactccggtcagttcgtgatggaaggctttctcaatctgaaatggagccgcttcgcccgcgttgtcttgactcgttcgatcgcaattatccccactctcttggtcgctgtattccaggatgtggagcacctcaccggaatgaatgacttcctcaatgtgctacagagtctacaacttccctttgctctcattcctatactgacattcactagcttgcggccagtcatgagcgattttgccaatggcttaggctggcgaatcgcaggcgggattctcgtgctaatcatctgctccatcaacatgtactttgtggttgtgtatgtgagggatctgggccacgtcgccctctatgtggttgccgccgtcgtgagcgttgcttatcttgggttcgtcttctacctgggctggcaatgtctcatcgccttgggcatgagctttttggattgcggccacacatgtcatctaggcctcactgcgcaacccgagctgtatctcctgaataccatggatgctgattcactggtatcccggtag

SEQ ID NO: 334268 - DNA, 1707 bp, Artificial Sequence
  derived and/or modified sequence
atggtattgggtcctgagcagaaaatgtccgacgacagcgtcagtggtgaccatggtgaatcagcttcattagggaatataaacccagcttactcgaaccctagtctctcccagtcccccggtgacagtgaagaatatttcgccacttacttcaacgagaaaattagcataccggaagaggagtacagctgcttctctttcaggaagctatgggcctttacaggtccaggattcctcatgagtatagcctacctggaccctggcaacatcgagtctgacttacaatctggagctgtggccggatttaaattgctctggatactgcttcttgctaccttggtgggcttgctgctgcaaagactggccgcacgactgggtgtagtaacaggactgcacctggcagaagtgtgccatcgtcaatacccaaaggtgcccagagtcatactctggctaatggtcgagttagctatcattggatcggatatgcaggaggtaatcggatctgcaatcgcaatcaacctgctgtcggtgggtcggattcccctatggggcggagtactgatcactatcgctgatacatttgtcttcctgttcctggacaaatatggccttcgcaaactcgaagcatttttcgggttcctgataacaatcatggctctcacgtttgggtatgagtatgtgactgttaaaccctcccaatcccaggtgctgaaaggcatgtttgtcccaagctgttcagggtgtcgcacgccccaaatcgaacaggctgtgggcatagtaggcgctgtgatcatgcctcataatatgtatctgcattcggccctggtgaagtcacggcaagtcaatcgcaacaacaagcaggaggtccgcgaggcaaacaaatacttcttcatcgagagctgtattgccttatttgtctcttttattataaacgtgtttgtagtcagtgtcttcgccgaagctttcttcggaaagaccaacgaacaggtcgtagaggtgtgcaccaacacttcttcaccacatgcagggcttttccctaaagataactcaactctcgctgtggacatctacaaaggaggcgtggtgcttggctgttacttcgggccagcagccctgtacatctgggccgtgggtatactcgccgcagggcagtcttctaccatgactggcacatactcaggccagttcgtcatggaaggcttcttgaacctgaaatggagtcggtttgcgcgagtggttttgactaggagcatcgcgattatcccgactctcctcgtggcagtcttccaggatgttgagcacctcaccgggatgaacgactttttgaacgtactgcagagtctgcagttacctttcgcactcattccaattctgaccttcacctcactcagacctgttatgagcgacttcgccaatggcctggggtggcgcatagctggcggaatcctcgttctgatcatatgctccattaacatgtactttgttgtagtgtatgtgagggatctgggccatgtggcactctatgtcgtggctgctgttgtatcagtcgcatatctcggcttcgtgttttatttggggtggcaatgcctcattgccttgggaatgagcttcctcgactgcggccatacgtgtcacctgggcctgacagcccagcccgagctatacctgctaaacacaatggacgccgactcattggtctctaggtag

SEQ ID NO: 334269 - DNA, 1707 bp, Artificial Sequence
  derived and/or modified sequence
atggtgctcggtcccgagcagaagatgtctgatgattccgtgtccggggatcacggagagtctgcttctttgggaaatattaatcctgcctattccaatccgtcccttagtcagagtccgggtgattctgaagagtacttcgccacttattttaacgagaagatttcaattccggaagaagagtactcgtgtttcagctttcgcaaactctgggcctttaccggcccaggatttctgatgtcgatagcctatctcgaccccggaaacatcgaatccgacttgcagtccggcgcagtggctggttttaagctgctgtggatccttctgctagcgacactggtggggctgctgttgcaaagattagcggcaaggttgggcgtggtaactggcttacatctggctgaggtctgccatcgacagtaccctaaagtgcccagagtcatcctgtggctgatggtcgaactggctataattggcagcgacatgcaagaagttattggtagcgccattgctataaatctgctctccgtggggagaatcccgctctggggcggtgttcttatcacaattgctgataccttcgtgttcctgtttctagataaatacgggctgcgaaaattagaggctttcttcggcttcttgatcactatcatggccctcacattcggctacgagtatgtcacggtgaagccttcgcaaagtcaggtcttgaagggtatgtttgtcccttcgtgttctggttgtagaaccccacagatcgaacaggctgtcggaatcgtgggtgccgtgatcatgcctcacaatatgtatctgcatagcgctcttgtcaaatcccgccaggtcaatcggaacaacaagcaggaagttagggaggctaataaatacttctttatcgaatcttgcattgcactcttcgttagcttcataatcaacgtcttcgtcgtaagcgtgtttgctgaggcttttttcggtaaaaccaatgagcaagtcgtcgaggtgtgtactaacacttcgtcgccacacgctggactctttcccaaggacaacagcactcttgccgtggacatatataagggcggagtagttctggggtgttattttggccctgccgctttgtatatctgggccgtggggatcctggcagcaggccaaagtagcactatgacaggtacatattctggtcagtttgttatggagggctttcttaatctcaagtggtcaaggttcgctcgcgtggtcctgaccagatcaattgcaatcatccctaccctgttggtggccgttttccaggatgtggaacacctgacggggatgaacgacttccttaacgtgctgcagagccttcagctaccgtttgcccttattccaatcttaaccttcacatctctcagacccgtgatgtccgacttcgccaacggcctgggatggaggatcgccggaggaatcttggtgttgatcatttgcagtataaacatgtatttcgtggtcgtttatgtgagggacctgggacatgtcgccctttatgtggtggccgcagtggtctcggtggcttacctagggtttgtgttctacctgggctggcagtgcctaatcgcgctcggcatgagcttcttggattgtggtcacacctgccatctgggcctcactgcgcagccagaactgtacctgctgaacaccatggatgcggattctctggtatcgcggtag

SEQ ID NO: 334270 - DNA, 1707 bp, Artificial Sequence
  derived and/or modified sequence
atggtactggggcctgagcaaaaaatgtctgacgattcggtgtccggtgatcacggagaaagtgcctcacttgggaatattaacccggcttactctaacccaagtctctcacagtcccccggtgatagcgaggaatatttcgctacctacttcaatgaaaagattagcattccggaggaagaatacagttgcttttcattcaggaaactgtgggcattcacggggcctggattcctaatgtctattgcttacctcgaccctgggaacattgaaagtgatctccaaagcggcgctgtcgctggtttcaaattactgtggatcctgctcctcgcaacactggtcggcttgctgctccagcgcttggcagcccgactgggcgtcgttactgggctccacttggctgaagtctgtcaccgccagtacccaaaggtgccccgtgtcattctttggcttatggtggagttggctattataggcagtgacatgcaggaggttatcggatctgccattgctattaacctgctctccgtcggcaggatcccattatggggcggagtcctgattacgattgcggatacatttgtctttctgtttctagataagtacgggctcagaaagttagaagctttttttgggttcctgataacgattatggcccttacttttggctacgaatacgttacagtaaagccctcgcagtcccaggtgctgaagggcatgttcgtcccctcatgctccgggtgccgaacgccacagattgagcaggctgtcggtatcgtcggcgcagtcatcatgcctcataatatgtacttacatagtgccctcgtgaagtcccgtcaggttaaccgtaataacaagcaggaggtccgggaggccaataaatacttctttattgagagctgtatagccctgttcgtcagttttatcatcaatgtctttgttgtgtccgtattcgccgaagccttctttggaaaaactaatgaacaagttgtcgaggtttgcaccaataccagcagccctcacgcgggactgttccctaaggacaattctactcttgccgtcgacatttacaagggcggagtggttttagggtgctatttcggccctgctgcgctttacatttgggctgtcggcatactggcagccggacaatcttcaaccatgactggaacttacagcggccagtttgtgatggagggattcttgaacctcaagtggtctagatttgcgcgtgtggtgctgactaggtccatcgcgattatacccacccttctagtagcagtcttccaggatgtcgaacacctcacaggaatgaatgactttctgaatgtacttcaatcactgcagctgccttttgccctgatccccatcctcaccttcacctccctgcgcccagttatgtcagactttgcaaacggactggggtggaggattgcgggagggatcttggtcctgattatttgtagcataaacatgtattttgttgttgtgtacgtgcgtgatctaggtcacgtggctctgtacgttgtggctgcagttgttagtgtggcctacctgggcttcgtattctatcttggttggcaatgcctcatcgcgttgggaatgtctttcctggactgcggccatacatgtcatctgggtctgacagctcagcctgagttatacctcctgaatacaatggacgcagacagtctggtctctagatag

SEQ ID NO: 334271 - protein, 1220 aa, Artificial Sequence
  derived and/or modified sequence
MGDMANNSVAYSGVKNSLKEANHDGDFGITLAELRALMELRSTDALRKIQESYGDVYGICTKLKTSPNEGLSGNPADLERREAVFGKNFIPPKKPKTFLQLVWEALQDVTLIILEIAAIVSLGLSFYQPPEGDNALCGEVSVGEEEGEGETGWIEGAAILLSVVCVVLVTAFNDWSKEKQFRGLQSRIEQEQKFTVIRGGQVIQIPVADITVGDIAQVKYGDLLPADGILIQGNDLKIDESSLTGESDHVKKSLDKDPLLLSGTHVMEGSGRMVVTAVGVNSQTGIIFTLLGAGGEEEEKKDEKKKEKKNKKQDGAIENRNKAKAQDGAAMEMQPLKSEEGGDGDEKDKKKANLPKKEKSVLQGKLTKLAVQIGKAGLLMSAITVIILVLYFVIDTFWVQKRPWLAECTPIYIQYFVKFFIIGVTVLVVAVPEGLPLAVTISLAYSVKKMMKDNNLVRHLDACETMGNATAICSDKTGTLTMNRMTVVQAYINEKHYKKVPEPEAIPPNILSYLVTGISVNCAYTSKILPPEKEGGLPRHVGNKTECALLGLLLDLKRDYQDVRNEIPEEALYKVYTFNSVRKSMSTVLKNSDGSYRIFSKGASEIILKKCFKILSANGEAKVFRPRDRDDIVKTVIEPMASEGLRTICLAFRDFPAGEPEPEWDNENDIVTGLTCIAVVGIEDPVRPEVPDAIKKCQRAGITVRMVTGDNINTARAIATKCGILHPGEDFLCLEGKDFNRRIRNEKGEIEQERIDKIWPKLRVLARSSPTDKHTLVKGIIDSTVSDQRQVVAVTGDGTNDGPALKKADVGFAMGIAGTDVAKEASDIILTDDNFTSIVKAVMWGRNVYDSISKFLQFQLTVNVVAVIVAFTGACITQDSPLKAVQMLWVNLIMDTLASLALATEPPTESLLLRKPYGRNKPLISRTMMKNILGHAFYQLVVVFTLLFAGEKFFDIDSGRNAPLHAPPSEHYTIVFNTFVLMQLFNEINARKIHGERNVFEGIFNNAIFCTIVLGTFVVQIIIVQFGGKPFSCSELSIEQWLWSIFLGMGTLLWGQLISTIPTSRLKFLKEAGHGTQKEEIPEEELAEDVEEIDHAERELRRGQILWFRGLNRIQTQIRVVNAFRSSLYEGLEKPESRSSIHNFMTHPEFRIEDSEPHIPLIDDTDAEDDAPTKRNSSPPPSPNKNNNAVDSGIHLTIEMNKSATSSSPGSPLHSLETSL

SEQ ID NO: 334272 - protein, 963 aa, Artificial Sequence [sequence omitted]

SEQ ID NO: 334273 - DNA, 3663 bp, Artificial Sequence
  derived and/or modified sequence
atgggggacatggccaacaattccgtggcttattccggcgttaagaacagcctgaaggaagctaaccacgacggcgattttgggatcacccttgcagagctacgggccctgatggagctgaggagcacagatgccctgcgcaagatacaggagagctatggggacgtatacggaatctgcaccaagctcaagacctcgccaaatgaaggcctctctggaaacccagccgaccttgagagacgcgaagccgtgtttggcaagaacttcattccccctaaaaagccgaagacctttctacaactcgtctgggaagccctgcaagatgtcaccctgattatcctcgaaattgccgctatcgtgtccctgggtcttagcttttaccagccgcccgagggggataatgctttatgtggggaagtgagcgtgggcgaagaagagggcgagggggagacaggatggattgagggggctgcaatcctgctctccgtcgtctgcgtggtcctggtgacagccttcaatgattggtctaaggagaaacagtttcgtggactgcagtctcggattgagcaagaacagaagttcacggtcatcaggggcggccaagtcattcagattcccgtcgcagacattacggtcggggacatcgcacaggttaaatacggggacctgctaccagccgatggaatcctgattcagggcaacgacctgaagatcgacgagtcgtccctgacaggcgaatcggatcacgtgaagaaatctctcgacaaggacccactgttgctgtccggaacccacgtcatggagggatccgggcgcatggtagtgactgctgtgggtgttaacagccagacaggcattattttcaccctactcggagcggggggtgaagaagaggagaaaaaggatgagaagaaaaaggagaagaaaaacaagaagcaggatggcgccatcgaaaaccggaataaagctaaagcccaagacggggcagccatggaaatgcagccgctgaaaagtgaggagggcggggatggagatgaaaaagacaagaaaaaggccaatcttcccaagaaagagaaatccgtcctccagggtaagttaacaaagctggctgtgcagattgggaaggctggcttactcatgtccgccatcaccgtgatcattctggtgctttacttcgtgatcgacacgttttgggtgcagaagaggccttggttggccgaatgcacgccgatatacatacagtattttgttaagttcttcataataggggttacggttttggtggtggccgtaccagagggcttgccccttgcagtgacaattagcctggcttattctgttaagaagatgatgaaggacaataacttagtaagacatctagatgcctgcgagaccatgggtaatgctactgccatctgcagcgacaaaacaggcaccctgactatgaacaggatgaccgtcgtccaagcatatattaacgagaagcattacaagaaagtccccgaacccgaagccatacctccaaatattctgtcttatctcgtgactggaatctccgtgaactgtgcttataccagcaaaattctcccgcctgaaaaagagggagggctccctcgacatgtgggcaacaagaccgaatgcgccctgctcgggctgctgctggatctgaagagagattatcaagacgtgcgcaatgagataccagaagaggccctgtacaaggtctatactttcaattccgtgaggaagagtatgtcaactgtcttgaaaaattcagatggctcctatcgcattttcagcaagggtgcgtctgagatcattctgaagaaatgtttcaaaatactgagcgccaacggggaggccaaggtcttccgcccacgggatagggatgatatagtgaaaacggtcatagaaccaatggcatcagagggccttaggacaatctgcctagccttccgcgacttccctgctggggagcccgaacctgagtgggacaacgagaacgatatcgtgaccggattaacctgtattgctgtggtgggaatcgaagacccagtgcggccagaggtgccagacgccatcaaaaagtgccaaagggcggggataaccgttcgcatggttacaggcgataacataaatactgcacgagccattgctactaaatgcggcatcctgcacccaggtgaggatttcctctgtctcgaaggaaaggatttcaaccgcagaatcagaaatgagaaaggtgagattgaacaggagaggattgacaagatatggccaaaattaagagtgcttgcccgaagttctcctacggacaaacatacattagtgaaaggtattatcgactcgaccgtcagtgaccagcgtcaggttgttgccgttacgggcgatggcacgaatgatggccccgcactgaaaaaagccgacgtcgggtttgctatgggcatagccgggaccgacgtggcaaaggaagcttcagacataattttgacagacgataactttaccagcatcgtcaaagcggtgatgtgggggcggaacgtgtacgattcgatctccaaatttctgcagtttcaactgactgtgaacgtcgtagcggtcatagtagcatttaccggagcctgcattacccaggattcgccactcaaggcagttcagatgttatgggttaatttgatcatggacactttagcgtccctggcgctggcgacggaaccaccaaccgagtctttgctcctgcgcaagccctatggtcggaacaagccactcattagccggaccatgatgaagaacatcctgggacacgcattttaccaactggtcgtcgtgttcacgctcttgttcgcaggagaaaaatttttcgatatcgattcgggccggaacgcacctctacacgccccaccatccgaacactatactatagtatttaacacatttgtgctgatgcagctgttcaatgagattaatgcccgtaaaatacacggcgaacggaacgtctttgaggggatcttcaataatgcaatcttctgtactatcgtcttgggcacgtttgtggttcagatcatcattgtgcagttcggtgggaagccattctcctgttccgaactgagtatagaacagtggctttggagcatctttctcggcatgggcaccctgctctgggggcagctgatttcaactatccctacatcccggctgaagttcctgaaggaagccggacacggcacacaaaaggaggaaatccccgaagaagagcttgccgaggatgttgaggagatcgatcatgccgaacgcgagctgaggcgaggtcagatactttggttccggggcctaaaccggatacaaacccagatccgcgtggttaacgcattccgaagctcactgtatgagggactcgagaagcctgagtcgaggtccagcatccataacttcatgacgcaccctgaatttaggatcgaagatagcgaaccccacattcccctaatcgatgatactgacgcagaggatgatgctcctaccaagagaaattcttccccccctccctcccccaacaaaaacaataacgccgtagactcgggaatacacttgacaatcgagatgaataaatccgccacctcgtctagcccaggatccccattgcactctttggagacgtcattatag

SEQ ID NO: 334274 - DNA, 2892 bp, Artificial Sequence
  derived and/or modified sequence
atgtttctcgtcatcggaacacacgtgatggagggtagtggtcgtatggttgtgaccgccgtgggggtaaacagtcaaactgggattatttttaccctgctgggtgcgggaggcgaggaggaggaaaaaaaagacgagaagaagaaggagaagaagaataaaaagcaggatggagctatcgagaaccgcaacaaggcaaaggcacaggacggggctgctatggagatgcaaccattaaagagtgaggagggtggagatggagacgagaaggacaagaagaaggcgaatctccccaagaaggagaagagtgtgctgcagggtaaattgactaaacttgcagtgcagatcggaaaagctggtctgctgatgtctgcaatcactgttataattctcgtactttacttcgttattgacacattctgggtgcagaaaagaccgtggctcgcagaatgtacccccatatatatccagtacttcgtgaaattcttcattattggggtgacggtgctggtggtggctgtacctgagggccttccactagccgtgaccatctctctggcttattcggtgaagaagatgatgaaagacaacaacctggtgaggcacctggatgcatgcgaaaccatgggcaacgccactgctatctgcagcgacaaaacaggaacacttacaatgaatagaatgactgtggtgcaggcttacattaatgagaagcattacaagaaagtcccagagccagaagcgatcccccccaacatcctcagctacctggtgacggggatctccgttaactgtgcttacacgagtaaaatcctgccccctgaaaaggagggtggcctgcctagacacgtcggaaacaagaccgagtgtgcactgctgggactgctgttggacctgaagcgtgactaccaggatgtgaggaacgagatccctgaggaggcactgtacaaggtttatacattcaactcagtgcggaaatctatgtctacggtgcttaaaaactccgacgggtcctatcgtatatttagcaagggtgcgtccgagatcattctcaaaaagtgtttcaagattttaagcgctaatggggaggccaaggtcttccgccctagagaccgggatgatatcgtgaaaacagtgattgaacctatggcatctgaaggactcagaaccatttgccttgcctttagagatttccccgccggagagccagagcccgaatgggacaatgagaatgacattgtgaccggccttacctgcatcgctgtcgtgggcatcgaggatccagtgaggccggaagtccccgacgccatcaaaaagtgccagagggccggcatcactgtccggatggtgacaggtgacaacattaatactgctagggccattgctacaaagtgtgggattttgcaccccggggaggatttcctatgtctggagggcaaagatttcaaccgacgcatccgcaatgaaaagggtgagatcgagcaggagcggattgataagatctggcccaagctgcgggtgctggcgcgctcctccccgacagacaagcacaccctcgtcaaaggaatcatcgacagcaccgtctcagaccagcgacaggttgttgccgtgacaggagatgggaccaatgacggacccgcgctcaagaaggccgacgtgggcttcgccatgggtattgctggcactgatgtggccaaagaggcatccgacatcatccttaccgatgataattttaccagtattgttaaggccgtgatgtggggaaggaacgtttacgatagcatctcaaagtttctgcagtttcagcttaccgtgaatgttgtcgcagtgatcgttgcgttcacaggagcgtgcattactcaagactctcctttgaaagctgtccagatgctttgggtcaacctgattatggacactctcgccagccttgctctcgccaccgagcccccaacggaaagcctcctgctacgtaaaccgtatggtagaaataagcctctgatcagccgcaccatgatgaaaaacatccttggacacgcgttttatcagcttgtggtagtttttacactactcttcgcaggcgaaaaattttttgacatcgactctggcaggaacgcccctcttcacgcacccccgagcgaacattacaccattgtgttcaacacgttcgtcttgatgcagcttttcaacgaaattaatgctaggaagatccacggagaaaggaatgttttcgaggggatcttcaacaacgcaatattttgtactatcgtgctgggcactttcgttgtgcagatcataatcgtacagtttggcggtaagcccttcagctgttccgagctttcaatcgaacagtggctgtggtccatattcctgggcatgggaactttgctgtggggccagctgatctcgaccattcccacttctcgcttaaaattcctgaaagaggctggccatggcacacagaaagaggaaattccagaggaagaacttgctgaggacgtggaagaaatcgaccatgccgaacgtgagctccgccggggacaaatactttggttccgcggattaaatagaattcagacccagatccgcgtcgtgaacgcgtttagaagctcactttatgaagggctggaaaagcccgaatcaagatcatcaatccacaactttatgactcatccagaatttaggattgaggactcagagcctcacatccctttaatcgatgacactgacgccgaggacgatgccccgaccaaaagaaacagttctccaccacccagcccaaataaaaataataatgccgtcgattctgggatccacctaacaatagaaatgaacaagagtgccaccagctccagcccgggcagccccctccacagtctggagacctcactctag

SEQ ID NO: 334275 - DNA, 3663 bp, Artificial Sequence
  derived and/or modified sequence
atgggtgatatggccaacaattctgtggcatatagtggcgtaaaaaacagtctcaaagaagccaaccatgatggtgacttcggcataactctggccgagctcagagccctgatggagctccggtctactgatgctttgcggaagatccaggaatcatacggggacgtgtacggcatctgcaccaaactcaagactagtccaaacgagggactgagcggaaatcctgctgacctggaaagaagagaggccgtcttcgggaaaaatttcatcccacccaagaagcctaagaccttcctgcagctggtctgggaggcgctgcaggacgtgacccttattattctcgagatcgcagccatagtatctctgggcttgagcttctaccagccaccagagggcgacaacgctctttgcggggaggtgagcgtgggggaagaagaaggcgaaggggaaactggttggatagagggcgcagccatcttgctctctgtggtgtgtgtggtcctggtgacggcctttaacgactggtctaaggagaagcagtttcggggtctgcagagtcggattgaacaggaacagaaattcaccgtcatacgtggtggccaggttattcagattcccgtggctgacatcacggtcggcgacattgcgcaggtaaagtacggggatctgctccctgcagacgggattttgattcagggcaatgacctgaagattgatgagagtagtctgacgggcgagagtgatcacgtgaaaaagagccttgacaaagatcccctgctgctcagcggaacccacgtcatggaaggatcaggccggatggtggttaccgctgtaggggtgaacagtcagacaggaatcatctttaccctgttgggggccggaggtgaagaagaggaaaaaaaggacgaaaaaaaaaaggagaaaaagaacaaaaagcaagacggcgctattgaaaatcgaaataaggctaaggctcaagatggagccgcaatggaaatgcaaccactaaaatccgaggagggaggggatggagatgaaaaagacaagaaaaaggcaaaccttcccaaaaaggagaagagtgtgctgcaggggaaactgaccaaactcgccgtgcagattggaaaggctggcttgcttatgagcgcaatcacggtgatcatcctcgtgctctatttcgtcattgacacattctgggtccagaagcggccatggctcgcagagtgtacgcctatctatattcaatatttcgtgaagttctttatcataggtgtgacagttttggtggtggccgtaccagaggggctgccactggctgtgacaatatccttggcctatagcgttaagaagatgatgaaggataataatctggtgaggcacctcgacgcctgtgagacaatgggaaatgcgacggcaatttgttctgataaaacagggactcttactatgaacaggatgactgtagtacaggcctatatcaacgagaaacattacaagaaggttccagagccagaggccataccccccaacattttatcctacttggttacaggtatcagtgtcaattgcgcatataccagcaagattttgcctcccgagaaagaagggggtctgccaagacatgtggggaataagactgagtgtgctctgctaggactgctgctggaccttaaaagagactatcaagatgtgagaaacgagatcccagaagaggccctgtacaaggtgtatacctttaatagcgtccgcaagtcaatgagcactgtcttgaagaatagcgacggctcttatcggatcttttcaaaaggcgcttctgaaattatcctgaagaaatgttttaagatcttgtctgccaacggagaggccaaggtgttccgtcctcgagatcgggatgatattgtgaagacagtgattgagccaatggcatccgaggggttacggacaatctgcttggcttttcgggattttcctgccggggagccagaacccgagtgggataacgagaatgacatcgtgacaggtctgacctgcatcgcagtggtggggattgaggatccggtgcgtccagaggttcccgatgcgatcaaaaaatgtcagcgcgctggtattaccgtgaggatggtaacaggcgacaacattaataccgctagggccattgcaacgaagtgtgggatcctgcaccccggagaggactttctgtgtctagagggaaaggactttaatcggcggatcaggaatgagaagggggagattgagcaagaaaggattgacaagatctggccaaagctgcgtgttctggctaggtcttcacctacggacaaacataccctcgttaaggggattatcgacagtacagtcagtgaccagcggcaagtcgtggccgtgacaggcgatggcaccaacgacggccccgccctgaaaaaggctgacgtagggtttgctatgggcattgccggaaccgatgtcgcaaaagaggcctcagatattatcctgacagacgataacttcacttccatcgtcaaggctgttatgtggggtcgcaacgtgtacgactcaatttccaaattcctgcagttccagctgactgttaatgtagttgcagtgatcgtggcattcaccggcgcgtgcatcacccaggatagcccgctaaaagcggtacagatgttgtgggtgaacctcattatggataccctggcgtctctggccttagcaacagaaccaccaaccgagagcctgttgcttcgcaagccgtacggccggaacaaaccactaatcagccggaccatgatgaaaaatatactggggcacgctttctaccagcttgtcgttgtattcacattgttgtttgccggggaaaagttcttcgacatcgactccggtagaaatgctcctctacacgccccaccctccgaacattacacgatcgtgttcaacacgtttgtcctgatgcagttattcaatgagattaatgcaagaaagattcatggggagaggaacgtttttgaaggaattttcaataatgcgattttctgtacaatcgtgctgggaacattcgtggtccagataataatcgtgcagttcggagggaagcccttcagctgcagcgaactcagtatagagcaatggctatggagtatcttcttaggcatggggaccctcctgtggggacaattgatttccaccattcctacctcaaggcttaaatttctcaaggaggccggccatggcacacagaaggaagagatccccgaggaagaactggcagaagatgttgaggagatagaccacgccgaacgggagttacggagagggcagatcctctggtttcggggcttgaaccggattcagacgcagatacgtgttgtgaacgctttccgcagttcactatacgaagggctggaaaaacccgagtccaggtcaagtatccataatttcatgacacatccagaattccggattgaggatagcgagccacacatccccttgattgatgacaccgatgctgaggatgacgccccaaccaaacgtaactcttcccctccccccagccctaacaagaacaacaatgctgttgacagtgggattcatttgaccattgagatgaacaaaagcgccacttcgagctcccctggatcgccccttcacagtctggaaacttcactgtag

SEQ ID NO: 334276 - DNA, 3663 bp, Artificial Sequence
  derived and/or modified sequence
atgggagacatggccaacaacagcgtggcctacagcggcgtgaagaacagcctgaaggaggccaaccatgatggagactttggcatcaccctggccgagctgcgggccctgatggagctgcggagcacagatgccctgaggaagatccaggagagctatggagatgtgtatggcatctgcaccaagctgaagaccagccccaatgaaggcctgagcggcaacccagctgacctggagcggcgggaggccgtgtttgggaagaacttcatcccccccaagaagcccaagaccttcctgcagctggtgtgggaggccctgcaggatgtgaccctcatcatcctggagattgctgccatcgtgtccctgggcctgtccttctaccagcccccagagggggacaatgccctgtgtggggaggtgtctgtgggggaggaggagggggagggggagaccggctggattgagggcgccgccatcctgctgtctgtggtgtgtgtggtgctggtgacagccttcaatgactggagcaaggagaagcagttccggggcctgcagagccgcatcgagcaggagcagaagttcaccgtcatccggggcggccaggtgatccagatccctgtggccgacatcaccgtgggggacatcgcccaggtgaagtacggggacctgctgcctgcagatggcatcctgatccagggcaatgacctgaagattgatgagagcagcctgaccggggagagtgaccacgtgaagaagagcctggacaaggaccccctgctgctgagcggcacccacgtgatggagggcagcggccgcatggtggtgacagctgtgggcgtgaacagccagacaggcatcatcttcaccctgctgggcgccggcggggaggaggaggagaagaaggatgagaagaagaaggagaagaagaacaagaagcaggatggagccatcgagaacagaaacaaggccaaggcccaggatggagctgccatggagatgcagcccctgaagtctgaggagggcggagatggagatgagaaggacaagaagaaggccaacctgcccaagaaggagaagtctgtgctgcagggcaagctgaccaagctggccgtgcagatcggcaaggccggcctgctgatgtctgccatcaccgtcatcatcctggtgctgtacttcgtcatcgacaccttctgggtgcagaagaggccctggctggctgaatgtacccccatctacatccagtactttgtgaagttcttcatcatcggcgtgacagtgctggtggtggccgtgcctgagggcctgcccctggccgtgaccatcagcctggcctacagcgtgaagaagatgatgaaggacaacaacctggtgcgccacctggatgcctgtgagaccatgggaaatgccacagccatctgcagcgacaagacaggcaccctgaccatgaacaggatgacagtggtgcaggcctacatcaatgagaagcactacaagaaggtgcctgagcctgaggccatcccccccaacatcctgagctacctggtgacaggcatctctgtgaactgtgcctacaccagcaagatcctgcccccagagaaggagggcggcctgcccaggcatgtgggcaacaagacagaatgtgccctgctgggcctgctgctggacctgaagagggactaccaggatgtgagaaatgagatccctgaggaggccctgtacaaggtgtacaccttcaacagcgtgaggaagtccatgagcacagtgctgaagaacagtgatggcagctaccgcatcttcagcaaaggagccagcgagatcatcctgaagaagtgcttcaagatcctgagcgccaacggggaggccaaggtgttccggccccgggacagagatgacatcgtgaagacagtgattgagcccatggccagcgagggcctgcggaccatctgcctggccttccgggacttccctgctggggagcctgagcctgagtgggacaatgaaaatgacatcgtgacaggcctgacctgcatcgctgtggtgggcattgaagatcctgtgcggcctgaggtgcctgatgccatcaagaagtgccagagagctggcatcaccgtgaggatggtgactggagacaacatcaacacagcccgggccatcgccaccaagtgtggcatcctgcaccctggagaggacttcctgtgcctggagggcaaggacttcaacagacgcatcagaaatgaaaaaggagaaattgagcaggagagaattgacaagatctggcccaagctgcgggtgctggcccggagcagccccacagacaagcacaccctggtgaagggcatcatcgacagcacagtgtctgaccagaggcaggtggtggccgtgactggagatggcaccaatgatggccctgccctgaagaaggcagatgtgggctttgccatgggcattgctggaacagatgtggccaaggaggccagtgacatcatcctgacagatgacaacttcaccagcatcgtgaaggctgtgatgtggggcagaaatgtgtatgacagcatcagcaagttcctgcagttccagctgactgtgaatgtggtggccgtcatcgtggccttcaccggggcctgcatcacccaggacagccccctgaaggctgtgcagatgctgtgggtgaacctgatcatggacaccctggccagcctggccctggccacagagcccccaacagagagcctgctgctgaggaagccctatggaagaaacaagcccctcatcagcaggaccatgatgaagaacatcctgggccacgccttctaccagctggtggtggtgttcaccctgctgtttgctggggagaagttctttgacatcgacagcggcagaaatgcccccctgcacgcccctccttctgagcactacaccatcgtgttcaacacctttgtgctgatgcagctgttcaatgagatcaatgccaggaagatccacggggagagaaatgtgtttgagggcatcttcaacaatgccatcttctgcaccatcgtgctgggcacctttgtggtgcagatcatcatcgtgcagtttggaggcaagcccttcagctgcagcgagctgagcattgagcagtggctgtggagcatcttcctgggcatgggcaccctgctgtggggccagctgatcagcaccatccccaccagccggctgaagttcctgaaggaggccggccacggcacccagaaggaggagatccctgaggaggagctggccgaggatgtggaggagattgaccacgccgagcgggagctgcggcggggccagatcctgtggttccggggcctgaaccgcatccagacccagatccgggtggtgaatgccttccgcagcagcctgtatgagggcctggagaagccagagagccgcagcagcatccacaacttcatgacccaccctgagttcagaattgaagattctgagccccacatccccctgattgatgacacagatgctgaagatgatgcccccaccaagaggaacagcagccccccacccagccccaacaagaacaacaatgctgtggacagcggcatccacctgaccatcgagatgaacaagagcgccaccagcagcagccctggcagccccctgcacagcctggagaccagcctgtag

SEQ ID NO: 334277 - DNA, 2892 bp, Artificial Sequence
  derived and/or modified sequence
atgttcctggtgattggcacccacgtgatggagggcagcggccgcatggtggtgacagctgtgggcgtgaacagccagacaggcatcatcttcaccctgctgggcgctggaggagaggaggaggagaagaaggatgagaagaagaaggagaagaagaacaagaagcaggatggagccattgaaaatagaaacaaggccaaggcccaggatggagctgccatggagatgcagcccctgaagtctgaggagggcggagatggagatgagaaggacaagaagaaggccaacctgcccaagaaggagaagtctgtgctgcagggcaagctgaccaagctggccgtgcagatcggcaaggccggcctgctgatgtctgccatcaccgtcatcatcctggtgctgtactttgtgattgacaccttctgggtgcagaagaggccctggctggccgagtgcacccccatctacatccagtactttgtgaagttcttcatcattggagtgacagtgctggtggtggccgtgcctgagggcctgcccctggccgtgaccatcagcctggcctacagcgtgaagaagatgatgaaggacaacaacctggtgcgccacctggatgcctgtgagaccatgggaaatgccacagccatctgcagcgacaagacaggcaccctgaccatgaacaggatgacagtggtgcaggcctacatcaatgagaagcactacaagaaggtgcctgagcctgaggccatcccccccaacatcctgagctacctggtgacaggcatctctgtgaactgtgcctacaccagcaagatcctgcccccagagaaggagggcggcctgcccaggcatgtgggcaacaagacagaatgtgccctgctgggcctgctgctggacctgaagagggactaccaggatgtgagaaatgagatccctgaggaggccctgtacaaggtgtacaccttcaacagcgtgaggaagtccatgagcacagtgctgaagaacagtgatggcagctaccgcatcttcagcaagggggccagcgagatcatcctgaagaagtgcttcaagatcctgagcgccaatggagaggccaaggtgttccggccccgggacagagatgacatcgtgaagacagtcatcgagcccatggccagcgagggcctgcggaccatctgcctggccttccgggacttccctgctggggagcctgagcctgagtgggacaatgaaaatgacatcgtgacaggcctgacctgcatcgctgtggtgggcatcgaggaccctgtgcggcctgaggtgcctgatgccatcaagaagtgccagagagctggcatcaccgtgaggatggtgactggagacaacatcaacacagcccgggccatcgccaccaagtgtggcatcctgcaccctggagaggacttcctgtgcctggagggcaaggacttcaacagacgcatcagaaatgagaagggggagattgagcaggagagaattgacaagatctggcccaagctgcgggtgctggcccggagcagccccacagacaagcacaccctggtgaagggcatcatcgacagcacagtgtctgaccagaggcaggtggtggccgtgactggagatggcaccaatgatggccctgccctgaagaaggcagatgtgggctttgccatgggcattgctggaacagatgtggccaaggaggccagtgacatcatcctgacagatgacaacttcaccagcatcgtgaaggctgtgatgtggggcagaaatgtgtatgacagcatcagcaagttcctgcagttccagctgactgtgaatgtggtggccgtgattgtggccttcaccggggcctgcatcacccaggacagccccctgaaggctgtgcagatgctgtgggtgaacctgatcatggacaccctggccagcctggccctggccacagagcccccaacagagagcctgctgctgaggaagccctacggcaggaacaagcccctcatcagcaggaccatgatgaagaacatcctgggccacgccttctaccagctggtggtggtgttcaccctgctgtttgctggggagaagttctttgatattgattctggaagaaatgcccccctgcacgccccacccagcgagcactacaccatcgtgttcaacacctttgtgctgatgcagctgttcaatgagatcaatgccaggaagatccatggagagagaaatgtgtttgagggcatcttcaacaatgccatcttctgcaccatcgtgctgggcacctttgtggtgcagatcatcatcgtgcagtttggaggcaagcccttcagctgcagcgagctgagcattgagcagtggctgtggagcatcttcctgggcatgggcaccctgctgtggggccagctgatcagcaccatccccaccagccggctgaagttcctgaaggaggccggccacggcacccagaaggaggagatccctgaggaggagctggctgaagatgtggaggagattgaccatgctgagcgggagctgcggcggggccagatcctgtggttccggggcctgaaccgcatccagacccagatccgggtggtgaatgccttccgcagcagcctgtatgagggcctggagaagccagagagccgcagcagcatccacaacttcatgacccaccctgagttcagaattgaggacagcgagccccacatccccctgattgatgacacagatgctgaagatgatgcccccaccaagaggaacagcagccccccacccagccccaacaagaacaacaatgctgtggacagcggcatccacctgaccatcgagatgaacaagagcgccaccagcagcagccctggcagccccctgcacagcctggagaccagcctgtag

SEQ ID NO: 334278 - DNA, 3663 bp, Artificial Sequence
  derived and/or modified sequence
atgggcgacatggccaacaacagcgtggcctacagcggcgtgaagaactccctcaaagaggccaaccatgacggcgactttggaatcacactggctgagttgcgagcgctgatggagctgcgaagtactgatgcccttcgaaaaatccaagaatcctacggcgatgtctatggaatttgcaccaaactgaagacctcccccaacgagggcctgtctggaaatccagcagatctggaacgcagagaggctgtgtttggaaagaattttatccccccaaaaaaacccaagacctttctgcaactcgtgtgggaagcactgcaggacgtgaccttaatcatcttggaaattgctgccattgtgtccttgggcctttcattttatcagccaccagagggtgataatgccctgtgtggcgaggtgagcgtaggagaggaggagggcgagggggaaaccgggtggatcgagggggctgctatcctgctgtcagtcgtctgtgttgtgcttgtgaccgcctttaacgactggagcaaagaaaaacaatttaggggattgcagtctcgcatcgagcaggagcaaaagtttaccgtgatccgggggggacaagtcattcagatcccagtggccgacatcactgtgggcgatatagcccaggttaagtatggagatctccttcctgccgatggcatactgattcaggggaatgacttgaaaatcgatgaaagtagcctcacaggagagtccgatcacgtcaagaagtcgctggataaagacccactgctcctgtcaggaactcacgttatggaagggagcggtcgaatggtggttactgcagtgggcgtgaacagccagactggcatcatattcactctcctgggcgctggaggggaagaggaggagaagaaggatgaaaagaagaaggaaaaaaagaataagaagcaggatggagcaatcgaaaataggaataaagctaaagcgcaggatggggcagcgatggaaatgcagccgctgaagagtgaagagggcggggatggagacgagaaggataagaagaaggcgaatcttcctaagaaagagaagtctgttctgcaaggcaagctaaccaaactcgccgtccagatcggaaaggccggcctgctaatgtcggccataactgtgatcattttagttctatatttcgttattgacacattctgggttcagaagcgtccatggctcgctgagtgcactcctatttatattcagtactttgttaaattctttattatcggagtgaccgtcctcgtggtggccgtgcccgaaggtttaccactggccgtcaccatatccctggcctacagcgtcaagaaaatgatgaaagacaacaatttagtacggcacctggacgcctgtgaaactatgggaaatgctacagcaatctgttcagataagacgggtacgttgacaatgaatagaatgaccgtggtacaggcttatattaatgagaaacattacaaaaaggtgcctgaacccgaagctatcccccctaacatcctgtcctacctggttactggcattagtgtaaattgcgcgtacacctccaaaatattaccgccagagaaagaaggagggttaccacgccacgttggcaacaagacagagtgcgcccttctggggcttctgttagacctgaagcgagattaccaggacgtgaggaatgaaatccctgaggaggccttgtacaaggtgtatacctttaacagcgtccggaagtctatgtccaccgtactgaagaactcagatggcagttacagaatcttctccaagggagccagcgagataatcttaaagaaatgttttaagatcctgtcagctaacggagaggcaaaggttttccgcccccgggatcgggatgatattgtcaaaacagtgatcgagccaatggcctctgaaggactgcgtactatctgtctggcttttcgtgattttcccgcaggtgagcctgaaccagagtgggacaatgaaaatgacatagttactggtttgacctgcattgctgtggtgggaatagaagatccagtacggcccgaggtgcctgatgccatcaaaaaatgccagagggccggcatcacagtgaggatggtaacaggagataacataaacaccgcccgagccattgcaacaaaatgtggtatactccaccccggagaagattttctttgccttgaagggaaggactttaatagaaggataagaaatgagaagggtgagatcgagcaggagcggatcgataaaatatggccaaaacttagggtcctggccagatcatcccccacagataaacacactctggtgaaaggcattattgatagcaccgtgagcgaccagaggcaggtcgtcgcggtgaccggtgacggaactaacgatggacccgctctgaaaaaggccgatgtgggtttcgccatgggaatcgccggcactgacgtagccaaagaagccagcgacataattctgaccgatgacaactttacatcaatagtcaaagccgttatgtgggggcgaaatgtttacgactcaatatccaagttcctacagtttcagctgacagtgaacgtggtggcagtcattgtggccttcacaggggcgtgtatcacccaggatagccctttaaaagccgtgcagatgttgtgggtcaatctgataatggataccctggccagtctggccctggcaaccgagcctcccaccgagtccctcttgctccgcaaaccatatggaaggaataaaccattgatttcacgcactatgatgaaaaacattctggggcacgcgttctaccagctcgtcgtcgtgttcactttactgttcgcgggggaaaaattttttgacatcgatagtggccgcaatgccccgctgcatgccccgccttcagaacactatactatagtgtttaataccttcgtgttaatgcaactgttcaatgaaattaatgctcgaaaaatccacggggaaaggaacgtgtttgaagggatttttaacaacgccatattctgcactattgtgctggggaccttcgttgtacagattatcatagttcagtttgggggcaagccattctcttgttcagagctgagtatcgaacagtggctttggtccatctttctcgggatgggaactttactatggggacagttgatctcaaccatacccacgagccgccttaagtttttaaaagaggccggccacggaacccagaaggaggagattccagaagaggagctggctgaagacgttgaggaaattgatcatgcagaaagggagctgcgccgagggcagattctatggttcagaggactcaaccgaattcagacccagatcagagttgttaatgcctttagatcgtcactgtacgagggtcttgaaaagcctgagtcccgaagctccatccacaattttatgacacaccctgaattcagaattgaagactccgagcctcatatcccactgatagacgatactgatgcagaagatgacgctccaaccaagagaaactcttcaccccctccatcacccaataaaaacaacaatgccgtcgattctgggattcatctcaccatcgagatgaataaatcggccacgagctccagtcccggctctccactccattccctcgaaacaagtctgtag

SEQ ID NO: 334279 - DNA, 2892 bp, Artificial Sequence
  derived and/or modified sequence
atgttcctggtgatcggcacccacgtgatggagggcagcggccggatggtggtaacggcagtgggtgtaaactcccagacagggatcattttcactcttctgggtgctggcggcgaggaggaggagaagaaggacgaaaagaagaaggagaagaaaaacaagaaacaggatggtgccatcgagaataggaacaaggccaaagcccaggatggcgccgctatggagatgcagcctctgaagagcgaagagggaggtgatggagacgagaaggacaaaaagaaggccaatctgccaaagaaggaaaaaagcgtgcttcagggcaagcttacgaaactggccgtccagatcggtaaagcgggtttgctcatgtccgctatcaccgtcataatcctcgttctgtatttcgtcatagatacattttgggtccagaagagaccctggctagctgagtgtacacccatatacatacagtactttgtgaaatttttcatcattggagtgacagtcctcgtggttgccgtgccagaaggccttcctctcgcggttaccatctccctggcctattctgtgaaaaagatgatgaaagacaacaatttagttcggcacctggacgcttgtgagacaatgggaaacgccacagcaatttgtagcgacaagacaggaaccttaacgatgaatcgtatgacagtagtgcaggcctacattaacgaaaaacactacaaaaaggtgcccgaacctgaggccatcccccccaatatactgtcatacctcgtgaccggtatcagtgtgaattgcgcatacacaagcaagatcctaccccccgaaaaggagggcggacttccacgtcatgtcggtaataagaccgagtgcgcattgcttggcctcctccttgatctcaagagggactatcaggacgtacggaatgagattcccgaagaggcgctgtacaaagtctacactttcaactctgttcggaaaagcatgtcaacagtcctgaagaattctgatgggagctacagaatcttttccaaaggagctagcgaaattattcttaaaaaatgtttcaaaattttgagtgctaacggagaggccaaagtgttcaggccacgagatcgagacgatatagtaaaaacggttatagaacctatggctagcgagggccttcgaacgatttgcctagccttccgggacttcccagccggtgagcccgaaccagagtgggataacgaaaacgacattgtgacaggcttaacgtgtatcgccgtagttggaattgaggatcctgtaagacccgaagtgcctgacgcgatcaagaagtgtcagcgggccggcattaccgtgcggatggttaccggcgataatattaacacggctagagcgatagcaactaagtgtggtatcttgcaccctggggaggacttcctttgtttggaggggaaagacttcaacaggcgcatcagaaatgagaagggcgagattgagcaggagcggatcgataagatttggccaaagctgagggtcttagcccgaagttctcctacggataaacacacactggtgaaaggcatcatcgatagcaccgtctctgaccagagacaagtggtcgccgtgacaggcgatggaacgaatgatgggcctgcactcaaaaaggcagacgtaggcttcgcaatggggatagccggcacagatgtcgcaaaagaggcaagcgacattattctgacagacgataacttcacaagcatcgtaaaagctgtcatgtgggggcgaaacgtgtatgatagcatctccaagtttctgcagttccagctgaccgtcaatgtggtggctgtgatcgtggcattcacgggcgcctgtattacccaggatagcccacttaaggcagtgcagatgctctgggttaaccttattatggacaccctggctagcctggccctggccaccgagcccccaaccgaaagtctgctgctgcgcaaaccgtatggacgcaacaagcctttgataagccgaactatgatgaaaaatatcctcggccacgcattctaccagctggtagtggtattcaccctgcttttcgcgggtgaaaagttctttgatatagactcgggacggaatgcacctctgcacgctcctccctctgagcactacaccatagtattcaatacatttgtgctgatgcagctgttcaacgaaatcaacgccaggaaaatccacggagagcgcaacgtcttcgaaggcatattcaataatgcaattttttgtactattgtcctcgggacgttcgtggtgcagattattatcgtacaatttggcggtaagccattttcctgcagcgaactgtctatcgaacagtggctctggagcatctttttgggcatgggtacactgctctgggggcagctgattagcacaatacccacctcccggctgaagttccttaaagaggccgggcatggcacacagaaggaggaaattccagaggaggagctcgccgaggatgtcgaagagattgatcacgctgaacgggagctgcgaagggggcagatcctgtggttccggggattgaatagaattcagacccagatccgagtggtgaatgcctttaggtcttctctttatgaaggactggagaaaccagagtcgaggtcttctattcacaactttatgacccatccggaatttagaatcgaagactctgaaccacatatacccctcattgatgacaccgacgcagaggacgacgccccaacgaaacggaatagctcccctccaccaagcccaaataaaaataataatgctgtggactcaggaatccaccttacaattgagatgaacaagtcggctacctcgtcttcaccgggctcccctctgcattcgctggaaacaagcctctag

SEQ ID NO: 334280 - DNA, 3663 bp, Artificial Sequence
  derived and/or modified sequence
atgggcgacatggccaacaacagcgtggcctacagcggcgtgaagaactctctcaaggaggctaatcacgacggtgacttcggcatcactttggccgagttacgcgccttaatggagctgcgctctacagatgcactgcggaaaattcaggagtcctatggagacgtttacgggatttgtacaaagctcaagactagtcctaacgaaggcctgagtgggaatcccgcggacctggaaagacgcgaagcagtttttggcaagaacttcataccacccaagaaaccgaaaacgtttttgcagctggtgtgggaggctttacaggacgtcacattaataatactcgagatagccgcgatcgtttctctgggcctttcattttaccagccacctgagggggataatgctttgtgcggtgaggtgtccgtgggagaggaagagggagagggagagacggggtggatcgagggtgcggccattctcctgtctgtagtatgtgtggtccttgtgactgcttttaacgattggagtaaggaaaaacaattcagagggctccagagccgaattgaacaagagcagaagttcacggtcatacgtggggggcaggtcatccagatacccgtcgctgacatcacagtaggtgacatagcacaggtcaagtacggtgatttgctgccggctgacggcatcctgatccagggcaacgatcttaagatcgatgagagctccctcacaggggaatccgaccacgtcaagaagtcactggacaaggaccccctgttgctcagcgggactcatgttatggaaggtagcggccgcatggtagtgacagcagtaggtgtgaattcacaaacgggtattatttttacattgctgggtgccgggggtgaagaggaggaaaagaaggatgagaaaaaaaaggagaagaagaacaagaaacaggacggagcgatagagaatcgaaacaaagccaaagcccaagacggcgccgctatggagatgcagcctctgaagagcgaggaagggggggacggggatgagaaagataaaaagaaagcaaacttgcccaaaaaagagaaatcggtactgcaggggaaattaactaagctggctgtgcagattggtaaggctggcctcttgatgtcggccatcacggtgatcatcctggtgttatactttgtcatcgacaccttttgggtccaaaagcgcccgtggctggctgaatgcactcccatctatattcagtattttgttaaattctttatcatcggcgtcacagtgctcgttgtggccgtccccgaaggtctgccattggcagtgacaatatccttagcctactcagtcaagaagatgatgaaagacaacaatttggtaagacacctagatgcatgcgagactatgggaaatgctactgcgatttgctcggacaaaaccggtacgttgacgatgaaccggatgaccgtcgtgcaggcgtacataaatgagaaacactacaagaaggttcctgagccagaggctatacccccaaacatcctctcttatttggttaccggcatctccgtcaattgtgcctacaccagtaaaatcctcccacctgagaaagagggcggactcccccggcatgttgggaataagacagaatgcgcactgttaggtctgcttctcgatctcaaaagagactatcaagatgttcgaaatgaaataccagaagaagctctgtacaaagtgtacactttcaattccgtgaggaaatctatgtccaccgtgttgaaaaacagcgatgggagctatcgaatcttttccaaaggagcttcagagataattctgaaaaagtgtttcaagatcctaagtgccaacggcgaagcaaaggtgttccggccccgtgatcgggacgatatagtaaagacggtcatcgaaccaatggcttcagaaggattaagaactatctgcctagccttccgagatttcccagctggagagcctgagccagagtgggataatgaaaacgatatagtcaccggtctgacttgtatagcagttgtgggcatcgaagacccagtgcggcctgaggtgcccgatgccattaaaaagtgtcagcgcgctggaattaccgtcagaatggttaccggggataacattaatacagctagagccatcgcaacaaagtgcggtattctgcatcccggggaagacttcctgtgcttggaaggcaaggattttaacagaaggatccggaatgaaaagggcgagatagagcaagagcgcattgataaaatctggccaaagcttcgtgtcctagcacgaagctcaccaacagataaacataccctcgtgaagggtatcatagattccacagtttccgaccagaggcaagtcgtggccgttacaggggacggaacgaatgacgggccagccctcaagaaggctgacgtcgggtttgctatgggcatcgcaggaaccgatgttgccaaggaggcgtcagacatcatccttactgacgacaacttcacaagcatcgttaaggctgttatgtggggccggaacgtttatgactcaatttccaagtttctgcaatttcagctgaccgtgaatgtcgtggctgtgatcgttgccttcactggagcgtgcataactcaggacagcccccttaaggctgtgcagatgctctgggtgaacctaatcatggataccctggctagtttggccctagccacggaaccccctacagaaagtctcttacttcgaaagccgtacggtcgaaataaacccctcatatctcgcactatgatgaagaatatactgggacatgcgttctaccagcttgtagtggtgttcacactcctgtttgcaggagaaaaatttttcgacatagactcaggcagaaatgccccactccacgcaccccctagcgaacactacaccatcgtgtttaacacttttgtgcttatgcagctctttaacgagattaacgcaagaaaaatccatggggagcggaatgtgtttgaaggcatctttaataacgctatcttctgcacaattgtactgggaaccttcgtggtacaaattatcatagtacagtttggtggaaaacccttcagctgcagtgagctgtccatcgaacaatggctctggtccatttttctggggatggggacgctcctatggggccaactgattagcacaatccctaccagccgcctgaaatttctgaaagaagccggtcacgggacgcagaaggaagagattcctgaggaagaactcgctgaggatgtggaagagatagatcatgccgagcgggaactccgcagggggcagattctctggtttagggggctaaataggatccagactcaaatcagggtggtgaacgcgttccgatcaagcctctatgagggactcgaaaagccagaatcaagaagcagtatacacaacttcatgacccaccccgagtttaggatcgaagacagcgagcctcacataccactaatagatgacacggacgccgaggatgacgcacccaccaagcggaactcctctcccccgccatcaccgaataaaaacaacaatgcagtggacagtgggattcatcttaccatcgagatgaacaaaagcgccactagctcttccccgggcagccccctccatagtctggaaacaagcctgtag

SEQ ID NO: 334281 - DNA, 3663 bp, Artificial Sequence
  derived and/or modified sequence
atgggtgacatggccaataacagcgtggcttactcaggggtgaaaaatagcctgaaggaggcaaaccacgatggcgatttcggaataaccctggccgaacttagagccctcatggaacttaggagcacagatgccctgaggaaaattcaggagtcgtacggcgatgtctacggcatctgtaccaagctaaagacctccccgaacgaaggtctttctgggaatccagcagatcttgaaaggcgagaagccgtcttcggcaaaaatttcatccctcccaagaagcccaagacatttctacagttggtgtgggaagcactacaagatgtgaccctgatcatcctcgaaattgccgcaatagtgtcactgggcctgtcattttaccaacctccagaaggagataatgctctttgtggagaagtttctgttggggaagaggagggagagggggaaacgggctggatcgagggagccgcaattttgttgagtgtagtctgcgtggttctggttacagctttcaatgattggagtaaggagaaacagtttcggggactgcagtctagaattgagcaagaacaaaagttcacggtcattcgcggaggacaagtgatccagattccggtggctgatatcaccgtcggcgatattgcacaagtgaagtacggcgatctgttgccagctgacggaatcctgatccagggaaatgatcttaagatagatgagtcttccctcactggcgagtccgaccatgtcaaaaagtccctcgataaggaccctctgctcctatctgggactcatgtgatggagggcagcggtaggatggtggtcactgcagtcggtgttaattcgcagacaggtatcatttttaccctgctgggagccggaggtgaggaggaggaaaagaaggacgagaagaaaaaggagaagaagaacaagaaacaggatggagcaatcgagaaccggaataaagcgaaggctcaggacggcgcagcaatggagatgcagcccttaaagagcgaggaaggtggcgacggcgatgagaaagataaaaagaaagctaacctccctaaaaaagagaagtcagtgctgcagggaaaacttactaagctagcagttcagattggaaaggccggattgctcatgtccgccatcaccgttattattctggtgctctacttcgttatagatacgttctgggttcaaaagaggccatggctggctgaatgcacaccaatctatatccagtacttcgtaaaatttttcattattggtgtcaccgtcctggtggtggccgttcccgaaggccttcccctggctgtcaccataagcttagcatacagcgtcaagaagatgatgaaggataacaatctggtccgtcacttagacgcatgcgaaactatggggaatgccactgctatttgcagtgataaaactggaacactgacgatgaatcggatgacggtggtccaggcctacataaatgaaaaacattacaaaaaggtgccagaacccgaggcaatcccaccaaatatcttatcctacctggtgaccgggataagtgtgaactgcgcttacactagcaagatactgccccctgagaaggaggggggactgcccaggcacgtggggaataagaccgagtgcgccttgttaggcctcttactcgatttgaagcgcgattatcaggacgtcagaaatgagatcccagaagaggctctttacaaagtgtatacattcaattctgtgaggaagagcatgagtaccgtgttaaagaacagtgacggaagctaccgcatcttcagtaaaggcgcttctgaaattattctcaagaaatgcttcaagatcctatcagcaaatggggaagctaaggtgttcaggcctcgagatagggacgatatcgtcaaaactgtgatagagcccatggcctccgagggtctccggacgatctgccttgcgttcagagacttccctgccggagagccagaaccggagtgggacaacgagaatgacatcgtgacaggcctaacttgcatcgccgttgttgggattgaagaccccgtccgcccagaggtgccagacgctatcaagaagtgccagcgggctggtataactgtcaggatggttacgggagataacatcaatacagcaagagcaatcgctaccaagtgtggcatacttcaccctggggaagactttctgtgtcttgaaggcaaggattttaatcggaggatcaggaacgaaaagggagagatcgagcaggagagaatcgataagatctggcctaaactacgtgtgctcgctcgctccagccctacagataaacataccctcgtgaagggcatcattgattcgactgttagcgaccagagacaggttgtggcagttacaggcgatggaacgaacgacggacccgcactaaagaaggccgatgtgggctttgccatggggattgctggcacggatgtggccaaagaggcctctgatatcattcttactgacgacaacttcactagcatcgtaaaagcggtgatgtgggggcgaaacgtatacgattctataagtaagttcctgcagtttcagttgactgtcaatgtcgtggcagtgatcgtggcgtttacaggagcttgcatcacccaagactcccccttgaaagccgtacaaatgctgtgggtcaacctgattatggacaccctggcctcactcgcattggccaccgagccgccaaccgaaagtctgcttttgcgcaaaccgtacgggcgaaacaaaccgctgatcagccgaaccatgatgaagaatatccttgggcacgccttttatcagctggtggtcgtttttactctgctgttcgccggagagaaattcttcgatattgacagcggaagaaatgcgccactccatgcgcctccctctgaacactacacaatcgtgtttaacactttcgtgctgatgcagctgttcaatgagattaatgcacgaaaaatccatggtgagcgcaacgtgttcgaagggatctttaataatgctatattttgtacaatcgtgttgggaacgtttgtcgtacagatcattatcgtgcagttcggtgggaaaccttttagttgtagcgagctcagcatagagcagtggctgtggtctattttccttggcatgggaacactactttggggacaattaatatccactatccctactagcaggcttaagtttcttaaagaagccggtcacggcacacaaaaagaggaaatccctgaagaggaactggccgaagatgtcgaagagatcgatcatgcagagcgggaattgcgccgtggccagatactgtggttccgcggactgaatagaatccagactcagattcgagttgtgaatgcatttagatcaagtttatacgagggcctggagaaacccgaatcccggtcttccatccataattttatgacacatcccgaattcagaattgaggattctgaacctcacatccctttgatagatgacaccgatgctgaagatgatgcccctaccaagaggaattcctccccccctccaagccccaacaagaacaataatgccgtggatagcggaattcatctgactattgaaatgaacaagagcgctacatcctccagccctgggtctcctcttcattcattggagactagcttgtag

SEQ ID NO: 334282 - DNA, 2892 bp, Artificial Sequence
  derived and/or modified sequence
atgttcctggtcatcggaacccacgttatggaaggaagtgggagaatggtcgttactgctgtgggggtcaatagtcagacgggaattatctttacgctgctgggtgcgggaggagaagaggaagagaaaaaagacgagaagaaaaaagagaaaaagaataaaaaacaggacggtgctattgagaaccggaacaaggctaaggcacaggatggcgctgcaatggagatgcagcctctgaagtcagaggagggcggtgacggcgacgaaaaggataaaaagaaagccaacctcccaaagaaggagaaaagtgtcctgcaagggaagctgaccaagctggctgtccagatcggaaaggccggactgttgatgagcgctattaccgtaatcattcttgttctgtactttgtgattgataccttctgggtccagaaacgaccttggcttgcagagtgcacacccatatacattcaatactttgtcaagttctttataattggcgtaacggttctcgtcgtcgcggttccagaaggactgccgctagcagtcacgatttcactggcctattccgtcaagaagatgatgaaggacaataacttggtaagacacttggatgcctgcgaaactatggggaacgctaccgcaatctgctcagacaagaccggcaccctgactatgaatcggatgactgtggtgcaggcttacatcaacgagaaacattataaaaaggtacccgagccagaagcaatacccccaaatatcctcagttacctggtaacagggatttctgtgaattgcgcgtatacttccaagattctgccacctgaaaaagaagggggactccctcgccatgttggaaataaaaccgaatgcgctttgctgggcctcctactggatctgaaacgagattatcaagatgtgaggaatgagatcccagaggaggccctgtacaaagtgtacacgttcaattctgtgagaaagagcatgtccactgtgctgaaaaactccgacggaagttatcgtatcttttccaagggcgcttctgagattatacttaaaaagtgttttaagatcctttcggcaaatggtgaggccaaggtcttccgaccccgagatcgcgacgatatagtaaaaaccgtcattgagcccatggcatctgagggactccgcaccatctgtttagcctttagggacttccccgcaggggagccagagccagagtgggacaacgaaaacgatatcgtgacgggactcacttgcatagctgtggtgggcatagaggatcccgtcagaccagaggtgcccgatgccataaagaaatgccaaagggctggaattacggtgagaatggtcactggcgacaatattaacaccgccagagctatcgctactaagtgtgggatcctgcatcctggggaagacttcctttgcctggagggtaaagactttaataggagaattaggaacgagaaaggcgaaattgaacaagaacgaatcgacaaaatatggccaaagctaagagtcctcgcccgtagcagcccaaccgacaagcacaccctggtgaagggaatcatcgactctacggtgagcgaccagcggcaagttgtcgccgtcacgggcgacggtacgaatgacggccctgctctcaagaaggctgatgttgggtttgccatggggatagcgggaaccgacgtcgccaaagaggcgtccgacattatcctgacagacgacaatttcacatctattgtcaaggctgttatgtgggggagaaacgtgtacgattcaatttccaagttcctgcagtttcagctgaccgtgaatgtggtggccgtgattgtggcatttaccggagcctgtataacccaggactcaccattgaaagccgttcagatgctctgggtgaacctcatcatggacactcttgcatccctggccctggctaccgagccgccaaccgagagccttctcctgcgcaagccatacggtaggaataagcccctcatcagtagaaccatgatgaaaaatatcctggggcacgccttctatcaactggtggttgtgtttactctgctctttgcaggagagaaatttttcgatattgacagtggacgtaatgctcccctgcacgctcctccttcggaacactacacgatcgtgttcaacacgtttgtccttatgcagttgtttaatgaaatcaacgcgagaaaaatccacggggaacgaaacgttttcgaaggcatctttaacaacgctatattttgtactatcgttctggggactttcgttgtgcagattataatcgtccaattcggtgggaaacccttcagctgttcagagctgagtatagaacaatggttgtggtcaattttccttggaatggggaccctgttatggggccagctcatctccaccattccaacaagccgcctcaaatttctaaaggaagccggtcacgggacacagaaggaagagattcctgaggaagaattagcagaagacgtggaagagatcgaccatgccgagcgggagctacgccgtggtcaaatattatggttcaggggtctgaaccgtattcaaacccagatccgggtggtaaacgctttcaggtcaagtctctatgaaggattagaaaagccggagagccgcagctccattcacaactttatgacacatcctgagttcaggattgaggacagtgagcctcacatcccgttgatcgatgacacggacgctgaggacgacgcacccactaaacgcaattcctcacccccaccatcccctaacaagaacaataacgcagtggattctggaattcatttgacaatcgaaatgaataaatctgccaccagttcatcaccaggcagtcctctacacagtctcgaaacaagcctatag

SEQ ID NO: 334283 - DNA, 3663 bp, Artificial Sequence
  derived and/or modified sequence
atgggagacatggctaacaattccgtagcgtacagcggtgtcaagaactcactgaaagaagctaatcatgacggtgactttggcataacgctggccgagctaagagccctgatggaactccgtagcaccgatgccctacgcaagatccaagaatcctatggtgatgtgtacggaatctgcaccaaactcaagacttctccgaatgagggtctgtccggcaatcccgcagatttagagagaagagaagctgtattcggaaagaacttcattccccctaagaagcctaagaccttcttacagttggtttgggaagcattgcaggatgtcaccttaattattcttgagattgcggctatcgtatctctgggactgtccttttatcagccacccgagggtgataacgctctttgcggggaggtcagcgtgggcgaagaggagggagaaggcgagactggctggatagagggagctgccatcctgctatctgtggtgtgtgtggtacttgtcacagcctttaatgattggagtaaagagaagcagtttagggggctgcaaagtaggatcgagcaggagcagaagttcaccgtcatcaggggaggccaagtgatccagatcccagtggcggatataaccgtaggcgatatcgctcaggtgaaatacggcgatctcctgcccgctgacgggattttgatccagggcaatgatctgaagattgacgagagcagcctgactggagagtcagatcacgtcaagaagagcctggacaaagatcccctcttgctttcagggacacacgtcatggaaggatcagggagaatggtggtgacggccgtgggtgtaaattcccagaccggcattattttcactttgctgggcgctggcggtgaagaagaagagaagaaggatgaaaagaagaaggaaaaaaagaataaaaaacaggacggcgctatagaaaacaggaacaaagcgaaggcgcaagatggcgctgctatggagatgcagcctctgaagtcggaggagggaggtgacggtgacgaaaaagacaagaaaaaggctaatctacccaaaaaggaaaaaagcgtgttgcaggggaaactgacaaaactggctgtgcaaattggcaaagccggactgcttatgagcgcaattacagtgatcattctcgtcctatacttcgttatagacacgttctgggtgcagaagcgtccatggcttgccgagtgcaccccgatatatatccagtatttcgtaaagttcttcatcattggggttaccgtgttggtggtcgctgttcctgaagggctgcctctggcagtaaccatcagccttgcatactctgtaaagaaaatgatgaaggataacaaccttgttagacacctggatgcctgtgagaccatggggaatgcaacggctatctgctctgacaaaacgggtacgctgacaatgaacagaatgacagtagtgcaggcatacattaacgagaaacactataaaaaggttcctgaaccggaggcaataccgcctaatattctgtcctatctggtgacaggtatttctgtaaattgcgcctatactagcaagattctcccccctgaaaaggaggggggtttacccaggcacgtagggaataagacagaatgcgcccttcttgggctgctccttgatctgaagcgtgactaccaggatgttagaaacgagatcccggaggaagcactctacaaggtgtacaccttcaactccgttcggaagtctatgagcaccgtcctgaaaaattcagatgggtcctacaggattttcagtaagggggcttcagagatcatcttaaaaaaatgcttcaagattctgtccgctaatggggaggctaaggtgtttaggcctagggaccgagatgacattgtcaagacagtaattgaaccgatggcctccgaagggcttaggacaatttgtcttgcattccgcgattttcctgcgggtgagccagagccggaatgggacaacgaaaatgatattgtgacaggcctgacttgcatcgctgtcgtggggattgaggaccctgtgcgccctgaggtcccagacgcgatcaagaagtgccagcgggcaggcatcactgtgcggatggtgacaggggacaacatcaacacggccagagcaatcgccacaaagtgtggaattttacatcccggagaagactttctgtgtctggaggggaaggattttaaccggaggattagaaacgagaaaggcgagattgaacaggagcggatcgacaagatctggcctaagctgagggttctggcgaggtcttccccaaccgacaaacacacattggtcaagggtataatcgactctactgtgtccgatcagcggcaggtggtagctgtcaccggtgacggcactaatgatggaccagctcttaagaaagcagacgttgggtttgctatggggatcgcaggaactgacgtggccaaggaggccagcgacatcatactgacggatgataatttcactagtattgtcaaggcagtgatgtgggggcgaaacgtctacgacagcatttctaagttccttcaatttcagttgactgtcaatgtggtggcggttattgtggcatttactggagcatgcatcacccaggattcccctcttaaagccgtccagatgctgtgggttaatctcattatggacacgctggcctctttggctcttgctactgaacccccaacagaaagcctgctgctgagaaaaccctatggccgtaataagccgctgatcagcagaactatgatgaagaatatcctcggtcatgctttctaccagctcgtcgtcgtctttaccctcctttttgcaggagagaaattttttgacattgactccggcagaaatgcacccttgcatgccccaccttccgaacattacactatcgtgtttaacacgttcgtgttgatgcagttatttaacgaaatcaatgccaggaagatacacggggaaaggaatgtgtttgaggggatcttcaacaatgccatcttctgcaccatcgtgctcggaaccttcgtggtgcaaattatcatcgtgcagttcggcggaaaacctttttcctgtagcgaactgtccatcgagcagtggctctggagtatctttctcggtatgggaaccctgctgtgggggcagctgatctcaactatcccaacaagtcgtttaaagtttctgaaggaagccggacacgggacgcagaaggaagaaattcctgaggaagagctggccgaagatgtggaggaaatcgatcacgcagaacgggaattgcgtagaggtcagatcctgtggttcaggggtctcaacagaatccagactcagatccgcgtggttaacgcgtttcggtcttccctttatgagggactggagaaaccagagtctaggtcttcgatacacaattttatgacccacccagaattccggatcgaggactcagagcctcatattccactgatagacgacaccgatgccgaagacgacgcaccaaccaagagaaacagctccccaccgcctagcccaaataagaataataatgctgttgactccggcattcatcttacaattgagatgaacaaaagtgccacctccagctctcccggtagtccactccattctctcgagacttctctgtag

SEQ ID NO: 334284 - DNA, 6777 bp, Artificial Sequence
  derived and/or modified sequence
ggccaaaggtcaagatacttctctgggaaatgttgctgctgatgctgctttacaaagtcatacaatgagtgtttggtttaagaaagattttcatacttaaaagattttcatcttggaaatacatcaagtgaaaattaaattcttttgggaaacattttccttctgatatattatacttgtaatgggcgacatggcaaacaactcagttgcttacagtggtgtgaaaaactctttgaaggaagctaatcatgatggagactttggaattacgctcgcagagctgcgggctctcatggagctcaggtccacagatgcattacgaaaaatacaggaaagctatggagatgtctatggaatttgcaccaaattgaaaacatctcccaatgaaggtttaagtggaaaccctgcagatttagaaagaagagaagcagtgtttggaaagaattttatacctcctaaaaagccaaaaacctttcttcaattagtatgggaagcattacaagatgtcactttaattatattagaaattgcagccatagtatcattgggcctttctttttatcagcctccagaaggggataatgcactttgtggagaagtttctgttggggaggaagaaggtgaaggtgaaactggttggattgaaggagctgcaatcctcttgtctgtagtgtgtgtggtgttagtaacagctttcaatgactggagtaaggaaaaacagtttagaggtttgcagagccgaattgaacaagaacagaagttcactgtcatcaggggtggtcaggtcattcagatacctgtagctgacattactgttggagatattgctcaagtgaaatatggtgatcttcttccagctgacggcatacttattcaaggcaacgatcttaaaattgatgaaagctcattgactggtgaatcagatcatgttaaaaagtctttagataaggatcccttacttctatcaggtactcatgtaatggaaggctctggaagaatggtagttacagctgtaggtgtaaattctcaaactggaattatctttaccttacttggagctggaggtgaagaggaagagaagaaagatgagaagaaaaaggaaaagaaaaataagaaacaagatggagctattgagaatcgcaacaaagcaaaagcccaggatggtgcagccatggaaatgcagccattgaagagtgaagaaggtggagatggtgatgaaaaagataaaaagaaagcaaatttgccaaaaaaggaaaaatctgttttacaagggaaacttacaaaactggctgttcagattggcaaagcaggtctgttgatgtctgccatcacagttatcattctagtattatattttgtcattgacaccttctgggttcagaaaagaccatggcttgctgagtgcacaccaatttatatacaatactttgtgaagttcttcattattggagttacagttttagtggtcgcagtgccagaaggtcttccacttgcagtcacgatctcactggcttattcagtcaaaaaaatgatgaaagataataacttagtaaggcatctggatgcttgtgaaaccatgggaaatgctacagctatttgttcagataaaacaggaactttgacaatgaacagaatgacagtcgttcaagcttacataaatgaaaaacattataaaaaggttcctgaaccagaagctattccaccaaatattttgtcctatcttgtaacaggaatttctgtgaattgtgcttatacatcaaaaatattgccaccagagaaagagggtggattacctcgtcacgttggtaataaaactgaatgtgccttgttgggacttcttttggatttaaaacgggattatcaggatgttagaaatgaaataccagaagaagcactgtacaaagtctacaccttcaattctgttaggaagtccatgagtactgtcctgaaaaattcagatggaagttatcgaatattcagcaagggtgcatctgagataattctgaaaaagtgtttcaaaatcttgagtgctaatggtgaggcaaaagtattcagaccaagggaccgtgatgatattgtaaaaactgtgattgaaccgatggcatcagaaggcttgagaaccatatgtcttgcattcagagattttccagcaggagaaccagaaccagagtgggataatgaaaatgatattgtcaccggccttacatgcattgctgttgtggggattgaagatcctgtgagacctgaggtgccagatgcaattaaaaagtgtcagagggctggaattactgtgcggatggtcactggtgataatattaatactgctcgggccattgctaccaaatgtggtattttacatcctggggaagattttctgtgcctagaaggtaaagattttaacagaagaatacgaaatgaaaaaggagagattgagcaagagaggatagacaagatttggccaaaacttcgagtacttgcaagatcatctcctactgataagcatacactggttaaaggtataattgacagcactgtctcagaccaacgccaggttgtagctgtaactggtgatggtacaaatgatggcccagcactaaagaaagcagatgttggatttgcaatgggtattgctggaactgatgtagctaaagaagcatccgatattattctcacagatgacaactttacaagcattgttaaagcagttatgtggggacgaaatgtctatgacagcatctcaaaattccttcagttccaacttactgttaatgtagtagcagtgattgttgcttttacgggcgcctgcattactcaagactcaccgcttaaggctgtgcagatgctgtgggtaaacctcataatggatacactcgcttccctggctctggcaacggaaccacccactgagtctctcttgcttcggaaaccttatggtagaaataagcctctcatctcacgtacaatgatgaagaatattttgggtcatgcattctatcaacttgtagtagtctttacactcttatttgctggagaaaagttttttgacattgatagtggaagaaatgctcctttgcatgctcctccttcagaacattatactattgtttttaatacctttgtgctgatgcaacttttcaacgaaataaatgcccggaaaattcatggtgaaagaaatgtattcgaaggaatctttaacaatgccatcttctgcacaattgttttaggcacttttgtggtacagataataattgtgcagtttggtggaaaacctttcagttgttcagaactttcaatagaacagtggctatggtcaatattcctaggaatgggaacattactctggggccagcttatttcaacaattccaactagccgtttaaaattcctcaaagaagctggtcatggaacacaaaaggaagaaatacctgaggaggaattagcagaggatgttgaagagattgatcacgctgaaagggagttgcggcgtggccaaatcttgtggtttagaggtctgaacagaatccaaacacagattcgagtggtgaatgcatttcgtagttctttatatgaagggttagaaaaaccggaatcaagaagttcgattcacaactttatgacacatcctgagtttaggatagaagattcagagcctcatatcccccttattgatgacactgatgccgaagatgatgctcctacaaaacgtaactccagtcctccaccctctcccaacaaaaataacaatgctgttgacagtggaattcaccttacaatagaaatgaacaagtctgctacctcttcatccccaggaagcccactacatagtttggaaacatcactctgattgtaagctgaatgttaacacactagctgcattgtaaagaaacaaattgaaactgggtcttttcacatattgtgatggacaagctagtattcttgtctttggacttcaacagaagacacacttgtacgaatgtagatttatttttttaaaaaaaaaaaagcaaagctttctgccagactgagggtgctttttggggggtgggagaaatgaactgacagataaacagtaactcagcgtaagtgacctgtggatcatcagtagtacccaagcatggtcctgaacagtgtattagcagagctttagtttatctcagtcctggatgggagagagagggaggagtaaaactgggcaagacaaagagccctggatcgttgaattgatagtttaatttctgctgttggctgttaataatttggattatttatgtttataaatgatacagatctgtttacaaggtttgtagatactttttttgttcctgttcatagatgggaagcttccttataactgatgcagagaaaaattagtccttcaaatactgctgtattttcaggaaaaaaaaaaaaaggggtgtttctattgaaactgtactaaatttttgcctacaatttaccttgttaaatattgtagataaattgctaatactaatagccaaatagataacactaatgctttgtttaaaaaaacgaaaaaaacaaaacaaaacaaaaaaacatgagcagtggtgttctaatgaagttatgacatctgtcctaattagtttcttaaatacatttactacttaatggttttgaagcaactgtttaatttttaaaatttttgaaaacttgctaataaccttttgttcagaatttagtagattgtttaatgcaggacatcaactacataatgaaagatgcttgaaatgcttttgttatttcaggcaaatcaaattaaatcagactatcaaactacaagagaaccttagtcttttttgtttttgtctaaacatgttagtttagtgatgtcttggtgaactgtgagtgaactgtattgatttttctaatctttagagaccttcacacagcatgagggctgttggcattttgaaaaaggttaataagtagaagcatacatgttttccttttgtttttgaaacttgtttgtaaacataaataaatatgcccttttattaaataaattcatggcaatgtttttttaaaagacatttcagcttctttactcagttctgcatatacagtgcatcagtctgttctctttgaccacaattggaatacatttcaagatggtaacagccccatgaagtaccgctttaattccttgctggtaatctaatagaatcagattaagaaaattaacacaattttaccatttgacatactcttcattgaatttagtttgtctaaaatagtctcacaggtaaaaaacataacaacaatgaccaccattgtctttgatacatttattttaattcttaagtggccaaataacagattaggtaaaatgagattacatgaaaaggttctaaaatgatatatttagatgcaataattaaccatatgctagaatgcccacctctaagccaattggattctttagctctctttttctttccttcatctaccttcttctcttttttgcctctgtctttaccctttagaaactggcatgtgttagggcccagatttcaccagatacacaatcctcaggctgacataaagtttacgaggactgctactataactgagagtgctgaccaagcaaagaaacatttagttgatggtgcttgatatttttggtgggtgggggaaatctttttctcaccatcaaatctttgcagtaatcctctgcaggtcttagaaacacattggctctgtcagcatttgtaattgtacatttattcatcaggtatttatagtgaatcatactgtaaaaaagaggtagcatgatatgctggaaagcatattagactaggagtcaagacctggtttctagtcttggttttgccattaatgtgctgcatgatcttgggaaaatcatttaccctaaataagggtggtggactatcttgaagaaccctttcaactctaaaaattgaccctatcaactggagagcccacaaggcatagggaatagagaaaagggaaatgttttcagttttcttttttattttggttatgcttaaatatgaatgtaattaccaaaagatttagaagtgcatgtgctttggaggatttgtattgagcttttacagtattcatttttcaactcaaggcaatggctttctacaccaactctaatccataaacgggtcttatgacatctatgaagtagtagcaagacatgcttagtgtgtatttctctctttgagacactgtaatttctaccagaaatttccagagcattatgtaggtagaaaaaaatgcaagcaagctgttaaagatcttggatcccattatatagtatgtatagctgaaatctgtaattcaatcactttttctcttttatcctctaaccaaaaaattgtttaattttgcatcccaaatgtttttaatctttgtatattttttaaaaatccttttctcctcatcattgccttttttgtggttgtaaatagacttacttgcactttgaagatgagttactccttgtcatcttacaaatatgtgatatggtaattttcataacagatgtcagttttgaaccaagaattggtgatttgtttataagaaaaaaactggcttcatttctgtgaaattgctctttgaaaatttctttttacacgtgtaagccaactgagataccgtgatggtgttgatttctttcaatgatgcttaccatctattttagccactgagccttttattatttgtctatttgtaaagtttatttgtcttaactcatttaataaatatactgtttatctgtttctg

SEQ ID NO: 334285 - DNA, 3127 bp, Artificial Sequence
  derived and/or modified sequence
tttcctaaatgttgaggctgttaaaaacaatattactgaagtttgaaatttggtggtagcaaggagatctatcagtatttttaaaaacaaactatgtttttggttataggtactcatgtaatggaaggctctggaagaatggtagttacagctgtaggtgtaaattctcaaactggaattatctttaccttacttggagctggaggtgaagaggaagagaagaaagatgagaagaaaaaggaaaagaaaaataagaaacaagatggagctattgagaatcgcaacaaagcaaaagcccaggatggtgcagccatggaaatgcagccattgaagagtgaagaaggtggagatggtgatgaaaaagataaaaagaaagcaaatttgccaaaaaaggaaaaatctgttttacaagggaaacttacaaaactggctgttcagattggcaaagcaggtctgttgatgtctgccatcacagttatcattctagtattatattttgtcattgacaccttctgggttcagaaaagaccatggcttgctgagtgcacaccaatttatatacaatactttgtgaagttcttcattattggagttacagttttagtggtcgcagtgccagaaggtcttccacttgcagtcacgatctcactggcttattcagtcaaaaaaatgatgaaagataataacttagtaaggcatctggatgcttgtgaaaccatgggaaatgctacagctatttgttcagataaaacaggaactttgacaatgaacagaatgacagtcgttcaagcttacataaatgaaaaacattataaaaaggttcctgaaccagaagctattccaccaaatattttgtcctatcttgtaacaggaatttctgtgaattgtgcttatacatcaaaaatattgccaccagagaaagagggtggattacctcgtcacgttggtaataaaactgaatgtgccttgttgggacttcttttggatttaaaacgggattatcaggatgttagaaatgaaataccagaagaagcactgtacaaagtctacaccttcaattctgttaggaagtccatgagtactgtcctgaaaaattcagatggaagttatcgaatattcagcaagggtgcatctgagataattctgaaaaagtgtttcaaaatcttgagtgctaatggtgaggcaaaagtattcagaccaagggaccgtgatgatattgtaaaaactgtgattgaaccgatggcatcagaaggcttgagaaccatatgtcttgcattcagagattttccagcaggagaaccagaaccagagtgggataatgaaaatgatattgtcaccggccttacatgcattgctgttgtggggattgaagatcctgtgagacctgaggtgccagatgcaattaaaaagtgtcagagggctggaattactgtgcggatggtcactggtgataatattaatactgctcgggccattgctaccaaatgtggtattttacatcctggggaagattttctgtgcctagaaggtaaagattttaacagaagaatacgaaatgaaaaaggagagattgagcaagagaggatagacaagatttggccaaaacttcgagtacttgcaagatcatctcctactgataagcatacactggttaaaggtataattgacagcactgtctcagaccaacgccaggttgtagctgtaactggtgatggtacaaatgatggcccagcactaaagaaagcagatgttggatttgcaatgggtattgctggaactgatgtagctaaagaagcatccgatattattctcacagatgacaactttacaagcattgttaaagcagttatgtggggacgaaatgtctatgacagcatctcaaaattccttcagttccaacttactgttaatgtagtagcagtgattgttgcttttacgggcgcctgcattactcaagactcaccgcttaaggctgtgcagatgctgtgggtaaacctcataatggatacactcgcttccctggctctggcaacggaaccacccactgagtctctcttgcttcggaaaccttatggtagaaataagcctctcatctcacgtacaatgatgaagaatattttgggtcatgcattctatcaacttgtagtagtctttacactcttatttgctggagaaaagttttttgacattgatagtggaagaaatgctcctttgcatgctcctccttcagaacattatactattgtttttaatacctttgtgctgatgcaacttttcaacgaaataaatgcccggaaaattcatggtgaaagaaatgtattcgaaggaatctttaacaatgccatcttctgcacaattgttttaggcacttttgtggtacagataataattgtgcagtttggtggaaaacctttcagttgttcagaactttcaatagaacagtggctatggtcaatattcctaggaatgggaacattactctggggccagcttatttcaacaattccaactagccgtttaaaattcctcaaagaagctggtcatggaacacaaaaggaagaaatacctgaggaggaattagcagaggatgttgaagagattgatcacgctgaaagggagttgcggcgtggccaaatcttgtggtttagaggtctgaacagaatccaaacacagattcgagtggtgaatgcatttcgtagttctttatatgaagggttagaaaaaccggaatcaagaagttcgattcacaactttatgacacatcctgagtttaggatagaagattcagagcctcatatcccccttattgatgacactgatgccgaagatgatgctcctacaaaacgtaactccagtcctccaccctctcccaacaaaaataacaatgctgttgacagtggaattcaccttacaatagaaatgaacaagtctgctacctcttcatccccaggaagcccactacatagtttggaaacatcactctgattgtaagctgaatgttaacacactagctgcattgtaaagaaacaaattgaaactgggtcttttcacatattgtgatggacaagctagtattcttgtctttggacttcaacagaagacacacttgtacgaatgtagatttatt

SEQ ID NO: 334286 - DNA, 7032 bp, Artificial Sequence
  derived and/or modified sequence
agcgtgagtagggagccccggctggtggacgccgagcctctcggctccttggccgccccatccccgaggtgcagctgcacctccgcgtggcgccccgagccctgcgagccggctgcggacgcgctgaggacggagcccccatcctctgcgtttcccgctgccccttaacgccccgcgaccctcccgcagcctgcctttccttccccctcggaaaatggttcccactgccgggcgagatgtgtatatctcatgattgatatggagaaactagtcatgggccaaaggtcaagatacttctctgggaaatgttgctgctgatgctgctttacaaagtcatacaatgagtgtttggtttaagaaagattttcatacttaaaagattttcatcttggaaatacatcaagtgaaaattaaattcttttgggaaacattttccttctgatatattatacttgtaatgggcgacatggcaaacaactcagttgcttacagtggtgtgaaaaactctttgaaggaagctaatcatgatggagactttggaattacgctcgcagagctgcgggctctcatggagctcaggtccacagatgcattacgaaaaatacaggaaagctatggagatgtctatggaatttgcaccaaattgaaaacatctcccaatgaaggtttaagtggaaaccctgcagatttagaaagaagagaagcagtgtttggaaagaattttatacctcctaaaaagccaaaaacctttcttcaattagtatgggaagcattacaagatgtcactttaattatattagaaattgcagccatagtatcattgggcctttctttttatcagcctccagaaggggataatgcactttgtggagaagtttctgttggggaggaagaaggtgaaggtgaaactggttggattgaaggagctgcaatcctcttgtctgtagtgtgtgtggtgttagtaacagctttcaatgactggagtaaggaaaaacagtttagaggtttgcagagccgaattgaacaagaacagaagttcactgtcatcaggggtggtcaggtcattcagatacctgtagctgacattactgttggagatattgctcaagtgaaatatggtgatcttcttccagctgacggcatacttattcaaggcaacgatcttaaaattgatgaaagctcattgactggtgaatcagatcatgttaaaaagtctttagataaggatcccttacttctatcaggtactcatgtaatggaaggctctggaagaatggtagttacagctgtaggtgtaaattctcaaactggaattatctttaccttacttggagctggaggtgaagaggaagagaagaaagatgagaagaaaaaggaaaagaaaaataagaaacaagatggagctattgagaatcgcaacaaagcaaaagcccaggatggtgcagccatggaaatgcagccattgaagagtgaagaaggtggagatggtgatgaaaaagataaaaagaaagcaaatttgccaaaaaaggaaaaatctgttttacaagggaaacttacaaaactggctgttcagattggcaaagcaggtctgttgatgtctgccatcacagttatcattctagtattatattttgtcattgacaccttctgggttcagaaaagaccatggcttgctgagtgcacaccaatttatatacaatactttgtgaagttcttcattattggagttacagttttagtggtcgcagtgccagaaggtcttccacttgcagtcacgatctcactggcttattcagtcaaaaaaatgatgaaagataataacttagtaaggcatctggatgcttgtgaaaccatgggaaatgctacagctatttgttcagataaaacaggaactttgacaatgaacagaatgacagtcgttcaagcttacataaatgaaaaacattataaaaaggttcctgaaccagaagctattccaccaaatattttgtcctatcttgtaacaggaatttctgtgaattgtgcttatacatcaaaaatattgccaccagagaaagagggtggattacctcgtcacgttggtaataaaactgaatgtgccttgttgggacttcttttggatttaaaacgggattatcaggatgttagaaatgaaataccagaagaagcactgtacaaagtctacaccttcaattctgttaggaagtccatgagtactgtcctgaaaaattcagatggaagttatcgaatattcagcaagggtgcatctgagataattctgaaaaagtgtttcaaaatcttgagtgctaatggtgaggcaaaagtattcagaccaagggaccgtgatgatattgtaaaaactgtgattgaaccgatggcatcagaaggcttgagaaccatatgtcttgcattcagagattttccagcaggagaaccagaaccagagtgggataatgaaaatgatattgtcaccggccttacatgcattgctgttgtggggattgaagatcctgtgagacctgaggtgccagatgcaattaaaaagtgtcagagggctggaattactgtgcggatggtcactggtgataatattaatactgctcgggccattgctaccaaatgtggtattttacatcctggggaagattttctgtgcctagaaggtaaagattttaacagaagaatacgaaatgaaaaaggagagattgagcaagagaggatagacaagatttggccaaaacttcgagtacttgcaagatcatctcctactgataagcatacactggttaaaggtataattgacagcactgtctcagaccaacgccaggttgtagctgtaactggtgatggtacaaatgatggcccagcactaaagaaagcagatgttggatttgcaatgggtattgctggaactgatgtagctaaagaagcatccgatattattctcacagatgacaactttacaagcattgttaaagcagttatgtggggacgaaatgtctatgacagcatctcaaaattccttcagttccaacttactgttaatgtagtagcagtgattgttgcttttacgggcgcctgcattactcaagactcaccgcttaaggctgtgcagatgctgtgggtaaacctcataatggatacactcgcttccctggctctggcaacggaaccacccactgagtctctcttgcttcggaaaccttatggtagaaataagcctctcatctcacgtacaatgatgaagaatattttgggtcatgcattctatcaacttgtagtagtctttacactcttatttgctggagaaaagttttttgacattgatagtggaagaaatgctcctttgcatgctcctccttcagaacattatactattgtttttaatacctttgtgctgatgcaacttttcaacgaaataaatgcccggaaaattcatggtgaaagaaatgtattcgaaggaatctttaacaatgccatcttctgcacaattgttttaggcacttttgtggtacagataataattgtgcagtttggtggaaaacctttcagttgttcagaactttcaatagaacagtggctatggtcaatattcctaggaatgggaacattactctggggccagcttatttcaacaattccaactagccgtttaaaattcctcaaagaagctggtcatggaacacaaaaggaagaaatacctgaggaggaattagcagaggatgttgaagagattgatcacgctgaaagggagttgcggcgtggccaaatcttgtggtttagaggtctgaacagaatccaaacacagattcgagtggtgaatgcatttcgtagttctttatatgaagggttagaaaaaccggaatcaagaagttcgattcacaactttatgacacatcctgagtttaggatagaagattcagagcctcatatcccccttattgatgacactgatgccgaagatgatgctcctacaaaacgtaactccagtcctccaccctctcccaacaaaaataacaatgctgttgacagtggaattcaccttacaatagaaatgaacaagtctgctacctcttcatccccaggaagcccactacatagtttggaaacatcactctgattgtaagctgaatgttaacacactagctgcattgtaaagaaacaaattgaaactgggtcttttcacatattgtgatggacaagctagtattcttgtctttggacttcaacagaagacacacttgtacgaatgtagatttatttttttaaaaaaaaaaaagcaaagctttctgccagactgagggtgctttttggggggtgggagaaatgaactgacagataaacagtaactcagcgtaagtgacctgtggatcatcagtagtacccaagcatggtcctgaacagtgtattagcagagctttagtttatctcagtcctggatgggagagagagggaggagtaaaactgggcaagacaaagagccctggatcgttgaattgatagtttaatttctgctgttggctgttaataatttggattatttatgtttataaatgatacagatctgtttacaaggtttgtagatactttttttgttcctgttcatagatgggaagcttccttataactgatgcagagaaaaattagtccttcaaatactgctgtattttcaggaaaaaaaaaaaaaggggtgtttctattgaaactgtactaaatttttgcctacaatttaccttgttaaatattgtagataaattgctaatactaatagccaaatagataacactaatgctttgtttaaaaaaacgaaaaaaacaaaacaaaacaaaaaaacatgagcagtggtgttctaatgaagttatgacatctgtcctaattagtttcttaaatacatttactacttaatggttttgaagcaactgtttaatttttaaaatttttgaaaacttgctaataaccttttgttcagaatttagtagattgtttaatgcaggacatcaactacataatgaaagatgcttgaaatgcttttgttatttcaggcaaatcaaattaaatcagactatcaaactacaagagaaccttagtcttttttgtttttgtctaaacatgttagtttagtgatgtcttggtgaactgtgagtgaactgtattgatttttctaatctttagagaccttcacacagcatgagggctgttggcattttgaaaaaggttaataagtagaagcatacatgttttccttttgtttttgaaacttgtttgtaaacataaataaatatgcccttttattaaataaattcatggcaatgtttttttaaaagacatttcagcttctttactcagttctgcatatacagtgcatcagtctgttctctttgaccacaattggaatacatttcaagatggtaacagccccatgaagtaccgctttaattccttgctggtaatctaatagaatcagattaagaaaattaacacaattttaccatttgacatactcttcattgaatttagtttgtctaaaatagtctcacaggtaaaaaacataacaacaatgaccaccattgtctttgatacatttattttaattcttaagtggccaaataacagattaggtaaaatgagattacatgaaaaggttctaaaatgatatatttagatgcaataattaaccatatgctagaatgcccacctctaagccaattggattctttagctctctttttctttccttcatctaccttcttctcttttttgcctctgtctttaccctttagaaactggcatgtgttagggcccagatttcaccagatacacaatcctcaggctgacataaagtttacgaggactgctactataactgagagtgctgaccaagcaaagaaacatttagttgatggtgcttgatatttttggtgggtgggggaaatctttttctcaccatcaaatctttgcagtaatcctctgcaggtcttagaaacacattggctctgtcagcatttgtaattgtacatttattcatcaggtatttatagtgaatcatactgtaaaaaagaggtagcatgatatgctggaaagcatattagactaggagtcaagacctggtttctagtcttggttttgccattaatgtgctgcatgatcttgggaaaatcatttaccctaaataagggtggtggactatcttgaagaaccctttcaactctaaaaattgaccctatcaactggagagcccacaaggcatagggaatagagaaaagggaaatgttttcagttttcttttttattttggttatgcttaaatatgaatgtaattaccaaaagatttagaagtgcatgtgctttggaggatttgtattgagcttttacagtattcatttttcaactcaaggcaatggctttctacaccaactctaatccataaacgggtcttatgacatctatgaagtagtagcaagacatgcttagtgtgtatttctctctttgagacactgtaatttctaccagaaatttccagagcattatgtaggtagaaaaaaatgcaagcaagctgttaaagatcttggatcccattatatagtatgtatagctgaaatctgtaattcaatcactttttctcttttatcctctaaccaaaaaattgtttaattttgcatcccaaatgtttttaatctttgtatattttttaaaaatccttttctcctcatcattgccttttttgtggttgtaaatagacttacttgcactttgaagatgagttactccttgtcatcttacaaatatgtgatatggtaattttcataacagatgtcagttttgaaccaagaattggtgatttgtttataagaaaaaaactggcttcatttctgtgaaattgctctttgaaaatttctttttacacgtgtaagccaactgagataccgtgatggtgttgatttctttcaatgatgcttaccatctattttagccactgagccttttattatttgtctatttgtaaagtttatttgtcttaactcatttaataaa

SEQ ID NO: 334287 - DNA, 3663 bp, Artificial Sequence
  derived and/or modified sequence
atgggcgacatggccaacaacagcgtggcctacagcggcgtgaagaacagcctgaaggaggccaaccacgacggcgacttcggcatcaccctggccgagctgagagccctgatggagctgagaagcaccgacgccctgagaaagatccaggagagctacggcgacgtgtacggcatctgcaccaagctgaagaccagccccaacgagggcctgagcggcaaccccgccgacctggagagaagagaggccgtgttcggcaagaacttcatcccccccaagaagcccaagaccttcctgcagctggtgtgggaggccctgcaggacgtgaccctgatcatcctggagatcgccgccatcgtgagcctgggcctgagcttctaccagccccccgagggcgacaacgccctgtgcggcgaggtgagcgtgggcgaggaggagggcgagggcgagaccggctggatcgagggcgccgccatcctgctgagcgtggtgtgcgtggtgctggtgaccgccttcaacgactggagcaaggagaagcagttcagaggcctgcagagcagaatcgagcaggagcagaagttcaccgtgatcagaggcggccaggtgatccagatccccgtggccgacatcaccgtgggcgacatcgcccaggtgaagtacggcgacctgctgcccgccgacggcatcctgatccagggcaacgacctgaagatcgacgagagcagcctgaccggcgagagcgaccacgtgaagaagagcctggacaaggaccccctgctgctgagcggcacccacgtgatggagggcagcggcagaatggtggtgaccgccgtgggcgtgaacagccagaccggcatcatcttcaccctgctgggcgccggcggcgaggaggaggagaagaaggacgagaagaagaaggagaagaagaacaagaagcaggacggcgccatcgagaacagaaacaaggccaaggcccaggacggcgccgccatggagatgcagcccctgaagagcgaggagggcggcgacggcgacgagaaggacaagaagaaggccaacctgcccaagaaggagaagagcgtgctgcagggcaagctgaccaagctggccgtgcagatcggcaaggccggcctgctgatgagcgccatcaccgtgatcatcctggtgctgtacttcgtgatcgacaccttctgggtgcagaagagaccctggctggccgagtgcacccccatctacatccagtacttcgtgaagttcttcatcatcggcgtgaccgtgctggtggtggccgtgcccgagggcctgcccctggccgtgaccatcagcctggcctacagcgtgaagaagatgatgaaggacaacaacctggtgagacacctggacgcctgcgagaccatgggcaacgccaccgccatctgcagcgacaagaccggcaccctgaccatgaacagaatgaccgtggtgcaggcctacatcaacgagaagcactacaagaaggtgcccgagcccgaggccatcccccccaacatcctgagctacctggtgaccggcatcagcgtgaactgcgcctacaccagcaagatcctgccccccgagaaggagggcggcctgcccagacacgtgggcaacaagaccgagtgcgccctgctgggcctgctgctggacctgaagagagactaccaggacgtgagaaacgagatccccgaggaggccctgtacaaggtgtacaccttcaacagcgtgagaaagagcatgagcaccgtgctgaagaacagcgacggcagctacagaatcttcagcaagggcgccagcgagatcatcctgaagaagtgcttcaagatcctgagcgccaacggcgaggccaaggtgttcagacccagagacagagacgacatcgtgaagaccgtgatcgagcccatggccagcgagggcctgagaaccatctgcctggccttcagagacttccccgccggcgagcccgagcccgagtgggacaacgagaacgacatcgtgaccggcctgacctgcatcgccgtggtgggcatcgaggaccccgtgagacccgaggtgcccgacgccatcaagaagtgccagagagccggcatcaccgtgagaatggtgaccggcgacaacatcaacaccgccagagccatcgccaccaagtgcggcatcctgcaccccggcgaggacttcctgtgcctggagggcaaggacttcaacagaagaatcagaaacgagaagggcgagatcgagcaggagagaatcgacaagatctggcccaagctgagagtgctggccagaagcagccccaccgacaagcacaccctggtgaagggcatcatcgacagcaccgtgagcgaccagagacaggtggtggccgtgaccggcgacggcaccaacgacggccccgccctgaagaaggccgacgtgggcttcgccatgggcatcgccggcaccgacgtggccaaggaggccagcgacatcatcctgaccgacgacaacttcaccagcatcgtgaaggccgtgatgtggggcagaaacgtgtacgacagcatcagcaagttcctgcagttccagctgaccgtgaacgtggtggccgtgatcgtggccttcaccggcgcctgcatcacccaggacagccccctgaaggccgtgcagatgctgtgggtgaacctgatcatggacaccctggccagcctggccctggccaccgagccccccaccgagagcctgctgctgagaaagccctacggcagaaacaagcccctgatcagcagaaccatgatgaagaacatcctgggccacgccttctaccagctggtggtggtgttcaccctgctgttcgccggcgagaagttcttcgacatcgacagcggcagaaacgcccccctgcacgccccccccagcgagcactacaccatcgtgttcaacaccttcgtgctgatgcagctgttcaacgagatcaacgccagaaagatccacggcgagagaaacgtgttcgagggcatcttcaacaacgccatcttctgcaccatcgtgctgggcaccttcgtggtgcagatcatcatcgtgcagttcggcggcaagcccttcagctgcagcgagctgagcatcgagcagtggctgtggagcatcttcctgggcatgggcaccctgctgtggggccagctgatcagcaccatccccaccagcagactgaagttcctgaaggaggccggccacggcacccagaaggaggagatccccgaggaggagctggccgaggacgtggaggagatcgaccacgccgagagagagctgagaagaggccagatcctgtggttcagaggcctgaacagaatccagacccagatcagagtggtgaacgccttcagaagcagcctgtacgagggcctggagaagcccgagagcagaagcagcatccacaacttcatgacccaccccgagttcagaatcgaggacagcgagccccacatccccctgatcgacgacaccgacgccgaggacgacgcccccaccaagagaaacagcagccccccccccagccccaacaagaacaacaacgccgtggacagcggcatccacctgaccatcgagatgaacaagagcgccaccagcagcagccccggcagccccctgcacagcctggagaccagcctgtag

SEQ ID NO: 334288 - DNA, 2892 bp, Artificial Sequence
  derived and/or modified sequence
atgttcctggtgatcggcacccacgtgatggagggcagcggcagaatggtggtgaccgccgtgggcgtgaacagccagaccggcatcatcttcaccctgctgggcgccggcggcgaggaggaggagaagaaggacgagaagaagaaggagaagaagaacaagaagcaggacggcgccatcgagaacagaaacaaggccaaggcccaggacggcgccgccatggagatgcagcccctgaagagcgaggagggcggcgacggcgacgagaaggacaagaagaaggccaacctgcccaagaaggagaagagcgtgctgcagggcaagctgaccaagctggccgtgcagatcggcaaggccggcctgctgatgagcgccatcaccgtgatcatcctggtgctgtacttcgtgatcgacaccttctgggtgcagaagagaccctggctggccgagtgcacccccatctacatccagtacttcgtgaagttcttcatcatcggcgtgaccgtgctggtggtggccgtgcccgagggcctgcccctggccgtgaccatcagcctggcctacagcgtgaagaagatgatgaaggacaacaacctggtgagacacctggacgcctgcgagaccatgggcaacgccaccgccatctgcagcgacaagaccggcaccctgaccatgaacagaatgaccgtggtgcaggcctacatcaacgagaagcactacaagaaggtgcccgagcccgaggccatcccccccaacatcctgagctacctggtgaccggcatcagcgtgaactgcgcctacaccagcaagatcctgccccccgagaaggagggcggcctgcccagacacgtgggcaacaagaccgagtgcgccctgctgggcctgctgctggacctgaagagagactaccaggacgtgagaaacgagatccccgaggaggccctgtacaaggtgtacaccttcaacagcgtgagaaagagcatgagcaccgtgctgaagaacagcgacggcagctacagaatcttcagcaagggcgccagcgagatcatcctgaagaagtgcttcaagatcctgagcgccaacggcgaggccaaggtgttcagacccagagacagagacgacatcgtgaagaccgtgatcgagcccatggccagcgagggcctgagaaccatctgcctggccttcagagacttccccgccggcgagcccgagcccgagtgggacaacgagaacgacatcgtgaccggcctgacctgcatcgccgtggtgggcatcgaggaccccgtgagacccgaggtgcccgacgccatcaagaagtgccagagagccggcatcaccgtgagaatggtgaccggcgacaacatcaacaccgccagagccatcgccaccaagtgcggcatcctgcaccccggcgaggacttcctgtgcctggagggcaaggacttcaacagaagaatcagaaacgagaagggcgagatcgagcaggagagaatcgacaagatctggcccaagctgagagtgctggccagaagcagccccaccgacaagcacaccctggtgaagggcatcatcgacagcaccgtgagcgaccagagacaggtggtggccgtgaccggcgacggcaccaacgacggccccgccctgaagaaggccgacgtgggcttcgccatgggcatcgccggcaccgacgtggccaaggaggccagcgacatcatcctgaccgacgacaacttcaccagcatcgtgaaggccgtgatgtggggcagaaacgtgtacgacagcatcagcaagttcctgcagttccagctgaccgtgaacgtggtggccgtgatcgtggccttcaccggcgcctgcatcacccaggacagccccctgaaggccgtgcagatgctgtgggtgaacctgatcatggacaccctggccagcctggccctggccaccgagccccccaccgagagcctgctgctgagaaagccctacggcagaaacaagcccctgatcagcagaaccatgatgaagaacatcctgggccacgccttctaccagctggtggtggtgttcaccctgctgttcgccggcgagaagttcttcgacatcgacagcggcagaaacgcccccctgcacgccccccccagcgagcactacaccatcgtgttcaacaccttcgtgctgatgcagctgttcaacgagatcaacgccagaaagatccacggcgagagaaacgtgttcgagggcatcttcaacaacgccatcttctgcaccatcgtgctgggcaccttcgtggtgcagatcatcatcgtgcagttcggcggcaagcccttcagctgcagcgagctgagcatcgagcagtggctgtggagcatcttcctgggcatgggcaccctgctgtggggccagctgatcagcaccatccccaccagcagactgaagttcctgaaggaggccggccacggcacccagaaggaggagatccccgaggaggagctggccgaggacgtggaggagatcgaccacgccgagagagagctgagaagaggccagatcctgtggttcagaggcctgaacagaatccagacccagatcagagtggtgaacgccttcagaagcagcctgtacgagggcctggagaagcccgagagcagaagcagcatccacaacttcatgacccaccccgagttcagaatcgaggacagcgagccccacatccccctgatcgacgacaccgacgccgaggacgacgcccccaccaagagaaacagcagccccccccccagccccaacaagaacaacaacgccgtggacagcggcatccacctgaccatcgagatgaacaagagcgccaccagcagcagccccggcagccccctgcacagcctggagaccagcctgtag

SEQ ID NO: 334289 - protein, 1184 aa, Artificial Sequence
  derived and/or modified sequence
MGDMANNSVAYSGVKNSLKEANHDGDFGITLAELRALMELRSTDALRKIQESYGDVYGICTKLKTSPNEGLSGNPADLERREAVFGKNFIPPKKPKTFLQLVWEALQDVTLIILEIAAIVSLGLSFYQPPEGDNALCGEVSVGEEEGEGETGWIEGAAILLSVVCVVLVTAFNDWSKEKQFRGLQSRIEQEQKFTVIRGGQVIQIPVADITVGDIAQVKYGDLLPADGILIQGNDLKIDESSLTGESDHVKKSLDKDPLLLSGTHVMEGSGRMVVTAVGVNSQTGIIFTLLGAGGEEEEKKDEKKKEKKNKKQDGAIENRNKAKAQDGAAMEMQPLKSEEGGDGDEKDKKKANLPKKEKSVLQGKLTKLAVQIGKAGLLMSAITVIILVLYFVIDTFWVQKRPWLAECTPIYIQYFVKFFIIGVTVLVVAVPEGLPLAVTISLAYSVKKMMKDNNLVRHLDACETMGNATAICSDKTGTLTMNRMTVVQAYINEKHYKKVPEPEAIPPNILSYLVTGISVNCAYTSKILPPEKEGGLPRHVGNKTECALLGLLLDLKRDYQDVRNEIPEEALYKVYTFNSVRKSMSTVLKNSDGSYRIFSKGASEIILKKCFKILSANGEAKVFRPRDRDDIVKTVIEPMASEGLRTICLAFRDFPAGEPEPEWDNENDIVTGLTCIAVVGIEDPVRPEVPDAIKKCQRAGITVRMVTGDNINTARAIATKCGILHPGEDFLCLEGKDFNRRIRNEKGEIEQERIDKIWPKLRVLARSSPTDKHTLVKGIIDSTVSDQRQVVAVTGDGTNDGPALKKADVGFAMGIAGTDVAKEASDIILTDDNFTSIVKAVMWGRNVYDSISKFLQFQLTVNVVAVIVAFTGACITQDSPLKAVQMLWVNLIMDTLASLALATEPPTESLLLRKPYGRNKPLISRTMMKNILGHAFYQLVVVFTLLFAGEKFFDIDSGRNAPLHAPPSEHYTIVFNTFVLMQLFNEINARKIHGERNVFEGIFNNAIFCTIVLGTFVVQLISTIPTSRLKFLKEAGHGTQKEEIPEEELAEDVEEIDHAERELRRGQILWFRGLNRIQTQIRVVNAFRSSLYEGLEKPESRSSIHNFMTHPEFRIEDSEPHIPLIDDTDAEDDAPTKRNSSPPPSPNKNNNAVDSGIHLTIEMNKSATSSSPGSPLHSLETSL

SEQ ID NO: 334290 - protein, 101 aa, Artificial Sequence
  derived and/or modified sequence
MGDMANNSVAYSGVKNSLKEANHDGDFGITLAELRALMELRSTDALRKIQESYGDVYGICTKLKTSPNEGEFYYACFWFFVQRVLYIWLINEHAYIILAIV

SEQ ID NO: 334291 - DNA, 3555 bp, Artificial Sequence
  derived and/or modified sequence
atgggggacatggcaaacaactccgtggcctatagcggagtaaaaaacagtttgaaggaggcaaaccatgatggcgattttgggatcacgttggcggaactgcgagctctcatggaactcagatccaccgacgcactgcgcaagatccaggaatcatacggagacgtgtatggcatttgcaccaagctcaaaacgtcccctaacgaaggcctgtctgggaaccccgcagacctggaaaggagagaggccgtttttgggaagaattttattccccccaagaaaccaaagactttcttgcagctcgtgtgggaagctctgcaggatgtcactctgataatcctggagatcgcggccatcgtcagcctcggattgagcttttatcagcctcccgaaggcgataatgccctgtgcggtgaagtttcggtaggggaggaggaaggggaaggcgaaaccgggtggatcgaaggagctgccatcttgctgagcgtggtatgtgtggtccttgtgaccgctttcaacgactggtctaaagagaaacagtttcgaggattgcagtccagaattgagcaggaacagaagtttaccgtgataagaggagggcaggttatccagatccccgtggctgatatcacagttggtgacattgcccaggttaaatacggagatcttctcccagcagatggaattcttatccagggaaacgacctgaaaatcgatgaatctagccttacaggggaatccgaccacgtgaagaaatctctggacaaggaccccctccttctgagtggaacacacgtgatggagggtagcggacggatggtggtgactgcggtaggcgttaacagccagactggaataatttttaccctgctgggcgctggcggggaggaggaggagaaaaaggacgagaaaaaaaaggaaaaaaaaaacaaaaagcaagacggcgcaatcgaaaatagaaacaaagctaaggctcaggacggggcagccatggaaatgcagcctctaaaatctgaggaaggtggcgatggtgatgagaaagacaaaaagaaggccaatctccctaagaaagagaaatcagttctgcagggtaaactgaccaagttagccgtccagatcggcaaagcgggtctgctgatgagcgccatcacagtgatcatcctcgttctttatttcgttatcgacacattttgggtccaaaaacggccctggctggccgagtgtaccccaatctacattcagtacttcgtaaaattctttattatcggtgtcactgtgcttgtggtggccgtcccagaggggctccccctcgcggttacaatctcattggcatactctgtgaaaaaaatgatgaaggacaacaatctcgtgcgtcacctcgacgcctgcgaaaccatgggcaacgccactgccatttgctcagacaagacgggcacacttacaatgaacagaatgacggtggtgcaggcatacatcaatgagaagcactataagaaggtgcctgagccagaggctattccacccaacatattgtcgtatcttgttactggaatttctgttaactgcgcatatacatctaaaatcctgcctccggagaaagaaggcgggctccctcgccacgtcggtaataaaacggagtgcgccctgctggggctcttactggatttgaaaagggactatcaggatgtacggaacgaaatccccgaggaagcgctatacaaggtgtatacatttaattcagtgagaaagtcaatgtctacagtgctgaaaaactctgacggaagttatcgcattttcagcaagggggcctctgaaataattctgaagaaatgctttaagattctaagcgccaatggcgaagcaaaggtgttccgaccccgggaccgtgacgatatagtcaagactgttatagaacctatggcctccgaaggtctgaggaccatttgtctggccttccgggactttcccgccggagagccggaaccggagtgggacaatgagaatgacatagttactggcctgacgtgcatcgccgttgtgggcatagaggatccagtgagaccagaagttccggatgcgattaaaaagtgtcagagggcgggcatcacagtgcgaatggtgacaggtgataatattaacactgcacgagccatagcaacgaagtgcgggatccttcaccctggagaggactttctttgtctggagggcaaggatttcaatagaaggatacgcaacgagaaaggggagatcgagcaagagagaatagacaaaatttggccaaagctccgcgtgttggcccggagcagccccactgataagcatacactggtcaagggtattattgacagtacggtgtcagaccagcggcaagtagttgcggtgaccggtgatggcacaaacgatggaccagctctcaagaaagccgatgtggggtttgccatgggcatcgctggcaccgacgtggcaaaagaagcatcggacatcatcctgaccgatgacaacttcaccagtattgtaaaagccgtgatgtgggggcgcaacgtgtatgacagcattagcaagttcctgcagtttcaactgactgttaacgtggtcgcagtaattgtggccttcaccggtgcgtgcatcacccaggattcccctctgaaggctgtacaaatgttatgggtgaacctgatcatggacaccttagccagcttggcgttagccacagagccccccaccgagtcactcctgctgagaaagccatacggcagaaacaagccattaatttcccggaccatgatgaaaaatatcctcggtcatgccttttatcagttggtggttgtgttcacgctactgttcgcaggcgagaagtttttcgatatagacagtggtcgtaatgcacccctacatgcccctcctagtgagcattacacaatcgtatttaatacttttgtgttaatgcagctgttcaatgagattaatgccagaaaaatccatggcgaaagaaatgtattcgagggaatcttcaacaacgcaattttttgcaccattgttctaggaacgtttgtcgtacagctaatcagcactattccaacatccagactgaaattcctcaaagaggccggccacggcacacagaaggaagaaattccagaggaggagctcgcagaagatgtagaagagattgaccacgcagagagggaactgaggagggggcagatactttggtttagaggactgaacaggattcaaactcaaatccgggtggtgaatgcttttcgtagtagcctatatgaggggctggagaaacctgagtccagatcttcgattcataattttatgacgcatccggagtttaggatcgaggatagcgagcctcacatccccctcattgacgatactgacgctgaagatgacgcaccaacaaagcggaattcgtctcccccgccctcgcctaacaagaacaataacgccgtggatagcggcattcacctgaccattgagatgaacaagagcgcgacctcgtcatctccaggaagccctctgcattcccttgagacttctctgtag

SEQ ID NO: 334292 - DNA, 3555 bp, Artificial Sequence
  derived and/or modified sequence
atgggagacatggccaacaacagcgtggcctacagcggcgtgaagaacagcctgaaggaggccaaccatgatggagactttggcatcaccctggccgagctgcgggccctgatggagctgcggagcacagatgccctgaggaagatccaggagagctatggagatgtgtatggcatctgcaccaagctgaagaccagccccaatgaaggcctgagcggcaacccagctgacctggagcggcgggaggccgtgtttgggaagaacttcatcccccccaagaagcccaagaccttcctgcagctggtgtgggaggccctgcaggatgtgaccctcatcatcctggagattgctgccatcgtgtccctgggcctgtccttctaccagcccccagagggggacaatgccctgtgtggggaggtgtctgtgggggaggaggagggggagggggagaccggctggattgagggcgccgccatcctgctgtctgtggtgtgtgtggtgctggtgacagccttcaatgactggagcaaggagaagcagttccggggcctgcagagccgcatcgagcaggagcagaagttcaccgtcatccggggcggccaggtgatccagatccctgtggccgacatcaccgtgggggacatcgcccaggtgaagtacggggacctgctgcctgcagatggcatcctgatccagggcaatgacctgaagattgatgagagcagcctgaccggggagagtgaccacgtgaagaagagcctggacaaggaccccctgctgctgagcggcacccacgtgatggagggcagcggccgcatggtggtgacagctgtgggcgtgaacagccagacaggcatcatcttcaccctgctgggcgccggcggggaggaggaggagaagaaggatgagaagaagaaggagaagaagaacaagaagcaggatggagccatcgagaacagaaacaaggccaaggcccaggatggagctgccatggagatgcagcccctgaagtctgaggagggcggagatggagatgagaaggacaagaagaaggccaacctgcccaagaaggagaagtctgtgctgcagggcaagctgaccaagctggccgtgcagatcggcaaggccggcctgctgatgtctgccatcaccgtcatcatcctggtgctgtacttcgtcatcgacaccttctgggtgcagaagaggccctggctggctgaatgtacccccatctacatccagtactttgtgaagttcttcatcatcggcgtgacagtgctggtggtggccgtgcctgagggcctgcccctggccgtgaccatcagcctggcctacagcgtgaagaagatgatgaaggacaacaacctggtgcgccacctggatgcctgtgagaccatgggaaatgccacagccatctgcagcgacaagacaggcaccctgaccatgaacaggatgacagtggtgcaggcctacatcaatgagaagcactacaagaaggtgcctgagcctgaggccatcccccccaacatcctgagctacctggtgacaggcatctctgtgaactgtgcctacaccagcaagatcctgcccccagagaaggagggcggcctgcccaggcatgtgggcaacaagacagaatgtgccctgctgggcctgctgctggacctgaagagggactaccaggatgtgagaaatgagatccctgaggaggccctgtacaaggtgtacaccttcaacagcgtgaggaagtccatgagcacagtgctgaagaacagtgatggcagctaccgcatcttcagcaaaggagccagcgagatcatcctgaagaagtgcttcaagatcctgagcgccaacggggaggccaaggtgttccggccccgggacagagatgacatcgtgaagacagtgattgagcccatggccagcgagggcctgcggaccatctgcctggccttccgggacttccctgctggggagcctgagcctgagtgggacaatgaaaatgacatcgtgacaggcctgacctgcatcgctgtggtgggcattgaagatcctgtgcggcctgaggtgcctgatgccatcaagaagtgccagagagctggcatcaccgtgaggatggtgactggagacaacatcaacacagcccgggccatcgccaccaagtgtggcatcctgcaccctggagaggacttcctgtgcctggagggcaaggacttcaacagacgcatcagaaatgaaaaaggagaaattgagcaggagagaattgacaagatctggcccaagctgcgggtgctggcccggagcagccccacagacaagcacaccctggtgaagggcatcatcgacagcacagtgtctgaccagaggcaggtggtggccgtgactggagatggcaccaatgatggccctgccctgaagaaggcagatgtgggctttgccatgggcattgctggaacagatgtggccaaggaggccagtgacatcatcctgacagatgacaacttcaccagcatcgtgaaggctgtgatgtggggcagaaatgtgtatgacagcatcagcaagttcctgcagttccagctgactgtgaatgtggtggccgtcatcgtggccttcaccggggcctgcatcacccaggacagccccctgaaggctgtgcagatgctgtgggtgaacctgatcatggacaccctggccagcctggccctggccacagagcccccaacagagagcctgctgctgaggaagccctatggaagaaacaagcccctcatcagcaggaccatgatgaagaacatcctgggccacgccttctaccagctggtggtggtgttcaccctgctgtttgctggggagaagttctttgacatcgacagcggcagaaatgcccccctgcacgcccctccttctgagcactacaccatcgtgttcaacacctttgtgctgatgcagctgttcaatgagatcaatgccaggaagatccacggggagagaaatgtgtttgagggcatcttcaacaatgccatcttctgcaccatcgtgctgggcacctttgtggtgcagctgatcagcaccatccccaccagccggctgaagttcctgaaggaggccggccacggcacccagaaggaggagatccctgaggaggagctggccgaggatgtggaggagattgaccacgccgagcgggagctgcggcggggccagatcctgtggttccggggcctgaaccgcatccagacccagatccgggtggtgaatgccttccgcagcagcctgtatgagggcctggagaagccagagagccgcagcagcatccacaacttcatgacccaccctgagttcagaattgaagattctgagccccacatccccctgattgatgacacagatgctgaagatgatgcccccaccaagaggaacagcagccccccacccagccccaacaagaacaacaatgctgtggacagcggcatccacctgaccatcgagatgaacaagagcgccaccagcagcagccctggcagccccctgcacagcctggagaccagcctgtag

SEQ ID NO: 334293 - DNA, 3555 bp, Artificial Sequence
  derived and/or modified sequence
atgggcgacatggccaacaacagcgtggcctacagcggcgtgaagaactcactcaaagaagccaatcatgatggtgacttcggcatcacactggcagagctgagggcattgatggaactcagatccaccgatgccttgaggaaaatacaggagtcctacggagatgtatacgggatttgtactaaactcaagacttcacctaacgagggcctctccggcaaccctgctgaccttgagaggcgagaagctgtgttcgggaagaattttattccccctaaaaagccaaaaacttttcttcagctggtttgggaagctctgcaagatgtcacacttatcattctggaaatcgctgccattgtatcactggggctgagtttttaccagccaccggagggcgacaacgcgttatgcggggaagtgtctgtgggcgaggaggaaggagagggtgagaccgggtggatcgaaggcgccgctattctcctatccgtggtgtgtgttgtactcgtcacggcgtttaatgattggagtaaggaaaaacagttcaggggcctgcagagtcgcattgaacaggagcagaagtttactgttattcgcggtggtcaggtaatccagattcctgtggctgatatcaccgtgggcgacatagcccaagtcaaatacggcgatctactgcctgctgacgggattttaatccaaggaaatgacctcaaaattgatgagtcctctctaactggagagagtgaccatgtcaagaagtcccttgacaaagaccctctgctgttaagcggcacccatgtgatggaaggtagtggaagaatggtggtgaccgcggtcggggttaactctcaaaccgggatcatttttaccctgcttggagcagggggtgaagaggaggagaagaaggacgaaaagaagaaagagaagaaaaacaagaagcaggatggcgcgattgaaaataggaataaggccaaggctcaagacggggccgccatggagatgcaaccattaaaaagcgaggaggggggggatggtgacgagaaggacaagaagaaagccaacttgcctaagaaagagaagagcgtgttgcaaggaaagttaacaaaacttgccgtccagatcggaaaggccggcctgttaatgtctgcaatcaccgtgatcatcctggttttgtattttgtcattgataccttttgggtacagaaacgaccttggctcgctgaatgtactcccatttatatacagtacttcgtgaagtttttcatcatcggagtcacagttctggtggtcgctgtgcccgagggtttaccattggccgtaacaataagcctagcgtacagtgtgaagaagatgatgaaggataacaacctcgtccgacacttggacgcttgcgaaactatgggaaacgcgactgccatatgttcagacaaaacagggacactcaccatgaataggatgacagtggttcaggcctacataaatgaaaagcattataagaaggtgcccgagcccgaggccatacctcctaacattctgtcatatttggtcactggtattagcgtaaactgtgcgtacacttctaagatacttccacctgagaaggagggaggccttccacgccacgtcggcaacaagaccgagtgcgcactcttgggcttactcctggacctgaagcgggattaccaggatgttaggaacgagatcccggaagaagcactgtacaaagtgtacacattcaattccgtgcgaaagtctatgtccacagtcttgaagaacagcgacggatcttaccgtatatttagtaagggggctagcgagatcattctgaaaaagtgttttaaaatcttatctgctaacggcgaggccaaagtcttcaggccacgggatagggacgacattgtgaagaccgtgatagaacccatggctagtgaagggcttcggactatctgcctggcatttcgagatttccctgccggagaacccgaaccagaatgggacaatgaaaatgatatcgtcaccggcctcacttgcattgccgtggtgggcatcgaggaccccgtccgccctgaggtcccagatgctatcaagaagtgtcagcgggcggggattaccgtgcggatggtgaccggcgataatataaacaccgctcgggccatcgcgacaaaatgtggtattttgcatccgggcgaggattttctttgtctagagggaaaggatttcaatcggcgcattaggaatgaaaagggcgagattgaacaggagagaattgataagatttggccgaaacttcgcgtgctggccagaagctcacccacagataagcacacccttgttaaaggcattatcgattccaccgtctcggaccaacgccaggtcgttgccgtgactggagacggcaccaacgacggtccggccctaaagaaggcggacgtcggctttgctatgggaatcgcgggtacagatgtggccaaggaagctagcgatattatactgaccgatgacaacttcacgagcatcgtcaaagcagtcatgtggggtcgcaatgtgtacgactcaatctccaagttcctgcaatttcagctgacagtgaatgttgtggcagtgattgtcgcatttacgggcgcctgcattactcaggattcacccctgaaggccgttcagatgctctgggtaaatcttattatggacacactcgcttcccttgccctggcaaccgaacccccaaccgagtctcttttgctgcgtaagccatatggaaggaataaacctctcatttctcgcacaatgatgaagaatatcctgggccacgcattctaccagttagtcgtggtttttacgctcctttttgctggagagaagttctttgacatcgactccgggagaaacgcgcctctgcacgctcccccctctgagcattacacgatcgtcttcaatacttttgtcctgatgcagctcttcaatgaaatcaatgcacgcaaaattcacggtgagcgcaatgtgttcgaagggatcttcaacaatgctattttttgcaccattgtactagggacttttgtggttcagctgatttctaccattccaacttccaggctgaagtttttaaaggaggcaggtcatggaacacaaaaggaagagattcccgaggaagagcttgccgaagatgtcgaagagatcgatcacgccgagagggagcttcgccgtggtcagatcctgtggttcagggggctcaaccggattcaaacacagataagggtagttaatgctttccggtccagcctgtatgagggccttgagaaaccggagtccagatcttcaatacacaacttcatgacacaccctgagttcaggatagaggatagcgagccacacataccactgattgacgacacagacgccgaagacgatgcaccgaccaaacggaactcatcccctccacctagccccaataaaaataataacgccgtagattctggcattcacctgacaatcgagatgaacaaatccgccacaagcagttctcccgggtctccgctgcactcactggaaactagcctgtag

SEQ ID NO: 334294 - DNA, 3555 bp, Artificial Sequence
  derived and/or modified sequence
atgggagacatggccaacaacagcgtggcatacagcggtgtgaaaaactcgctgaaagaagctaatcacgacggcgattttgggatcacattagccgaactgagggccctgatggagctccgctccacagacgctcttaggaaaatacaggagagttatggagatgtgtacgggatatgtaccaagctcaaaacctctcccaatgaggggctgagtggaaacccagccgatctggagcgacgcgaggccgtattcgggaaaaactttatccctcccaagaagccaaagaccttcctgcagttagtctgggaggctctgcaggacgtaacactcatcatcctcgagatcgccgcaattgtcagcttaggtctgagtttctaccaaccccctgagggggacaatgcactgtgcggagaggttagtgtgggagaggaagagggagagggtgagacgggatggattgaaggggctgccatactattgtccgtggtctgcgtagtgttggttacagcatttaatgattggagtaaagagaagcagttcagagggctgcagtcgcggattgaacaggagcagaaattcacagtgatccggggtggacaggtgattcagatcccagtggcagatatcacggtgggggacatcgcccaagtaaaatatggtgatctgctcccagccgatggtatcctgatacagggcaatgatttgaagattgatgagagttctcttactggagaaagcgaccacgtgaaaaaaagcctagacaaggatcctttgctcctgtcaggcactcacgtgatggaaggcagcggccgtatggtggtgactgccgtcggcgtgaactctcaaacaggaattatcttcactctacttggtgcgggaggcgaggaagaagaaaaaaaagatgagaagaagaaagaaaagaagaacaagaagcaggatggggcaatcgagaaccgtaacaaagcaaaagcacaggacggcgctgcaatggagatgcagcctctgaagtccgaagaaggcggagatggcgatgagaaagacaaaaagaaagccaatctgccaaaaaaggagaaatcagttctgcagggaaaactaactaagctcgcggtccagattggaaaggctggcctgctgatgtctgccataaccgtgataatacttgtcctctattttgtgatcgacacattctgggtacagaagcggccatggcttgcagagtgcacccctatttatattcaatatttcgtgaagttttttattattggggtgacagtgctggtagtagcagtgcctgagggcctgcctctggccgtgacaatcagcctcgcatatagcgttaaaaagatgatgaaagataacaacctggtgaggcacttagatgcttgcgagactatggggaacgctaccgctatctgctctgacaagacagggactctgacaatgaacagaatgaccgttgtccaggcgtacattaatgaaaagcactataagaaagtccctgagcccgaggctatacccccaaatattctgagttacctcgtcaccggaatatcagtgaattgtgcctatacatccaaaatcctgcctcctgagaaggaagggggactccccagacatgtcggcaacaagacggaatgcgctcttttagggctcctcttagaccttaaacgcgactatcaagacgtgagaaatgaaatcccagaggaagctctgtacaaggtgtatacattcaactccgtgcgaaaaagtatgagcaccgtgctcaagaattccgatggctcgtacaggattttcagcaagggagctagcgagattattctgaaaaagtgttttaagattctgtctgcgaatggtgaagctaaggtgttcaggccacgcgatagagatgatatcgtgaaaaccgtgatcgagcctatggctagtgagggactgaggactatttgtttggcgttcagggacttccctgccggagaacctgaacctgagtgggataacgagaacgacatcgtaaccgggctcacttgtatagcagtagtcggcattgaggaccctgtgcggcctgaggtgccagacgccatcaagaagtgtcaacgcgcaggcataacggtgagaatggtgaccggcgataatattaataccgccagagctatcgcgacaaagtgtgggatactgcaccccggagaagattttttatgtttggagggcaaggattttaacagacgcattcgcaatgagaaaggggagatcgaacaggagcgcatcgataagatctggcctaagttgagggtgctcgcaagatcatcccccaccgataagcacacactcgtcaaagggatcatcgattccaccgtttctgatcagcgccaggtggtggcggtaacaggggacggtacgaatgatggaccagccctgaagaaggctgacgtcggatttgccatgggaatcgcagggactgatgtggccaaggaagcatccgatatcatcctcacagacgacaactttacatctatcgtgaaggccgtaatgtgggggagaaacgtgtatgattccattagtaagttcctgcagtttcagttgaccgtgaacgtagtagctgtcattgtcgcattcactggcgcatgtataacgcaggatagtccattgaaggccgtgcaaatgttgtgggtgaatctgatcatggacaccttggcctctctggccctcgcaaccgaacccccaacagaaagtctactgctgcgcaagccatatggacggaataaacccctgatcagccgaacaatgatgaaaaacatcctcgggcatgccttttatcaactggtggtcgtgtttacgctccttttcgcaggggagaaattcttcgacatcgactccggacgcaacgcaccactgcacgcaccaccctctgaacactacaccatcgtgtttaatacattcgtgctcatgcaactgttcaatgaaattaacgccagaaagatccacggagagcgcaacgtctttgaagggatctttaataacgctatcttctgcactatagtactgggaacttttgtagtgcagttaatttctacgatccccactagcagactgaaattcctgaaagaagctggacacggcacacagaaagaggaaatccctgaggaggaacttgccgaggatgtagaggaaatcgaccatgcggagcgcgagctgcgacgcggacagattctctggttccgtggtctgaatagaattcagacccaaattagggtggtgaacgcatttcgctcctctttgtacgagggcctggagaagcctgaatctcgcagcagcatacataattttatgacacatccggagttccggattgaggactctgaaccccatataccactgatagatgacaccgacgcagaagacgacgcccctaccaagagaaattctagccccccaccctcccccaacaagaacaacaatgccgttgactctggcatccatttaacaattgagatgaacaaaagtgctacttcttcttcacctggctcgccactacattctcttgaaacaagtctgtag

SEQ ID NO: 334295 - DNA, 6669 bp, Artificial Sequence
  derived and/or modified sequence
ggccaaaggtcaagatacttctctgggaaatgttgctgctgatgctgctttacaaagtcatacaatgagtgtttggtttaagaaagattttcatacttaaaagattttcatcttggaaatacatcaagtgaaaattaaattcttttgggaaacattttccttctgatatattatacttgtaatgggcgacatggcaaacaactcagttgcttacagtggtgtgaaaaactctttgaaggaagctaatcatgatggagactttggaattacgctcgcagagctgcgggctctcatggagctcaggtccacagatgcattacgaaaaatacaggaaagctatggagatgtctatggaatttgcaccaaattgaaaacatctcccaatgaaggtttaagtggaaaccctgcagatttagaaagaagagaagcagtgtttggaaagaattttatacctcctaaaaagccaaaaacctttcttcaattagtatgggaagcattacaagatgtcactttaattatattagaaattgcagccatagtatcattgggcctttctttttatcagcctccagaaggggataatgcactttgtggagaagtttctgttggggaggaagaaggtgaaggtgaaactggttggattgaaggagctgcaatcctcttgtctgtagtgtgtgtggtgttagtaacagctttcaatgactggagtaaggaaaaacagtttagaggtttgcagagccgaattgaacaagaacagaagttcactgtcatcaggggtggtcaggtcattcagatacctgtagctgacattactgttggagatattgctcaagtgaaatatggtgatcttcttccagctgacggcatacttattcaaggcaacgatcttaaaattgatgaaagctcattgactggtgaatcagatcatgttaaaaagtctttagataaggatcccttacttctatcaggtactcatgtaatggaaggctctggaagaatggtagttacagctgtaggtgtaaattctcaaactggaattatctttaccttacttggagctggaggtgaagaggaagagaagaaagatgagaagaaaaaggaaaagaaaaataagaaacaagatggagctattgagaatcgcaacaaagcaaaagcccaggatggtgcagccatggaaatgcagccattgaagagtgaagaaggtggagatggtgatgaaaaagataaaaagaaagcaaatttgccaaaaaaggaaaaatctgttttacaagggaaacttacaaaactggctgttcagattggcaaagcaggtctgttgatgtctgccatcacagttatcattctagtattatattttgtcattgacaccttctgggttcagaaaagaccatggcttgctgagtgcacaccaatttatatacaatactttgtgaagttcttcattattggagttacagttttagtggtcgcagtgccagaaggtcttccacttgcagtcacgatctcactggcttattcagtcaaaaaaatgatgaaagataataacttagtaaggcatctggatgcttgtgaaaccatgggaaatgctacagctatttgttcagataaaacaggaactttgacaatgaacagaatgacagtcgttcaagcttacataaatgaaaaacattataaaaaggttcctgaaccagaagctattccaccaaatattttgtcctatcttgtaacaggaatttctgtgaattgtgcttatacatcaaaaatattgccaccagagaaagagggtggattacctcgtcacgttggtaataaaactgaatgtgccttgttgggacttcttttggatttaaaacgggattatcaggatgttagaaatgaaataccagaagaagcactgtacaaagtctacaccttcaattctgttaggaagtccatgagtactgtcctgaaaaattcagatggaagttatcgaatattcagcaagggtgcatctgagataattctgaaaaagtgtttcaaaatcttgagtgctaatggtgaggcaaaagtattcagaccaagggaccgtgatgatattgtaaaaactgtgattgaaccgatggcatcagaaggcttgagaaccatatgtcttgcattcagagattttccagcaggagaaccagaaccagagtgggataatgaaaatgatattgtcaccggccttacatgcattgctgttgtggggattgaagatcctgtgagacctgaggtgccagatgcaattaaaaagtgtcagagggctggaattactgtgcggatggtcactggtgataatattaatactgctcgggccattgctaccaaatgtggtattttacatcctggggaagattttctgtgcctagaaggtaaagattttaacagaagaatacgaaatgaaaaaggagagattgagcaagagaggatagacaagatttggccaaaacttcgagtacttgcaagatcatctcctactgataagcatacactggttaaaggtataattgacagcactgtctcagaccaacgccaggttgtagctgtaactggtgatggtacaaatgatggcccagcactaaagaaagcagatgttggatttgcaatgggtattgctggaactgatgtagctaaagaagcatccgatattattctcacagatgacaactttacaagcattgttaaagcagttatgtggggacgaaatgtctatgacagcatctcaaaattccttcagttccaacttactgttaatgtagtagcagtgattgttgcttttacgggcgcctgcattactcaagactcaccgcttaaggctgtgcagatgctgtgggtaaacctcataatggatacactcgcttccctggctctggcaacggaaccacccactgagtctctcttgcttcggaaaccttatggtagaaataagcctctcatctcacgtacaatgatgaagaatattttgggtcatgcattctatcaacttgtagtagtctttacactcttatttgctggagaaaagttttttgacattgatagtggaagaaatgctcctttgcatgctcctccttcagaacattatactattgtttttaatacctttgtgctgatgcaacttttcaacgaaataaatgcccggaaaattcatggtgaaagaaatgtattcgaaggaatctttaacaatgccatcttctgcacaattgttttaggcacttttgtggtacagcttatttcaacaattccaactagccgtttaaaattcctcaaagaagctggtcatggaacacaaaaggaagaaatacctgaggaggaattagcagaggatgttgaagagattgatcacgctgaaagggagttgcggcgtggccaaatcttgtggtttagaggtctgaacagaatccaaacacagattcgagtggtgaatgcatttcgtagttctttatatgaagggttagaaaaaccggaatcaagaagttcgattcacaactttatgacacatcctgagtttaggatagaagattcagagcctcatatcccccttattgatgacactgatgccgaagatgatgctcctacaaaacgtaactccagtcctccaccctctcccaacaaaaataacaatgctgttgacagtggaattcaccttacaatagaaatgaacaagtctgctacctcttcatccccaggaagcccactacatagtttggaaacatcactctgattgtaagctgaatgttaacacactagctgcattgtaaagaaacaaattgaaactgggtcttttcacatattgtgatggacaagctagtattcttgtctttggacttcaacagaagacacacttgtacgaatgtagatttatttttttaaaaaaaaaaaagcaaagctttctgccagactgagggtgctttttggggggtgggagaaatgaactgacagataaacagtaactcagcgtaagtgacctgtggatcatcagtagtacccaagcatggtcctgaacagtgtattagcagagctttagtttatctcagtcctggatgggagagagagggaggagtaaaactgggcaagacaaagagccctggatcgttgaattgatagtttaatttctgctgttggctgttaataatttggattatttatgtttataaatgatacagatctgtttacaaggtttgtagatactttttttgttcctgttcatagatgggaagcttccttataactgatgcagagaaaaattagtccttcaaatactgctgtattttcaggaaaaaaaaaaaaaggggtgtttctattgaaactgtactaaatttttgcctacaatttaccttgttaaatattgtagataaattgctaatactaatagccaaatagataacactaatgctttgtttaaaaaaacgaaaaaaacaaaacaaaacaaaaaaacatgagcagtggtgttctaatgaagttatgacatctgtcctaattagtttcttaaatacatttactacttaatggttttgaagcaactgtttaatttttaaaatttttgaaaacttgctaataaccttttgttcagaatttagtagattgtttaatgcaggacatcaactacataatgaaagatgcttgaaatgcttttgttatttcaggcaaatcaaattaaatcagactatcaaactacaagagaaccttagtcttttttgtttttgtctaaacatgttagtttagtgatgtcttggtgaactgtgagtgaactgtattgatttttctaatctttagagaccttcacacagcatgagggctgttggcattttgaaaaaggttaataagtagaagcatacatgttttccttttgtttttgaaacttgtttgtaaacataaataaatatgcccttttattaaataaattcatggcaatgtttttttaaaagacatttcagcttctttactcagttctgcatatacagtgcatcagtctgttctctttgaccacaattggaatacatttcaagatggtaacagccccatgaagtaccgctttaattccttgctggtaatctaatagaatcagattaagaaaattaacacaattttaccatttgacatactcttcattgaatttagtttgtctaaaatagtctcacaggtaaaaaacataacaacaatgaccaccattgtctttgatacatttattttaattcttaagtggccaaataacagattaggtaaaatgagattacatgaaaaggttctaaaatgatatatttagatgcaataattaaccatatgctagaatgcccacctctaagccaattggattctttagctctctttttctttccttcatctaccttcttctcttttttgcctctgtctttaccctttagaaactggcatgtgttagggcccagatttcaccagatacacaatcctcaggctgacataaagtttacgaggactgctactataactgagagtgctgaccaagcaaagaaacatttagttgatggtgcttgatatttttggtgggtgggggaaatctttttctcaccatcaaatctttgcagtaatcctctgcaggtcttagaaacacattggctctgtcagcatttgtaattgtacatttattcatcaggtatttatagtgaatcatactgtaaaaaagaggtagcatgatatgctggaaagcatattagactaggagtcaagacctggtttctagtcttggttttgccattaatgtgctgcatgatcttgggaaaatcatttaccctaaataagggtggtggactatcttgaagaaccctttcaactctaaaaattgaccctatcaactggagagcccacaaggcatagggaatagagaaaagggaaatgttttcagttttcttttttattttggttatgcttaaatatgaatgtaattaccaaaagatttagaagtgcatgtgctttggaggatttgtattgagcttttacagtattcatttttcaactcaaggcaatggctttctacaccaactctaatccataaacgggtcttatgacatctatgaagtagtagcaagacatgcttagtgtgtatttctctctttgagacactgtaatttctaccagaaatttccagagcattatgtaggtagaaaaaaatgcaagcaagctgttaaagatcttggatcccattatatagtatgtatagctgaaatctgtaattcaatcactttttctcttttatcctctaaccaaaaaattgtttaattttgcatcccaaatgtttttaatctttgtatattttttaaaaatccttttctcctcatcattgccttttttgtggttgtaaatagacttacttgcactttgaagatgagttactccttgtcatcttacaaatatgtgatatggtaattttcataacagatgtcagttttgaaccaagaattggtgatttgtttataagaaaaaaactggcttcatttctgtgaaattgctctttgaaaatttctttttacacgtgtaagccaactgagataccgtgatggtgttgatttctttcaatgatgcttaccatctattttagccactgagccttttattatttgtctatttgtaaagtttatttgtcttaactcatttaataaatatactgtttatctgtttctg

SEQ ID NO: 334296 - DNA, 3555 bp, Artificial Sequence
  derived and/or modified sequence
atgggcgacatggccaacaacagcgtggcctacagcggcgtgaagaacagcctgaaggaggccaaccacgacggcgacttcggcatcaccctggccgagctgagagccctgatggagctgagaagcaccgacgccctgagaaagatccaggagagctacggcgacgtgtacggcatctgcaccaagctgaagaccagccccaacgagggcctgagcggcaaccccgccgacctggagagaagagaggccgtgttcggcaagaacttcatcccccccaagaagcccaagaccttcctgcagctggtgtgggaggccctgcaggacgtgaccctgatcatcctggagatcgccgccatcgtgagcctgggcctgagcttctaccagccccccgagggcgacaacgccctgtgcggcgaggtgagcgtgggcgaggaggagggcgagggcgagaccggctggatcgagggcgccgccatcctgctgagcgtggtgtgcgtggtgctggtgaccgccttcaacgactggagcaaggagaagcagttcagaggcctgcagagcagaatcgagcaggagcagaagttcaccgtgatcagaggcggccaggtgatccagatccccgtggccgacatcaccgtgggcgacatcgcccaggtgaagtacggcgacctgctgcccgccgacggcatcctgatccagggcaacgacctgaagatcgacgagagcagcctgaccggcgagagcgaccacgtgaagaagagcctggacaaggaccccctgctgctgagcggcacccacgtgatggagggcagcggcagaatggtggtgaccgccgtgggcgtgaacagccagaccggcatcatcttcaccctgctgggcgccggcggcgaggaggaggagaagaaggacgagaagaagaaggagaagaagaacaagaagcaggacggcgccatcgagaacagaaacaaggccaaggcccaggacggcgccgccatggagatgcagcccctgaagagcgaggagggcggcgacggcgacgagaaggacaagaagaaggccaacctgcccaagaaggagaagagcgtgctgcagggcaagctgaccaagctggccgtgcagatcggcaaggccggcctgctgatgagcgccatcaccgtgatcatcctggtgctgtacttcgtgatcgacaccttctgggtgcagaagagaccctggctggccgagtgcacccccatctacatccagtacttcgtgaagttcttcatcatcggcgtgaccgtgctggtggtggccgtgcccgagggcctgcccctggccgtgaccatcagcctggcctacagcgtgaagaagatgatgaaggacaacaacctggtgagacacctggacgcctgcgagaccatgggcaacgccaccgccatctgcagcgacaagaccggcaccctgaccatgaacagaatgaccgtggtgcaggcctacatcaacgagaagcactacaagaaggtgcccgagcccgaggccatcccccccaacatcctgagctacctggtgaccggcatcagcgtgaactgcgcctacaccagcaagatcctgccccccgagaaggagggcggcctgcccagacacgtgggcaacaagaccgagtgcgccctgctgggcctgctgctggacctgaagagagactaccaggacgtgagaaacgagatccccgaggaggccctgtacaaggtgtacaccttcaacagcgtgagaaagagcatgagcaccgtgctgaagaacagcgacggcagctacagaatcttcagcaagggcgccagcgagatcatcctgaagaagtgcttcaagatcctgagcgccaacggcgaggccaaggtgttcagacccagagacagagacgacatcgtgaagaccgtgatcgagcccatggccagcgagggcctgagaaccatctgcctggccttcagagacttccccgccggcgagcccgagcccgagtgggacaacgagaacgacatcgtgaccggcctgacctgcatcgccgtggtgggcatcgaggaccccgtgagacccgaggtgcccgacgccatcaagaagtgccagagagccggcatcaccgtgagaatggtgaccggcgacaacatcaacaccgccagagccatcgccaccaagtgcggcatcctgcaccccggcgaggacttcctgtgcctggagggcaaggacttcaacagaagaatcagaaacgagaagggcgagatcgagcaggagagaatcgacaagatctggcccaagctgagagtgctggccagaagcagccccaccgacaagcacaccctggtgaagggcatcatcgacagcaccgtgagcgaccagagacaggtggtggccgtgaccggcgacggcaccaacgacggccccgccctgaagaaggccgacgtgggcttcgccatgggcatcgccggcaccgacgtggccaaggaggccagcgacatcatcctgaccgacgacaacttcaccagcatcgtgaaggccgtgatgtggggcagaaacgtgtacgacagcatcagcaagttcctgcagttccagctgaccgtgaacgtggtggccgtgatcgtggccttcaccggcgcctgcatcacccaggacagccccctgaaggccgtgcagatgctgtgggtgaacctgatcatggacaccctggccagcctggccctggccaccgagccccccaccgagagcctgctgctgagaaagccctacggcagaaacaagcccctgatcagcagaaccatgatgaagaacatcctgggccacgccttctaccagctggtggtggtgttcaccctgctgttcgccggcgagaagttcttcgacatcgacagcggcagaaacgcccccctgcacgccccccccagcgagcactacaccatcgtgttcaacaccttcgtgctgatgcagctgttcaacgagatcaacgccagaaagatccacggcgagagaaacgtgttcgagggcatcttcaacaacgccatcttctgcaccatcgtgctgggcaccttcgtggtgcagctgatcagcaccatccccaccagcagactgaagttcctgaaggaggccggccacggcacccagaaggaggagatccccgaggaggagctggccgaggacgtggaggagatcgaccacgccgagagagagctgagaagaggccagatcctgtggttcagaggcctgaacagaatccagacccagatcagagtggtgaacgccttcagaagcagcctgtacgagggcctggagaagcccgagagcagaagcagcatccacaacttcatgacccaccccgagttcagaatcgaggacagcgagccccacatccccctgatcgacgacaccgacgccgaggacgacgcccccaccaagagaaacagcagccccccccccagccccaacaagaacaacaacgccgtggacagcggcatccacctgaccatcgagatgaacaagagcgccaccagcagcagccccggcagccccctgcacagcctggagaccagcctgtag

SEQ ID NO: 334297 - protein, 1176 aa, Artificial Sequence
  derived and/or modified sequence
MGDMANNSVAYSGVKNSLKEANHDGDFGITLAELRALMELRSTDALRKIQESYGDVYGICTKLKTSPNEGLSGNPADLERREAVFGKNFIPPKKPKTFLQLVWEALQDVTLIILEIAAIVSLGLSFYQPPEGDNALCGEVSVGEEEGEGETGWIEGAAILLSVVCVVLVTAFNDWSKEKQFRGLQSRIEQEQKFTVIRGGQVIQIPVADITVGDIAQVKYGDLLPADGILIQGNDLKIDESSLTGESDHVKKSLDKDPLLLSGTHVMEGSGRMVVTAVGVNSQTGIIFTLLGAGGEEEEKKDEKKKEKKNKKQDGAIENRNKAKAQDGAAMEMQPLKSEEGGDGDEKDKKKANLPKKEKSVLQGKLTKLAVQIGKAGLLMSAITVIILVLYFVIDTFWVQKRPWLAECTPIYIQYFVKFFIIGVTVLVVAVPEGLPLAVTISLAYSVKKMMKDNNLVRHLDACETMGNATAICSDKTGTLTMNRMTVVQAYINEKHYKKVPEPEAIPPNILSYLVTGISVNCAYTSKILPPEKEGGLPRHVGNKTECALLGLLLDLKRDYQDVRNEIPEEALYKVYTFNSVRKSMSTVLKNSDGSYRIFSKGASEIILKKCFKILSANGEAKVFRPRDRDDIVKTVIEPMASEGLRTICLAFRDFPAGEPEPEWDNENDIVTGLTCIAVVGIEDPVRPEVPDAIKKCQRAGITVRMVTGDNINTARAIATKCGILHPGEDFLCLEGKDFNRRIRNEKGEIEQERIDKIWPKLRVLARSSPTDKHTLVKGIIDSTVSDQRQVVAVTGDGTNDGPALKKADVGFAMGIAGTDVAKEASDIILTDDNFTSIVKAVMWGRNVYDSISKFLQFQLTVNVVAVIVAFTGACITQDSPLKAVQMLWVNLIMDTLASLALATEPPTESLLLRKPYGRNKPLISRTMMKNILGHAFYQLVVVFTLLFAGEKFFDIDSGRNAPLHAPPSEHYTIVFNTFVLMQLFNEINARKIHGERNVFEGIFNNAIFCTIVLGTFVVQIIIVQFGGKPFSCSELSIEQWLWSIFLGMGTLLWGQLISTIPTSRLKFLKEAGHGTQKEEIPEEELAEDVEEIDHAERELRRGQILWFRGLNRIQTQMDVVNAFQSGSSIQGALRRQPSIASQHHDVTNISTPTHVVFSSSTASTTVGYSSGECIS

SEQ ID NO: 334298 - DNA, 3531 bp, Artificial Sequence
  derived and/or modified sequence
atgggtgacatggccaacaattctgtagcttatagcggagtgaaaaactccctgaaagaagccaaccatgacggcgatttcggaataactctcgcagagctccgggcccttatggagctcaggagtacagatgcgctgcgtaagatccaggagtcctatggggacgtatacggcatctgtactaagctgaaaactagcccgaatgagggcctctccgggaaccctgctgatttagaaaggcgcgaggccgtgtttgggaaaaacttcattcctccaaaaaagccaaaaacatttctgcagctggtatgggaagctctgcaggatgtaactctcataattctggaaattgccgccattgtgagtctcggcttatcgttttaccagccccccgaaggtgataatgctttgtgcggcgaagtatcggtcggcgaagaggagggagaaggggagactggctggatagaaggagctgccatcctgctttctgtggtttgcgtggtgctagtcactgcgttcaatgattggtctaaggaaaaacagtttcggggactacagtcccgaatcgaacaggagcaaaaattcaccgtgattcgcggtggccaggtaattcaaattcccgtcgctgacattacagtaggcgacatcgctcaggttaaatatggtgacctactgccggctgatggaatcctgatccaaggaaacgatctcaagattgacgagtcgtcgctgacaggggagagtgaccacgttaaaaagagcctggataaggatccactccttctctcagggactcacgtgatggagggcagtggcagaatggtcgttacagcagtgggagtaaattcacagaccggcatcattttcacactgttaggcgctggaggcgaagaggaagaaaaaaaagatgagaagaaaaaagaaaagaaaaacaagaagcaggatggggccatcgaaaatagaaacaaagcaaaagcccaggatggagctgccatggaaatgcaacctctcaaatccgaggaggggggagatggagatgagaaggacaaaaagaaggccaatttgcccaagaaagaaaaaagtgtactccaaggcaaacttaccaagcttgccgtgcagattggcaaggcaggactgctgatgagtgccataacagttattatacttgtgctgtacttcgtgatcgatacattctgggtgcagaaaagaccatggctggccgagtgcacgccaatttacattcaatacttcgtcaaattcttcatcatcggcgttaccgtactggtggtggcagtgccagaagggcttccgctggctgttactatttccctggcttacagtgtcaaaaaaatgatgaaggataataaccttgtgaggcacttggacgcctgtgaaaccatggggaacgccacggctatttgcagcgacaagaccggaacgctgacaatgaatcgcatgacagtcgtccaggcatacatcaacgagaagcattataaaaaggttcccgaaccagaagccattcccccaaatatcctctcctacctagtgacggggatcagtgttaattgtgcctacacgtcaaaaatactccctccggaaaaagaaggtggtctgcctcgacacgttgggaataaaaccgaatgcgctctgttaggtctgctcctggacctcaagcgcgactaccaggacgttaggaacgagattcctgaggaagccctttacaaggtgtacacatttaacagcgttcgaaagagcatgtccaccgttcttaagaattcagacggctcatatagaatattttccaagggcgcctctgagatcatattaaagaaatgctttaaaattttgtctgcaaatggcgaagcaaaagtgttccgcccaagagatagagatgatattgttaagaccgtgattgagccaatggcgtctgagggcttgcggacaatctgtctcgcctttcgggatttccctgctggcgagcctgaaccagaatgggataacgagaatgatatagttaccggattaacttgcatcgccgtggttggtattgaagatcctgttcgccctgaggttccggatgcgatcaagaagtgtcagagggcggggataaccgtgcgcatggtgactggagacaatatcaatacagccagggcaatcgcaacaaaatgcggaattcttcatcccggagaggattttctgtgcctcgagggcaaagattttaatcggagaatccggaacgagaagggagaaattgagcaagagcggattgataagatctggcctaagcttcgagtacttgccagaagttcccccaccgataagcacacactcgtgaaaggcatcatagactctactgtgagtgatcagcggcaagtggtcgccgtaacaggggacggcaccaatgacggccctgccctgaagaaagctgacgtaggcttcgcaatggggatcgcgggcaccgacgtggctaaggaagctagcgatatcattctcaccgatgacaacttcacatccatcgtgaaggcggtgatgtggggccgaaacgtgtatgattctatatccaaatttttgcagttccagctgacagtgaacgtcgttgccgtcattgtagccttcactggagcctgcattacccaggactcccctctgaaggctgtgcagatgctgtgggtgaatctgattatggatacactggctagcctggcactggccaccgaacctccaaccgagagcctgctgctgcgcaaaccatatgggcgcaacaaaccactgatatcccggacaatgatgaagaatatcctcggccatgcattttaccagctcgtggtggtcttcacccttctctttgccggggagaagttcttcgacatagatagtggtcgaaatgcacccctccacgcccccccctccgaacactacaccatcgtgtttaacacttttgttctgatgcagctgttcaatgagatcaacgccaggaagattcacggtgagaggaacgtttttgagggaatcttcaacaatgccattttctgcacaatagttctgggtacattcgtcgtgcaaatcattatcgtgcagttcggcggcaagcctttcagttgttccgaattgtcaattgagcagtggctgtggagcattttcttaggcatgggaacactgctttggggccagctcatctcaacaataccaacctccagacttaagtttctgaaagaagcaggccacggtactcagaaggaagagatcccagaggaggaactagcagaggatgtagaggaaatcgaccatgctgagcgggaattgcgccgggggcaaattctgtggtttagaggactgaaccggatccaaacacagatggacgttgtgaatgcctttcagtctggctcgtccatccaaggggctctaagacggcagcctagcatcgccagtcaacaccatgatgtgaccaacatcagtaccccaacccatgtggtgttttcaagttccaccgcctccaccaccgtgggatacagttcgggcgaatgcatctcttag

SEQ ID NO: 334299 - DNA, 3531 bp, Artificial Sequence
  derived and/or modified sequence
atgggagacatggccaacaacagcgtggcctacagcggcgtgaagaacagcctgaaggaggccaaccatgatggagactttggcatcaccctggccgagctgcgggccctgatggagctgcggagcacagatgccctgaggaagatccaggagagctatggagatgtgtatggcatctgcaccaagctgaagaccagccccaatgaaggcctgagcggcaacccagctgacctggagcggcgggaggccgtgtttgggaagaacttcatcccccccaagaagcccaagaccttcctgcagctggtgtgggaggccctgcaggatgtgaccctcatcatcctggagattgctgccatcgtgtccctgggcctgtccttctaccagcccccagagggggacaatgccctgtgtggggaggtgtctgtgggggaggaggagggggagggggagaccggctggattgagggcgccgccatcctgctgtctgtggtgtgtgtggtgctggtgacagccttcaatgactggagcaaggagaagcagttccggggcctgcagagccgcatcgagcaggagcagaagttcaccgtcatccggggcggccaggtgatccagatccctgtggccgacatcaccgtgggggacatcgcccaggtgaagtacggggacctgctgcctgcagatggcatcctgatccagggcaatgacctgaagattgatgagagcagcctgaccggggagagtgaccacgtgaagaagagcctggacaaggaccccctgctgctgagcggcacccacgtgatggagggcagcggccgcatggtggtgacagctgtgggcgtgaacagccagacaggcatcatcttcaccctgctgggcgccggcggggaggaggaggagaagaaggatgagaagaagaaggagaagaagaacaagaagcaggatggagccatcgagaacagaaacaaggccaaggcccaggatggagctgccatggagatgcagcccctgaagtctgaggagggcggagatggagatgagaaggacaagaagaaggccaacctgcccaagaaggagaagtctgtgctgcagggcaagctgaccaagctggccgtgcagatcggcaaggccggcctgctgatgtctgccatcaccgtcatcatcctggtgctgtacttcgtcatcgacaccttctgggtgcagaagaggccctggctggctgaatgtacccccatctacatccagtactttgtgaagttcttcatcatcggcgtgacagtgctggtggtggccgtgcctgagggcctgcccctggccgtgaccatcagcctggcctacagcgtgaagaagatgatgaaggacaacaacctggtgcgccacctggatgcctgtgagaccatgggaaatgccacagccatctgcagcgacaagacaggcaccctgaccatgaacaggatgacagtggtgcaggcctacatcaatgagaagcactacaagaaggtgcctgagcctgaggccatcccccccaacatcctgagctacctggtgacaggcatctctgtgaactgtgcctacaccagcaagatcctgcccccagagaaggagggcggcctgcccaggcatgtgggcaacaagacagaatgtgccctgctgggcctgctgctggacctgaagagggactaccaggatgtgagaaatgagatccctgaggaggccctgtacaaggtgtacaccttcaacagcgtgaggaagtccatgagcacagtgctgaagaacagtgatggcagctaccgcatcttcagcaaaggagccagcgagatcatcctgaagaagtgcttcaagatcctgagcgccaacggggaggccaaggtgttccggccccgggacagagatgacatcgtgaagacagtgattgagcccatggccagcgagggcctgcggaccatctgcctggccttccgggacttccctgctggggagcctgagcctgagtgggacaatgaaaatgacatcgtgacaggcctgacctgcatcgctgtggtgggcattgaagatcctgtgcggcctgaggtgcctgatgccatcaagaagtgccagagagctggcatcaccgtgaggatggtgactggagacaacatcaacacagcccgggccatcgccaccaagtgtggcatcctgcaccctggagaggacttcctgtgcctggagggcaaggacttcaacagacgcatcagaaatgaaaaaggagaaattgagcaggagagaattgacaagatctggcccaagctgcgggtgctggcccggagcagccccacagacaagcacaccctggtgaagggcatcatcgacagcacagtgtctgaccagaggcaggtggtggccgtgactggagatggcaccaatgatggccctgccctgaagaaggcagatgtgggctttgccatgggcattgctggaacagatgtggccaaggaggccagtgacatcatcctgacagatgacaacttcaccagcatcgtgaaggctgtgatgtggggcagaaatgtgtatgacagcatcagcaagttcctgcagttccagctgactgtgaatgtggtggccgtcatcgtggccttcaccggggcctgcatcacccaggacagccccctgaaggctgtgcagatgctgtgggtgaacctgatcatggacaccctggccagcctggccctggccacagagcccccaacagagagcctgctgctgaggaagccctatggaagaaacaagcccctcatcagcaggaccatgatgaagaacatcctgggccacgccttctaccagctggtggtggtgttcaccctgctgtttgctggggagaagttctttgacatcgacagcggcagaaatgcccccctgcacgcccctccttctgagcactacaccatcgtgttcaacacctttgtgctgatgcagctgttcaatgagatcaatgccaggaagatccacggggagagaaatgtgtttgagggcatcttcaacaatgccatcttctgcaccatcgtgctgggcacctttgtggtgcagatcatcatcgtgcagtttggaggcaagcccttcagctgcagcgagctgagcattgagcagtggctgtggagcatcttcctgggcatgggcaccctgctgtggggccagctgatcagcaccatccccaccagccggctgaagttcctgaaggaggccggccacggcacccagaaggaggagatccctgaggaggagctggccgaggatgtggaggagattgaccacgccgagcgggagctgcggcggggccagatcctgtggttccggggcctgaaccgcatccagacccagatggatgtggtgaatgccttccagagcggcagcagcatccagggcgccctgcggcggcagcccagcatcgccagccagcaccatgatgtgaccaacatcagcacccccacccacgtggtgttcagcagcagcacagccagcaccaccgtgggctacagcagtggagagtgcatctcctag

SEQ ID NO: 334300 - DNA, 3531 bp, Artificial Sequence
  derived and/or modified sequence
atgggcgacatggccaacaacagcgtggcctacagcggcgtgaagaactcgctcaaggaagcgaatcatgacggcgatttcgggataaccctggctgaactaagggctctgatggagctacgttcaaccgacgcactccgtaaaatacaggagtcatacggagatgtgtacggcatatgcacaaaactgaaaacgagcccaaacgagggtctgtccggaaaccccgccgacctcgaacggagggaggccgtgtttggaaaaaacttcatcccacccaaaaaacctaaaaccttccttcagctggtgtgggaagcactgcaggacgtaactctgatcatccttgaaatagccgctattgtctctctggggctgtccttctatcaaccaccagaaggggataacgccctttgtggcgaagtcagcgttggggaagaggaaggcgaaggagagacagggtggatcgaaggcgcggcaatcttgctgtcggtcgtgtgtgtggtgttggtaaccgcatttaatgactggagtaaggagaagcagttcagggggctccagagccgaattgagcaagaacagaaattcactgtcattaggggcggtcaagtaatccagattccagtggccgatatcactgtgggagacattgctcaagtaaagtatggagacctcctccccgcagacggtatccttatccaggggaatgacctgaagatcgacgagtcatctctcactggcgagtccgatcacgtcaaaaaatcactggacaaagaccctctgctgctcagtggcacacacgtgatggaagggtcagggcggatggtggtgacggccgttggtgtaaactcccaaaccggaatcatctttacactgcttggggctggcggagaggaggaagaaaagaaggacgagaaaaagaaagagaagaagaataagaagcaggacggagctattgagaaccgcaacaaggctaaggcacaggatggcgccgctatggaaatgcaacctctcaagagtgaggaggggggggatggggacgaaaaggacaagaaaaaggctaatctcccaaaaaaggagaagtccgtgcttcaagggaagctgaccaagctggccgtacagataggtaaggccgggctgctgatgtccgctatcactgtcatcattctagttctttactttgtcatcgataccttctgggtgcaaaaaagaccgtggctggcggaatgcacacccatttacattcagtatttcgttaaattctttataataggtgtcacggtgctggtcgtagcagtaccagaaggcctccctcttgcagttactatctcccttgcttacagcgtcaagaaaatgatgaaagataataatctggtgaggcacctggacgcgtgcgaaacaatgggtaacgccactgctatctgtagtgataaaacggggacactgaccatgaacagaatgacagtggtgcaagcttacatcaacgagaaacactataagaaagtgccagagcctgaagcaatcccccctaacattctctcatacctcgtgacgggaatatcagtgaattgcgcctatacttcaaagatcttgcctccggaaaaagagggtggactgcctcgccacgtcggtaataaaaccgaatgcgccttgctcggcctgctgctggacctcaaacgagactatcaagatgtaaggaatgaaatcccagaagaggcactgtacaaagtctacaccttcaacagtgtcagaaagtcaatgtctacagtcctgaaaaacagtgacggttcctataggattttctccaaaggagcctcagagatcattctgaagaagtgcttcaaaatcctctccgcaaacggcgaggctaaggtgtttagacctagggatcgcgacgatattgttaagactgtaattgaacccatggcttcggaaggattgaggactatttgccttgctttccgggatttcccagcgggcgagccagaaccggaatgggataatgagaatgatattgtgacaggcctaacctgtattgctgtggtaggtatcgaggacccagtgcgaccagaggtgccagatgctatcaaaaaatgtcagagggcaggaataaccgtgcgtatggtcacgggcgacaacatcaacacagcacgcgccattgctactaaatgcggcattctgcaccctggggaagatttcctttgcctggaggggaaggatttcaatcgccgaatccgcaacgagaagggtgagattgaacaggagaggattgacaaaatttggccgaaactgcgggtgctggctcgatcctctcctacagacaaacatacgttggtgaagggaatcatcgattctactgtttcggatcagaggcaagtcgtagccgtgactggcgacggcactaacgatggacccgctctaaaaaaggccgatgtagggttcgccatgggcatagcgggaaccgatgtggctaaggaggcttcagatattatcctaacagacgataactttacctccattgttaaagccgtgatgtggggccgcaacgtatacgactcaatctcgaagttccttcagttccaactgactgtgaacgtggtagcagtcatcgtggcctttaccggcgcttgcataacccaggactcccctctcaaggccgtgcaaatgctttgggtcaacttaattatggacaccttggcttccctcgccctcgccacagaacctccgacagagtccttgctgctgcggaagccgtatggcaggaacaaaccactgatcagtagaacaatgatgaaaaacatcctcgggcacgccttttaccagctcgtcgtagtgttcacactactgtttgcaggcgagaagttcttcgacatagactcgggacggaatgcccctctacacgctcctccctctgagcattacacaattgtgttcaatacctttgtgcttatgcaactgtttaatgaaatcaatgcccgcaagatccacggggaaagaaacgtctttgagggtattttcaacaatgccatcttttgcaccatcgtcctcggtaccttcgtagtacagattatcattgtccagttcggggggaaaccattttcttgctcggagctgtccatcgagcagtggctctggtcaatcttcctgggaatgggtactttactctggggacagttgatttcaacaatacctacctcacggttgaaatttctcaaagaagccgggcacgggacacagaaagaagagatccccgaagaggagttagctgaagacgtcgaggagatcgatcacgccgagagagagctcaggaggggacagattctatggtttcgggggctgaataggattcaaactcagatggatgtggtcaatgcgttccaaagcggctcaagcattcagggcgctctgcgtcgccagccaagtattgcctcccaacatcacgatgtgacaaatatcagtactcctactcatgtagtgttttcatcctctacagcatcaaccactgttggctattcttccggtgagtgcatctcctag

SEQ ID NO: 334301 - DNA, 3531 bp, Artificial Sequence
  derived and/or modified sequence
atgggtgatatggccaataactcagtcgcatactcaggagtaaaaaactccttgaaagaagctaatcacgacggagactttggcattaccctcgcagagctgcgcgctctgatggaactgcgcagcaccgatgctctgagaaaaatccaggaatcctatggagatgtgtacgggatttgcacaaagctgaagacctcacccaacgaaggcctctccgggaatcccgcagatctggagaggcgcgaagccgttttcgggaagaattttattcctcctaagaagcccaaaacttttttacagctggtgtgggaagctctgcaggatgtaactttgattatccttgaaatcgccgcaatcgtctccttgggcctgtctttctatcaaccacccgaaggggataacgcgctctgcggggaagtaagcgtgggtgaagaggagggggagggcgagacgggctggatagagggagcagctatcttactgtccgtggtttgcgttgtgctcgtgaccgccttcaacgactggtcgaaagagaaacagtttagagggttacagagtcgcattgaacaggaacaaaaattcacagtgatacggggaggccaggtgatacagatcccagttgccgacattaccgtaggtgacattgcgcaagtcaaatatggagatctgctgcctgccgacggaattctcatccaagggaatgatcttaaaatcgatgagagttcactgactggcgaatctgaccacgtcaagaagagcttagacaaggatccgctcctgttgtcagggacccatgtaatggaaggatccggcagaatggtcgtgactgccgtgggagttaacagtcagaccgggattatcttcacactgctgggggcaggaggggaagaagaagaaaagaaagatgagaaaaagaaggagaagaaaaacaagaaacaagacggggcaattgaaaatagaaacaaagctaaagcccaagatggggcagctatggagatgcagcccctgaaatctgaagaagggggagacggcgatgagaaggacaagaagaaggccaacctgccgaaaaaagaaaagagcgtcctgcagggcaagctgactaaactagccgtgcagatcgggaaagccggattgctgatgtccgcgatcaccgtcatcatccttgtcttgtacttcgtaatcgataccttctgggtccagaaaagaccatggctggctgaatgcactcctatctatattcaatacttcgtgaagttttttatcattggtgtgactgttcttgtagtggccgtcccggaggggttgccactggccgtgactatatctctcgcctatagtgttaagaaaatgatgaaggataacaacctggtacgacacctggatgcatgtgaaaccatgggcaatgcaaccgcaatatgcagtgacaaaacaggcaccctgacaatgaacaggatgacggtcgtccaagcatacatcaacgagaaacactataagaaggtcccagagcctgaagccattccccctaatatccttagctacctggttacaggcataagtgtgaactgtgcctatacgtcgaaaatcctgcctcccgaaaaggagggtggactcccccgacatgtcggcaacaagacggaatgtgccctactcggccttctgctggatcttaagagggattaccaagacgtgaggaatgagatccccgaagaagccctgtataaagtgtatacgttcaattcagtaagaaaaagcatgtcaacagtgcttaaaaatagcgacggatcctacaggatcttttccaaaggtgcttccgagatcattttaaaaaaatgctttaaaattttgtccgcgaatggagaagccaaagttttccgacccagggacagagacgacattgtgaaaactgtgattgagccgatggcttccgagggcctccggacaatctgcctcgcttttcgggatttccctgccggagagcctgagccagaatgggacaatgagaacgacattgtgactgggctgacctgcatcgctgtggtggggatcgaggacccagtgcgccctgaggtgccagacgcaatcaaaaagtgccagcgggctggcattactgtcagaatggtgacaggtgataatatcaacaccgcccgtgccatcgccactaagtgcgggatcctccacccaggcgaggactttctgtgcttagaagggaaggatttcaacaggcgtattcgaaatgaaaagggtgagattgaacaggaacggattgacaaaatttggcctaagctgcgggtcctggctcgctcttctccaaccgacaagcacacccttgtgaaagggatcatcgactcaactgtgtccgaccagcgacaagtagtcgcggtcaccggtgacggcacaaatgatggcccagccctgaagaaggccgatgtgggttttgctatgggtatcgcagggaccgacgtggctaaggaagcaagtgacatcatccttaccgacgacaattttacgagcatcgtgaaagccgtgatgtgggggagaaacgtttacgattccatttctaagtttcttcaatttcagctgaccgttaacgtggtggcagtgatcgttgcattcacaggagcctgcattacccaggatagtccgctcaaggccgtgcagatgctgtgggttaacctgattatggacaccctcgcttctctggcgctggctaccgagcccccaaccgaatcactgctcttgcggaagccctatggtcgcaacaaaccattaatctcccgtaccatgatgaaaaatatattaggccacgccttttaccagctagtcgttgtgtttacccttctgttcgctggcgaaaagttctttgatattgacagtggaagaaacgctcccttgcacgcgcctcccagcgagcactatacaattgtttttaacacgttcgtcctcatgcagctgttcaatgagatcaacgccagaaaaattcacggagaaaggaacgtgtttgaaggtatattcaacaacgctatcttttgcaccattgtcctgggaacattcgtcgtgcaaataataatcgtgcagttcggcggtaagccgttctcttgtagtgagcttagtattgaacagtggctgtggtccatttttctcgggatgggaaccctcctgtgggggcagttaatctctaccattccgaccagtaggctgaaattccttaaggaggcagggcatggaacacaaaaagaggagatccctgaggaagagctggccgaagacgtggaggagattgaccacgccgagcgggaactacgtaggggtcagatcttgtggtttcgcggtctgaatagaattcagacccagatggatgtggtgaatgcttttcagagtggcagctccattcagggcgcactgagacggcaaccttctatcgcttcacagcatcacgacgtcacaaatatcagcactcccactcacgtggtgttctcgtcttccacagcttccaccacagtgggttatagtagcggtgagtgtatttcatag

SEQ ID NO: 334302 - DNA, 6970 bp, Artificial Sequence
  derived and/or modified sequence
acagatgtgtatatctcatgattgatatggagaaactagtcatgggccaaaggtcaagatacttctctgggaaatgttgctgctgatgctgctttacaaagtcatacaatgagtgtttggtttaagaaagattttcatacttaaaagattttcatcttggaaatacatcaagtgaaaattaaattcttttgggaaacattttccttctgatatattatacttgtaatgggcgacatggcaaacaactcagttgcttacagtggtgtgaaaaactctttgaaggaagctaatcatgatggagactttggaattacgctcgcagagctgcgggctctcatggagctcaggtccacagatgcattacgaaaaatacaggaaagctatggagatgtctatggaatttgcaccaaattgaaaacatctcccaatgaaggtttaagtggaaaccctgcagatttagaaagaagagaagcagtgtttggaaagaattttatacctcctaaaaagccaaaaacctttcttcaattagtatgggaagcattacaagatgtcactttaattatattagaaattgcagccatagtatcattgggcctttctttttatcagcctccagaaggggataatgcactttgtggagaagtttctgttggggaggaagaaggtgaaggtgaaactggttggattgaaggagctgcaatcctcttgtctgtagtgtgtgtggtgttagtaacagctttcaatgactggagtaaggaaaaacagtttagaggtttgcagagccgaattgaacaagaacagaagttcactgtcatcaggggtggtcaggtcattcagatacctgtagctgacattactgttggagatattgctcaagtgaaatatggtgatcttcttccagctgacggcatacttattcaaggcaacgatcttaaaattgatgaaagctcattgactggtgaatcagatcatgttaaaaagtctttagataaggatcccttacttctatcaggtactcatgtaatggaaggctctggaagaatggtagttacagctgtaggtgtaaattctcaaactggaattatctttaccttacttggagctggaggtgaagaggaagagaagaaagatgagaagaaaaaggaaaagaaaaataagaaacaagatggagctattgagaatcgcaacaaagcaaaagcccaggatggtgcagccatggaaatgcagccattgaagagtgaagaaggtggagatggtgatgaaaaagataaaaagaaagcaaatttgccaaaaaaggaaaaatctgttttacaagggaaacttacaaaactggctgttcagattggcaaagcaggtctgttgatgtctgccatcacagttatcattctagtattatattttgtcattgacaccttctgggttcagaaaagaccatggcttgctgagtgcacaccaatttatatacaatactttgtgaagttcttcattattggagttacagttttagtggtcgcagtgccagaaggtcttccacttgcagtcacgatctcactggcttattcagtcaaaaaaatgatgaaagataataacttagtaaggcatctggatgcttgtgaaaccatgggaaatgctacagctatttgttcagataaaacaggaactttgacaatgaacagaatgacagtcgttcaagcttacataaatgaaaaacattataaaaaggttcctgaaccagaagctattccaccaaatattttgtcctatcttgtaacaggaatttctgtgaattgtgcttatacatcaaaaatattgccaccagagaaagagggtggattacctcgtcacgttggtaataaaactgaatgtgccttgttgggacttcttttggatttaaaacgggattatcaggatgttagaaatgaaataccagaagaagcactgtacaaagtctacaccttcaattctgttaggaagtccatgagtactgtcctgaaaaattcagatggaagttatcgaatattcagcaagggtgcatctgagataattctgaaaaagtgtttcaaaatcttgagtgctaatggtgaggcaaaagtattcagaccaagggaccgtgatgatattgtaaaaactgtgattgaaccgatggcatcagaaggcttgagaaccatatgtcttgcattcagagattttccagcaggagaaccagaaccagagtgggataatgaaaatgatattgtcaccggccttacatgcattgctgttgtggggattgaagatcctgtgagacctgaggtgccagatgcaattaaaaagtgtcagagggctggaattactgtgcggatggtcactggtgataatattaatactgctcgggccattgctaccaaatgtggtattttacatcctggggaagattttctgtgcctagaaggtaaagattttaacagaagaatacgaaatgaaaaaggagagattgagcaagagaggatagacaagatttggccaaaacttcgagtacttgcaagatcatctcctactgataagcatacactggttaaaggtataattgacagcactgtctcagaccaacgccaggttgtagctgtaactggtgatggtacaaatgatggcccagcactaaagaaagcagatgttggatttgcaatgggtattgctggaactgatgtagctaaagaagcatccgatattattctcacagatgacaactttacaagcattgttaaagcagttatgtggggacgaaatgtctatgacagcatctcaaaattccttcagttccaacttactgttaatgtagtagcagtgattgttgcttttacgggcgcctgcattactcaagactcaccgcttaaggctgtgcagatgctgtgggtaaacctcataatggatacactcgcttccctggctctggcaacggaaccacccactgagtctctcttgcttcggaaaccttatggtagaaataagcctctcatctcacgtacaatgatgaagaatattttgggtcatgcattctatcaacttgtagtagtctttacactcttatttgctggagaaaagttttttgacattgatagtggaagaaatgctcctttgcatgctcctccttcagaacattatactattgtttttaatacctttgtgctgatgcaacttttcaacgaaataaatgcccggaaaattcatggtgaaagaaatgtattcgaaggaatctttaacaatgccatcttctgcacaattgttttaggcacttttgtggtacagataataattgtgcagtttggtggaaaacctttcagttgttcagaactttcaatagaacagtggctatggtcaatattcctaggaatgggaacattactctggggccagcttatttcaacaattccaactagccgtttaaaattcctcaaagaagctggtcatggaacacaaaaggaagaaatacctgaggaggaattagcagaggatgttgaagagattgatcacgctgaaagggagttgcggcgtggccaaatcttgtggtttagaggtctgaacagaatccaaacacagatggatgtagtgaatgctttccagagtggaagttccattcagggggctctaaggcggcaaccctccatcgccagccagcatcatgatgtaacaaatatttctacccctacacatgtagtgttttcctcttctactgcttctactactgtggggtattcgagtggtgaatgcatttcgtagttctttatatgaagggttagaaaaaccggaatcaagaagttcgattcacaactttatgacacatcctgagtttaggatagaagattcagagcctcatatcccccttattgatgacactgatgccgaagatgatgctcctacaaaacgtaactccagtcctccaccctctcccaacaaaaataacaatgctgttgacagtggaattcaccttacaatagaaatgaacaagtctgctacctcttcatccccaggaagcccactacatagtttggaaacatcactctgattgtaagctgaatgttaacacactagctgcattgtaaagaaacaaattgaaactgggtcttttcacatattgtgatggacaagctagtattcttgtctttggacttcaacagaagacacacttgtacgaatgtagatttatttttttaaaaaaaaaaaagcaaagctttctgccagactgagggtgctttttggggggtgggagaaatgaactgacagataaacagtaactcagcgtaagtgacctgtggatcatcagtagtacccaagcatggtcctgaacagtgtattagcagagctttagtttatctcagtcctggatgggagagagagggaggagtaaaactgggcaagacaaagagccctggatcgttgaattgatagtttaatttctgctgttggctgttaataatttggattatttatgtttataaatgatacagatctgtttacaaggtttgtagatactttttttgttcctgttcatagatgggaagcttccttataactgatgcagagaaaaattagtccttcaaatactgctgtattttcaggaaaaaaaaaaaaaggggtgtttctattgaaactgtactaaatttttgcctacaatttaccttgttaaatattgtagataaattgctaatactaatagccaaatagataacactaatgctttgtttaaaaaaacgaaaaaaacaaaacaaaacaaaaaaacatgagcagtggtgttctaatgaagttatgacatctgtcctaattagtttcttaaatacatttactacttaatggttttgaagcaactgtttaatttttaaaatttttgaaaacttgctaataaccttttgttcagaatttagtagattgtttaatgcaggacatcaactacataatgaaagatgcttgaaatgcttttgttatttcaggcaaatcaaattaaatcagactatcaaactacaagagaaccttagtcttttttgtttttgtctaaacatgttagtttagtgatgtcttggtgaactgtgagtgaactgtattgatttttctaatctttagagaccttcacacagcatgagggctgttggcattttgaaaaaggttaataagtagaagcatacatgttttccttttgtttttgaaacttgtttgtaaacataaataaatatgcccttttattaaataaattcatggcaatgtttttttaaaagacatttcagcttctttactcagttctgcatatacagtgcatcagtctgttctctttgaccacaattggaatacatttcaagatggtaacagccccatgaagtaccgctttaattccttgctggtaatctaatagaatcagattaagaaaattaacacaattttaccatttgacatactcttcattgaatttagtttgtctaaaatagtctcacaggtaaaaaacataacaacaatgaccaccattgtctttgatacatttattttaattcttaagtggccaaataacagattaggtaaaatgagattacatgaaaaggttctaaaatgatatatttagatgcaataattaaccatatgctagaatgcccacctctaagccaattggattctttagctctctttttctttccttcatctaccttcttctcttttttgcctctgtctttaccctttagaaactggcatgtgttagggcccagatttcaccagatacacaatcctcaggctgacataaagtttacgaggactgctactataactgagagtgctgaccaagcaaagaaacatttagttgatggtgcttgatatttttggtgggtgggggaaatctttttctcaccatcaaatctttgcagtaatcctctgcaggtcttagaaacacattggctctgtcagcatttgtaattgtacatttattcatcaggtatttatagtgaatcatactgtaaaaaagaggtagcatgatatgctggaaagcatattagactaggagtcaagacctggtttctagtcttggttttgccattaatgtgctgcatgatcttgggaaaatcatttaccctaaataagggtggtggactatcttgaagaaccctttcaactctaaaaattgaccctatcaactggagagcccacaaggcatagggaatagagaaaagggaaatgttttcagttttcttttttattttggttatgcttaaatatgaatgtaattaccaaaagatttagaagtgcatgtgctttggaggatttgtattgagcttttacagtattcatttttcaactcaaggcaatggctttctacaccaactctaatccataaacgggtcttatgacatctatgaagtagtagcaagacatgcttagtgtgtatttctctctttgagacactgtaatttctaccagaaatttccagagcattatgtaggtagaaaaaaatgcaagcaagctgttaaagatcttggatcccattatatagtatgtatagctgaaatctgtaattcaatcactttttctcttttatcctctaaccaaaaaattgtttaattttgcatcccaaatgtttttaatctttgtatattttttaaaaatccttttctcctcatcattgccttttttgtggttgtaaatagacttacttgcactttgaagatgagttactccttgtcatcttacaaatatgtgatatggtaattttcataacagatgtcagttttgaaccaagaattggtgatttgtttataagaaaaaaactggcttcatttctgtgaaattgctctttgaaaatttctttttacacgtgtaagccaactgagataccgtgatggtgttgatttctttcaatgatgcttaccatctattttagccactgagccttttattatttgtctatttgtaaagtttatttgtcttaactcatttaataaatatactgtttatctgt

SEQ ID NO: 334303 - DNA, 3531 bp, Artificial Sequence
  derived and/or modified sequence
atgggcgacatggccaacaacagcgtggcctacagcggcgtgaagaacagcctgaaggaggccaaccacgacggcgacttcggcatcaccctggccgagctgagagccctgatggagctgagaagcaccgacgccctgagaaagatccaggagagctacggcgacgtgtacggcatctgcaccaagctgaagaccagccccaacgagggcctgagcggcaaccccgccgacctggagagaagagaggccgtgttcggcaagaacttcatcccccccaagaagcccaagaccttcctgcagctggtgtgggaggccctgcaggacgtgaccctgatcatcctggagatcgccgccatcgtgagcctgggcctgagcttctaccagccccccgagggcgacaacgccctgtgcggcgaggtgagcgtgggcgaggaggagggcgagggcgagaccggctggatcgagggcgccgccatcctgctgagcgtggtgtgcgtggtgctggtgaccgccttcaacgactggagcaaggagaagcagttcagaggcctgcagagcagaatcgagcaggagcagaagttcaccgtgatcagaggcggccaggtgatccagatccccgtggccgacatcaccgtgggcgacatcgcccaggtgaagtacggcgacctgctgcccgccgacggcatcctgatccagggcaacgacctgaagatcgacgagagcagcctgaccggcgagagcgaccacgtgaagaagagcctggacaaggaccccctgctgctgagcggcacccacgtgatggagggcagcggcagaatggtggtgaccgccgtgggcgtgaacagccagaccggcatcatcttcaccctgctgggcgccggcggcgaggaggaggagaagaaggacgagaagaagaaggagaagaagaacaagaagcaggacggcgccatcgagaacagaaacaaggccaaggcccaggacggcgccgccatggagatgcagcccctgaagagcgaggagggcggcgacggcgacgagaaggacaagaagaaggccaacctgcccaagaaggagaagagcgtgctgcagggcaagctgaccaagctggccgtgcagatcggcaaggccggcctgctgatgagcgccatcaccgtgatcatcctggtgctgtacttcgtgatcgacaccttctgggtgcagaagagaccctggctggccgagtgcacccccatctacatccagtacttcgtgaagttcttcatcatcggcgtgaccgtgctggtggtggccgtgcccgagggcctgcccctggccgtgaccatcagcctggcctacagcgtgaagaagatgatgaaggacaacaacctggtgagacacctggacgcctgcgagaccatgggcaacgccaccgccatctgcagcgacaagaccggcaccctgaccatgaacagaatgaccgtggtgcaggcctacatcaacgagaagcactacaagaaggtgcccgagcccgaggccatcccccccaacatcctgagctacctggtgaccggcatcagcgtgaactgcgcctacaccagcaagatcctgccccccgagaaggagggcggcctgcccagacacgtgggcaacaagaccgagtgcgccctgctgggcctgctgctggacctgaagagagactaccaggacgtgagaaacgagatccccgaggaggccctgtacaaggtgtacaccttcaacagcgtgagaaagagcatgagcaccgtgctgaagaacagcgacggcagctacagaatcttcagcaagggcgccagcgagatcatcctgaagaagtgcttcaagatcctgagcgccaacggcgaggccaaggtgttcagacccagagacagagacgacatcgtgaagaccgtgatcgagcccatggccagcgagggcctgagaaccatctgcctggccttcagagacttccccgccggcgagcccgagcccgagtgggacaacgagaacgacatcgtgaccggcctgacctgcatcgccgtggtgggcatcgaggaccccgtgagacccgaggtgcccgacgccatcaagaagtgccagagagccggcatcaccgtgagaatggtgaccggcgacaacatcaacaccgccagagccatcgccaccaagtgcggcatcctgcaccccggcgaggacttcctgtgcctggagggcaaggacttcaacagaagaatcagaaacgagaagggcgagatcgagcaggagagaatcgacaagatctggcccaagctgagagtgctggccagaagcagccccaccgacaagcacaccctggtgaagggcatcatcgacagcaccgtgagcgaccagagacaggtggtggccgtgaccggcgacggcaccaacgacggccccgccctgaagaaggccgacgtgggcttcgccatgggcatcgccggcaccgacgtggccaaggaggccagcgacatcatcctgaccgacgacaacttcaccagcatcgtgaaggccgtgatgtggggcagaaacgtgtacgacagcatcagcaagttcctgcagttccagctgaccgtgaacgtggtggccgtgatcgtggccttcaccggcgcctgcatcacccaggacagccccctgaaggccgtgcagatgctgtgggtgaacctgatcatggacaccctggccagcctggccctggccaccgagccccccaccgagagcctgctgctgagaaagccctacggcagaaacaagcccctgatcagcagaaccatgatgaagaacatcctgggccacgccttctaccagctggtggtggtgttcaccctgctgttcgccggcgagaagttcttcgacatcgacagcggcagaaacgcccccctgcacgccccccccagcgagcactacaccatcgtgttcaacaccttcgtgctgatgcagctgttcaacgagatcaacgccagaaagatccacggcgagagaaacgtgttcgagggcatcttcaacaacgccatcttctgcaccatcgtgctgggcaccttcgtggtgcagatcatcatcgtgcagttcggcggcaagcccttcagctgcagcgagctgagcatcgagcagtggctgtggagcatcttcctgggcatgggcaccctgctgtggggccagctgatcagcaccatccccaccagcagactgaagttcctgaaggaggccggccacggcacccagaaggaggagatccccgaggaggagctggccgaggacgtggaggagatcgaccacgccgagagagagctgagaagaggccagatcctgtggttcagaggcctgaacagaatccagacccagatggacgtggtgaacgccttccagagcggcagcagcatccagggcgccctgagaagacagcccagcatcgccagccagcaccacgacgtgaccaacatcagcacccccacccacgtggtgttcagcagcagcaccgccagcaccaccgtgggctacagcagcggcgagtgcatcagctag

SEQ ID NO: 334304 - DNA, 306 bp, Artificial Sequence
  derived and/or modified sequence
atgggggacatggcaaacaacagcgtggcctactcaggcgtcaaaaatagtctcaaagaagcaaaccatgatggagatttcggaatcactcttgccgagctgcgggctcttatggagctgcgatcaactgatgctctgcgtaagattcaggagagttatggcgatgtctacggcatctgtacgaagctcaaaaccagccccaacgagggggagttttattacgcatgtttttggtttttcgtacagagagtactttacatttggctgattaacgagcacgcctacatcattctggccattgtgtag

SEQ ID NO: 334305 - DNA, 306 bp, Artificial Sequence
  derived and/or modified sequence
atgggagacatggccaacaacagcgtggcctacagcggcgtgaagaacagcctgaaggaggccaaccatgatggagactttggcatcaccctggccgagctgcgggccctgatggagctgcggagcacagatgccctgaggaagatccaggagagctatggagatgtgtatggcatctgcaccaagctgaagaccagccccaatgaaggagagttctactatgcctgcttctggttctttgtgcagagggtgctgtacatctggctgatcaatgaacatgcctacatcatcctggccatcgtgtag

SEQ ID NO: 334306 - DNA, 306 bp, Artificial Sequence
  derived and/or modified sequence
atgggcgacatggccaacaacagcgtggcctacagcggcgtgaagaatagcctcaaagaagctaatcacgacggcgatttcggcatcaccctagcggaactgcgggctttgatggaactgcgcagtaccgatgcactgaggaagatccaagagagctacggggatgtctacggaatatgcacaaagctgaaaacgtctcccaacgaaggcgaattctattatgcgtgcttctggtttttcgtgcagcgggtgctatatatttggttaatcaatgaacacgcgtacataattctggcgatcgtctag

SEQ ID NO: 334307 - DNA, 306 bp, Artificial Sequence
  derived and/or modified sequence
atgggggacatggccaacaacagcgtggcctacagcggagttaaaaactccctgaaagaagccaaccatgatggagactttggcataacactcgctgaattacgcgcacttatggaactgaggtccacggatgcgctgaggaagatccaagaatcttatggtgacgtgtatgggatttgtaccaaattaaaaacttcccccaatgagggtgagttttactatgcctgcttttggtttttcgtccaaagggtgctgtacatctggttgattaatgaacacgcctatatcattttggcaatcgtttag

SEQ ID NO: 334308 - DNA, 607 bp, Artificial Sequence
  derived and/or modified sequence
gtggcagcgggagcagctgcgccgccagcgtggagcgggaggcgtgtgggtgtggagaaaagggagcgccagaccggaacggatgtgtatatctcatgattgatatggagaaactagtcatgggccaaaggtcaagatacttctctgggaaatgttgctgctgatgctgctttacaaagtcatacaatgagtgtttggtttaagaaagattttcatacttaaaagattttcatcttggaaatacatcaagtgaaaattaaattcttttgggaaacattttccttctgatatattatacttgtaatgggcgacatggcaaacaactcagttgcttacagtggtgtgaaaaactctttgaaggaagctaatcatgatggagactttggaattacgctcgcagagctgcgggctctcatggagctcaggtccacagatgcattacgaaaaatacaggaaagctatggagatgtctatggaatttgcaccaaattgaaaacatctcccaatgaaggtgagttttattatgcttgtttttggttctttgtgcaaagagttctatatatttggcttataaatgagcatgcttatattatcttggcgattgtat

SEQ ID NO: 334309 - DNA, 306 bp, Artificial Sequence
  derived and/or modified sequence
atgggcgacatggccaacaacagcgtggcctacagcggcgtgaagaacagcctgaaggaggccaaccacgacggcgacttcggcatcaccctggccgagctgagagccctgatggagctgagaagcaccgacgccctgagaaagatccaggagagctacggcgacgtgtacggcatctgcaccaagctgaagaccagccccaacgagggcgagttctactacgcctgcttctggttcttcgtgcagagagtgctgtacatctggctgatcaacgagcacgcctacatcatcctggccatcgtgtag

SEQ ID NO: 334310 - protein, 381 aa, Artificial Sequence
  derived and/or modified sequence
MMDLRNTPAKSLDKFIEDYLLPDTCFRMQINHAIDIICGFLKERCFRGSSYPVCVSKVVKGGSSGKGTTLRGRSDADLVVFLSPLTTFQDQLNRRGEFIQEIRRQLEACQRERAFSVKFEVQAPRWGNPRALSFVLSSLQLGEGVEFDVLPAFDALGQLTGGYKPNPQIYVKLIEECTDLQKEGEFSTCFTELQRDFLKQRPTKLKSLIRLVKHWYQNCKKKLGKLPPQYALELLTVYAWERGSMKTHFNTAQGFRTVLELVINYQQLCIYWTKYYDFKNPIIEKYLRRQLTKPRPVILDPADPTGNLGGGDPKGWRQLAQEAEAWLNYPCFKNWDGSPVSSWILLVNLTLVGRRNYIISEHAVNLQQTRGASLSYSFQVA

SEQ ID NO: 334311 - DNA, 1146 bp, Artificial Sequence
  derived and/or modified sequence
atgatggacctccggaatacaccagccaagtcgctggataagtttatagaggactatctgcttccagacacttgcttccgcatgcagataaatcatgctattgatatcatctgcggtttcctgaaagagcgatgctttaggggatccagctaccccgtttgcgtgagtaaagtcgttaagggtggctcctccggaaagggaaccaccttgagaggccgttctgatgccgatctggtggtcttcctgtcaccactaaccactttccaggaccagctcaatcgcagaggtgaattcatacaggagatcaggcgccagctcgaggcttgtcagcgcgaaagggccttcagcgtgaaattcgaggtacaagccccacgatggggaaacccaagggctctcagcttcgtgctgagttcactgcagctaggcgagggcgttgagttcgacgtgttaccagccttcgatgccctggggcaattgacgggaggatacaagcctaacccacaaatatacgttaagttaatcgaggaatgtacagatctccagaaggaaggcgagttctctacctgctttactgagttgcagcgggacttccttaaacagaggccgactaagctaaagagtctaattcggctggtgaagcattggtaccaaaactgtaagaagaagctagggaaactgcctccccagtacgctcttgagctattaaccgtatatgcctgggaacgcggcagcatgaaaacccacttcaatacagcgcagggctttagaacagtgttggaactcgtaatcaactatcaacaactgtgcatctactggaccaagtactatgattttaagaatcctattatcgagaaatatctgcgccgccagctgaccaagccccgccctgtaatcctcgatccagccgaccccactgggaatttagggggcggcgatcctaaggggtggcggcagttagcccaggaggctgaagcctggctcaattacccctgttttaaaaactgggatggatcacccgtatcctcttggatcctgctggtgaatttaacactggtgggccgcaggaactatatcatttccgagcacgccgtgaacctgcagcaaacacggggagccagcctgagctacagtttccaagtggcctag

SEQ ID NO: 334312 - DNA, 1146 bp, Artificial Sequence
  derived and/or modified sequence
atgatggacctgaggaacaccccagccaagagcctggacaagttcatcgaggactacctgctgcctgacacctgcttcaggatgcagatcaaccacgccatcgacatcatctgtggcttcctgaaggagcgctgcttccggggcagcagctaccctgtgtgtgtgtccaaggtggtgaagggcggcagcagcggcaagggcaccaccctgcggggccgcagtgatgctgacctggtggtgttcctgagccccctgaccaccttccaggaccagctgaacagaagaggagagttcatccaggagatccggcggcagctggaggcctgccagcgggagcgggccttctctgtgaagtttgaggtgcaggccccccgctggggcaacccccgggccctgagctttgtgctgagcagcctgcagctgggggagggcgtggagtttgatgtgctgcctgcctttgatgccctgggccagctgaccggcggctacaagcccaacccccagatctacgtgaagctgattgaggagtgcacagacctgcagaaggagggggagttcagcacctgcttcacagagctgcagagggacttcctgaagcagaggcccaccaagctgaagagcctcatccggctggtgaagcactggtaccagaactgcaagaagaagctgggcaagctgcccccccagtatgccctggagctgctgactgtgtatgcctgggagcggggctccatgaagacccacttcaacacagcccagggcttcagaacagtgctggagctggtgatcaactaccagcagctgtgcatctactggaccaagtactatgacttcaagaaccccatcatcgagaagtacctgcggcggcagctgaccaagcccaggcctgtgatcctggaccctgctgaccccactggaaacctgggcggcggggaccccaagggctggaggcagctggcccaggaggccgaggcctggctgaactacccctgcttcaagaactgggatggcagccctgtgtcctcctggatcctgctggtgaacctgaccctggtgggcagaagaaactacatcatcagcgagcacgctgtgaacctgcagcagaccaggggggccagcctgagctacagcttccaggtggcctag

SEQ ID NO: 334313 - DNA, 1146 bp, Artificial Sequence
  derived and/or modified sequence
atgatggacctgcggaacacccccgccaagagcctggacaagttcattgaggactatcttttacccgatacttgcttccgcatgcagattaaccatgccatagacatcatatgtggcttcctgaaagaacggtgttttagaggaagcagctaccctgtgtgtgtaagcaaggtggtaaagggtggaagttcagggaaggggaccaccctccgaggtaggagtgatgctgacctggtggtcttcctatccccccttactacgttccaagatcagctcaatcgcaggggcgaatttatacaggagatcaggcgtcaactcgaggcctgtcaaagggaaagggcatttagcgtcaagttcgaggtgcaggcgcctcgatggggaaatccacgtgcgttatcatttgtgctatcctctctgcagcttggtgagggagtcgagtttgacgtgctccctgcatttgacgccctcggacaactgaccggcggttataaaccaaaccctcagatatacgtcaagctgatcgaggaatgcacagacctccagaaagagggggaattcagcacttgctttaccgagcttcaacgcgattttctgaagcagcggccgacgaaactgaaaagtcttatcaggctggtgaagcactggtaccagaattgcaagaagaagctggggaagctccctccacagtatgccctggagctactgacggtatatgcttgggaaaggggcagtatgaagacccactttaacactgcgcagggatttcgcacagtgctggaacttgtgattaattatcagcagctgtgtatttactggactaagtattatgattttaagaatcccataatagaaaaatacctgcgccggcagttaaccaagccccgaccagtcattctggacccagccgacccaacaggcaatctggggggcggggacccgaaaggatggaggcagctggctcaggaggctgaagcctggctaaattatccctgctttaaaaactgggacgggagccctgtcagtagctggatcctcctggtgaatctgacacttgtgggccggaggaattacatcatcagcgaacacgcggtcaatttacagcaaacccgcggagccagtctgagctacagttttcaggtggcttag

SEQ ID NO: 334314 - DNA, 1146 bp, Artificial Sequence
  derived and/or modified sequence
atgatggacctgaggaatacacccgctaaatccctcgataaatttatcgaggactacctactcccagacacatgtttcaggatgcagatcaatcacgccatcgacatcatctgtggcttcctgaaagaaagatgtttcaggggttcttcttaccccgtgtgcgtgtcaaaggtagttaagggaggatctagcgggaaaggcacaacactacgcggtcgaagtgatgccgacttagtagtctttctgtcccctctgaccacttttcaggatcagttgaatagacgcggagagtttatccaagagatccgcagacagttagaagcctgccagagagaaagagcatttagcgtgaaattcgaagttcaggcaccgcgttggggaaaccctcgcgcattgtcctttgtgctgtcatcattgcagcttggggagggcgtagaattcgatgtcctgcccgcttttgacgccctgggacagctgaccggcggttataagccaaaccctcaaatttacgtgaaacttatcgaagaatgtactgacttgcaaaaggagggcgagttcagcacctgtttcactgagctccagcgagatttcctcaaacagaggcctaccaagctcaaatcactaatccgcctggtgaagcattggtaccagaattgcaagaagaagcttgggaagctccccccacaatatgcactggagctcctcacagtgtatgcttgggagcggggtagtatgaaaactcactttaacacagctcagggcttcagaacggtcctggaactcgtaataaattaccaacagctctgtatctactggaccaagtactatgatttcaagaatccgattatagaaaagtacctcagacgtcaactaacaaagccgagaccagtgatcctggatcccgctgaccccacagggaacctgggaggaggtgaccccaagggttggcggcagctggctcaggaagcagaagcctggcttaattacccgtgttttaaaaactgggacggatctccggtgtctagttggatccttttagtgaatcttactttggtcgggagacgaaactatataatcagtgagcatgcagtcaacctgcagcaaacaaggggcgcttctctgtcttatagctttcaggtcgcatag

SEQ ID NO: 334315 - DNA, 1376 bp, Artificial Sequence
  derived and/or modified sequence
gaggcagttctgttgccactctctctcctgtcaatgatggatctcagaaataccccagccaaatctctggacaagttcattgaagactatctcttgccagacacgtgtttccgcatgcaaatcaaccatgccattgacatcatctgtgggttcctgaaggaaaggtgcttccgaggtagctcctaccctgtgtgtgtgtccaaggtggtaaagggtggctcctcaggcaagggcaccaccctcagaggccgatctgacgctgacctggttgtcttcctcagtcctctcaccacttttcaggatcagttaaatcgccggggagagttcatccaggaaattaggagacagctggaagcctgtcaaagagagagagcattttccgtgaagtttgaggtccaggctccacgctggggcaacccccgtgcgctcagcttcgtactgagttcgctccagctcggggagggggtggagttcgatgtgctgcctgcctttgatgccctgggtcagttgactggcggctataaacctaacccccaaatctatgtcaagctcatcgaggagtgcaccgacctgcagaaagagggcgagttctccacctgcttcacagaactacagagagacttcctgaagcagcgccccaccaagctcaagagcctcatccgcctagtcaagcactggtaccaaaattgtaagaagaagcttgggaagctgccacctcagtatgccctggagctcctgacggtctatgcttgggagcgagggagcatgaaaacacatttcaacacagcccagggatttcggacggtcttggaattagtcataaactaccagcaactctgcatctactggacaaagtattatgactttaaaaaccccattattgaaaagtacctgagaaggcagctcacgaaacccaggcctgtgatcctggacccggcggaccctacaggaaacttgggtggtggagacccaaagggttggaggcagctggcacaagaggctgaggcctggctgaattacccatgctttaagaattgggatgggtccccagtgagctcctggattctgctggtaaacctcacactggttggcagaaggaactatataattagtgaacatgcggtgaatttgcaacagacaagaggagcctcattatcctatagtttccaggttgcttagggaggcagaaatcacagcaaggaaaaccttcaataataaacagacgtctcataaaattaattgcaacccaacctctctctctacttaaaattagcatctatttccagctctgctttcaatgccccatatgaatacatgtgaactccctccctctcttcctccctgtctccttctctctctctctgtccctcattaaa

SEQ ID NO: 334316 - DNA, 1146 bp, Artificial Sequence
  derived and/or modified sequence
atgatggacctgagaaacacccccgccaagagcctggacaagttcatcgaggactacctgctgcccgacacctgcttcagaatgcagatcaaccacgccatcgacatcatctgcggcttcctgaaggagagatgcttcagaggcagcagctaccccgtgtgcgtgagcaaggtggtgaagggcggcagcagcggcaagggcaccaccctgagaggcagaagcgacgccgacctggtggtgttcctgagccccctgaccaccttccaggaccagctgaacagaagaggcgagttcatccaggagatcagaagacagctggaggcctgccagagagagagagccttcagcgtgaagttcgaggtgcaggcccccagatggggcaaccccagagccctgagcttcgtgctgagcagcctgcagctgggcgagggcgtggagttcgacgtgctgcccgccttcgacgccctgggccagctgaccggcggctacaagcccaacccccagatctacgtgaagctgatcgaggagtgcaccgacctgcagaaggagggcgagttcagcacctgcttcaccgagctgcagagagacttcctgaagcagagacccaccaagctgaagagcctgatcagactggtgaagcactggtaccagaactgcaagaagaagctgggcaagctgcccccccagtacgccctggagctgctgaccgtgtacgcctgggagagaggcagcatgaagacccacttcaacaccgcccagggcttcagaaccgtgctggagctggtgatcaactaccagcagctgtgcatctactggaccaagtactacgacttcaagaaccccatcatcgagaagtacctgagaagacagctgaccaagcccagacccgtgatcctggaccccgccgaccccaccggcaacctgggcggcggcgaccccaagggctggagacagctggcccaggaggccgaggcctggctgaactacccctgcttcaagaactgggacggcagccccgtgagcagctggatcctgctggtgaacctgaccctggtgggcagaagaaactacatcatcagcgagcacgccgtgaacctgcagcagaccagaggcgccagcctgagctacagcttccaggtggcctag

SEQ ID NO: 334317 - protein, 275 aa, Artificial Sequence
  derived and/or modified sequence
MPACCSCSDVFQYETNKVTRIQSMNYGTIKWFFHVIIFSYVCFALVSDKLYQRKEPVISSVHTKVKGIAEVKEEIVENGVKKLVHSVFDTADYTFPLQGNSFFVMTNFLKTEGQEQRLCPEYPTRRTLCSSDRGCKKGWMDPQSKGIQTGRCVVYEGNQKTCEVSAWCPIEAVEEAPRPALLNSAENFTVLIKNNIDFPGHNYTTYAKYYKENNVEKRTLIKVFGIRFDILVFGTGGKFDIIQLVVYIGSTLSYFGLVRDSLFHALGKWFGEGSD

SEQ ID NO: 334318 - protein, 128 aa, Artificial Sequence
  derived and/or modified sequence
MPACCSCSDVFQYETNKVTRIQSMNYGTIKWFFHVIIFSYVCFALVSDKLYQRKEPVISSVHTKVKGIAEVKEEIVENGVKKLVHSVFDTADYTFPLQGNSFFVMTNFLKTEGQEQRLCPEEFRPEGV

SEQ ID NO: 334319 - DNA, 828 bp, Artificial Sequence
  derived and/or modified sequence
atgcctgcttgctgcagctgtagcgacgtctttcagtatgaaacaaataaagtgactaggatccagagcatgaactatggcactatcaaatggttttttcatgtcattattttcagctacgtgtgctttgccttggtgtctgacaagctctaccagcgtaaagaaccagttatcagctctgtgcacacaaaggttaaaggaattgccgaggtaaaagaagaaatcgtcgagaatggagtgaagaagttggtccactccgtatttgataccgcagactacactttcccactgcaagggaattcattctttgtgatgaccaattttctgaagactgagggccaggagcagcgcctctgccccgagtaccctacacgccgcaccctgtgtagctccgatcgaggctgcaagaagggttggatggacccccaatctaagggtattcagacgggtagatgcgtagtgtatgaaggcaaccagaaaacgtgtgaagtctcagcatggtgtccaattgaggctgtcgaggaagctcctcgtcccgccctcctcaattctgcagagaactttacggtgctgatcaagaacaatatcgactttccaggacacaactatacaacatatgcgaaatattataaagagaacaacgtcgaaaagcggacccttattaaagttttcggcattcggttcgatatactggtgtttggcactggtggcaagtttgacatcattcaactggtcgtatacatcggttctacactgagttatttcggcctcgtgcgggacagcctgttccacgcacttgggaaatggttcggtgagggctccgactag

SEQ ID NO: 334320 - DNA, 387 bp, Artificial Sequence
  derived and/or modified sequence
atgccagcctgttgcagttgctctgatgtttttcagtacgagaccaataaagtgacaagaatccagtcaatgaactatgggacgatcaaatggttttttcatgtgatcatcttcagctatgtctgttttgccttggtgtcggataagctgtatcagcggaaggagccagtgattagctctgtgcatactaaggttaaggggatcgcagaagtcaaagaggaaattgtagaaaatggtgtcaaaaaactcgttcattccgtgttcgataccgcagattatacctttcccctccagggcaattcatttttcgtaatgacaaacttcttaaagaccgaaggacaggagcagagactgtgtcctgaagagttccggcctgagggggtctag

SEQ ID NO: 334321 - DNA, 387 bp, Artificial Sequence
  derived and/or modified sequence
atgccagcctgctgcagctgcagcgatgtctttcaatacgaaactaataaggttacaagaatacagagtatgaactatggtaccatcaaatggttctttcacgtgatcatcttcagctatgtgtgctttgctctcgtctccgacaaactgtaccagagaaaggaaccagtgataagttctgtgcatacgaaggtcaagggcatagccgaagtaaaagaggagatcgtcgagaacggtgtgaaaaaattagtgcattctgtgtttgataccgctgattatacttttccactgcagggaaactcattctttgtcatgaccaacttcctaaagaccgaaggccaggagcagagactgtgcccggaagagttccgtccagagggtgtgtag

SEQ ID NO: 334322 - DNA, 828 bp, Artificial Sequence
  derived and/or modified sequence
atgcctgcctgctgcagctgcagtgatgtgttccagtatgagaccaacaaggtgacccgcatccagagcatgaactacggcaccatcaagtggttcttccacgtgatcatcttctcctatgtgtgctttgccctggtgtctgacaagctgtaccagaggaaggagcccgtcatcagctctgtgcacaccaaggtgaagggcattgctgaggtgaaggaggagatcgtggagaatggagtgaagaagctggtgcacagcgtgtttgacacagctgactacaccttccccctgcagggcaacagcttctttgtgatgaccaacttcctgaagacagagggccaggagcagaggctgtgcccagagtaccccaccaggaggaccctgtgcagcagtgaccggggctgcaagaagggctggatggacccccagagcaagggcatccagacaggccgctgtgtggtgtatgagggcaaccagaagacctgtgaggtgtctgcctggtgccccatcgaggccgtggaggaggcccccaggcctgccctgctgaacagcgctgagaacttcaccgtgctgatcaagaacaacatcgacttccctggccacaactacaccacctacgccaagtactacaaggagaacaacgtggagaagaggaccctcatcaaggtgtttggcatccgctttgacatcctggtgtttggaactggaggcaagtttgacatcatccagctggtggtgtacatcggcagcaccctgagctacttcggcctggtgcgggacagcctcttccacgccctgggcaagtggtttggagagggcagtgactag

SEQ ID NO: 334323 - DNA, 387 bp, Artificial Sequence
  derived and/or modified sequence
atgcctgcctgctgcagctgcagtgatgtgttccagtatgagaccaacaaggtgacccgcatccagagcatgaactacggcaccatcaagtggttcttccacgtgatcatcttctcctatgtgtgctttgccctggtgtctgacaagctgtaccagaggaaggagcccgtcatcagctctgtgcacaccaaggtgaagggcattgctgaggtgaaggaggagatcgtggagaatggagtgaagaagctggtgcacagcgtgtttgacacagctgactacaccttccccctgcagggcaacagcttctttgtgatgaccaacttcctgaagacagagggccaggagcagaggctgtgcccagaggagttccggcctgagggcgtgtag

SEQ ID NO: 334324 - DNA, 828 bp, Artificial Sequence
  derived and/or modified sequence
atgcccgcctgctgcagctgcagcgacgtgttccagtacgagaccaataaggtcactcggattcagtcgatgaactacggtacaattaagtggttctttcatgtaattatattctcttacgtgtgctttgcgctcgtctccgataaactttatcagagaaaggaaccagtgatttcctctgtgcatacaaaagttaagggtattgcagaagtcaaagaggaaatagttgaaaacggggtgaagaaattggtccatagtgtcttcgatacagccgactatacctttccgcttcagggtaatagcttttttgttatgaccaacttccttaagactgagggccaagagcagagactctgtcccgagtacccaactcggcgtacactgtgtagcagtgacagaggatgcaagaaaggatggatggacccacagtcaaagggtatccaaacagggaggtgtgtcgtgtatgagggcaaccaaaaaacttgcgaagtttctgcgtggtgccctattgaggccgtggaggaagccccgcggccggccttgctgaacagtgctgagaacttcactgtactaatcaagaataacatcgacttccccggacacaattacactacgtacgcaaagtactacaaggagaataacgtcgagaagcggactctgataaaggtcttcggcattcggtttgatatacttgtgtttggcactggcggcaaatttgacatcattcaactggtggtttacatcggctctacactgagttatttcggtctggtgcgcgactctctcttccacgcattgggcaaatggtttggagagggctccgactag

SEQ ID NO: 334325 - DNA, 387 bp, Artificial Sequence
  derived and/or modified sequence
atgcccgcctgctgcagctgcagcgacgtgttccagtacgagaccaacaaagttacccgtatacagagtatgaactatgggaccattaagtggtttttccatgtgatcattttcagttacgtgtgcttcgccctcgtttcagacaagttgtaccagaggaaagaaccggtgatttcatcagtgcacaccaaagtaaagggaattgccgaggtcaaggaagagatagtagagaatggagtgaagaaactggtacattctgtatttgatactgcggactacacatttccactccagggcaacagcttttttgtcatgaccaacttccttaagacagagggccaggagcaaaggctgtgccctgaggagtttcggccagagggcgtttag

SEQ ID NO: 334326 - DNA, 387 bp, Artificial Sequence
  derived and/or modified sequence
atgcccgcctgctgcagctgcagcgacgtgttccagtacgagaccaataaggtgacacggatacagtctatgaactacggcacaatcaaatggttcttccatgtaatcatcttttcatacgtgtgttttgccttggtgagcgataaactgtaccagagaaaagagccggttatctcctcggtgcacacaaaagtcaaaggtatcgccgaagtgaaagaggagatcgttgagaacggagtgaagaaactcgttcatagcgttttcgacacggctgattacacattcccgctgcaggggaatagtttctttgtcatgaccaactttttgaagacagaaggacaggagcagcgcctgtgccccgaggagtttcgccctgagggcgtgtag

SEQ ID NO: 334327 - DNA, 828 bp, Artificial Sequence
  derived and/or modified sequence
atgcctgcctgttgttcttgctccgatgtatttcagtatgaaacaaacaaggtgactcgcatacagtcaatgaactatgggaccatcaagtggtttttccacgtgattatcttctcttatgtgtgtttcgctctggtctctgataagctgtatcagcgtaaggagcccgtgatttcttccgtgcatactaaggtcaagggcatcgctgaggtaaaggaggaaatagtggaaaacggggtcaagaaactcgtgcatagcgtattcgatactgcggattacacttttcctttgcaaggaaactcattcttcgtcatgactaatttcctcaagaccgaagggcaggagcagagattgtgccctgagtatccaactagacggaccctgtgttcaagcgatcgcggttgcaagaagggatggatggacccacagtccaaaggtatacaaacaggccgttgcgtcgtgtacgaaggaaaccagaagacgtgcgaagtgtccgcatggtgcccgatcgaagctgtagaggaggcccctcgaccagcactactgaattcggctgagaattttactgttctgatcaaaaataatattgattttccgggacataattacaccacttatgcaaagtattacaaagagaacaatgtggaaaaacggaccctaattaaggtattcggcatccgcttcgacatcctcgtgttcggtaccggcggaaaatttgatatcatccagttagtggtgtatattggctccaccctgagttatttcgggctggtacgtgattcactgtttcatgccctcgggaagtggttcggcgagggatcagactag

SEQ ID NO: 334328 - DNA, 387 bp, Artificial Sequence
  derived and/or modified sequence
atgccagcgtgctgctcctgttcagatgtctttcagtacgagactaataaggtgactcgcatccagtccatgaactacggcactatcaagtggtttttccatgttatcatattctcatatgtttgtttcgccctggtgagcgacaaactgtatcagcgaaaagaacccgtgatttcttctgtgcatacgaaggtcaagggaatagccgaagtgaaggaagagattgtggagaatggagttaagaaacttgtccattccgttttcgatacggccgattataccttcccgctgcagggcaattcattctttgtcatgacaaactttctgaagactgagggccaagagcagagattgtgcccagaggaattcagaccagagggcgtgtag

SEQ ID NO: 334329 - DNA, 387 bp, Artificial Sequence
  derived and/or modified sequence
atgcctgcttgctgttcttgctccgatgtgttccagtatgagactaataaggtgacaaggatccaatccatgaattacggaacaatcaagtggttctttcatgtgattatattctcttacgtctgttttgccctcgtttctgataagttatatcagcggaaggagcccgtgatctcctcagtgcataccaaagtcaagggtatcgccgaagtgaaggaggagattgtggaaaatggcgtgaaaaagctggtacacagtgtcttcgatactgccgactacacctttcctctgcagggcaattccttcttcgtgatgaccaatttccttaagacggagggccaagaacaaaggctgtgtcctgaggaattcaggcctgaaggcgtgtag

SEQ ID NO: 334330 - DNA, 924 bp, Artificial Sequence
  derived and/or modified sequence
gtttcattttgcagttactgggagggggcttgctgtggccctgtcaggaagagtagagctctggtccagctccgcgcagggagggaggctgtcaccatgccggcctgctgcagctgcagtgatgttttccagtatgagacgaacaaagtcactcggatccagagcatgaattatggcaccattaagtggttcttccacgtgatcatcttttcctacgtttgctttgctctggtgagtgacaagctgtaccagcggaaagagcctgtcatcagttctgtgcacaccaaggtgaaggggatagcagaggtgaaagaggagatcgtggagaatggagtgaagaagttggtgcacagtgtctttgacaccgcagactacaccttccctttgcaggggaactctttcttcgtgatgacaaactttctcaaaacagaaggccaagagcagcggttgtgtcccgagtatcccacccgcaggacgctctgttcctctgaccgaggttgtaaaaagggatggatggacccgcagagcaaaggaattcagaccggaaggtgtgtagtgtatgaagggaaccagaagacctgtgaagtctctgcctggtgccccatcgaggcagtggaagaggccccccggcctgctctcttgaacagtgccgaaaacttcactgtgctcatcaagaacaatatcgacttccccggccacaactacaccacatacgccaagtactacaaggaaaacaatgttgagaaacggactctgataaaagtcttcgggatccgttttgacatcctggtttttggcaccggaggaaaatttgacattatccagctggttgtgtacatcggctcaaccctctcctacttcggtctggtaagagattctcttttccatgctttaggaaaatggtttggagaaggaagtgactaa

SEQ ID NO: 334331 - DNA, 1578 bp, Artificial Sequence
  derived and/or modified sequence
atgccggcctgctgcagctgcagtgatgttttccagtatgagacgaacaaagtcactcggatccagagcatgaattatggcaccattaagtggttcttccacgtgatcatcttttcctacgtttgctttgctctggtgagtgacaagctgtaccagcggaaagagcctgtcatcagttctgtgcacaccaaggtgaaggggatagcagaggtgaaagaggagatcgtggagaatggagtgaagaagttggtgcacagtgtctttgacaccgcagactacaccttccctttgcaggggaactctttcttcgtgatgacaaactttctcaaaacagaaggccaagagcagcggttgtgtcccgaggaattcagaccggaaggtgtgtagtgtatgaagggaaccagaagacctgtgaagtctctgcctggtgccccatcgaggcagtggaagaggccccccggcctgctctcttgaacagtgccgaaaacttcactgtgctcatcaagaacaatatcgacttccccggccacaactacaccacgagaaacatcctgccaggtttaaacatcacttgtaccttccacaagactcagaatccacagtgtcccattttccgactaggagacatcttccgagaaacaggcgataatttttcagatgtggcaattcagatacgccaagtactacaaggaaaacaatgttgagaaacggactctgataaaagtcttcgggatccgttttgacatcctggtttttggcaccggaggaaaatttgacattatccagctggttgtgtacatcggctcaaccctctcctacttcggtctggccgctgtgttcatcgacttcctcatcgacacttactccagtaactgctgtcgctcccatatttatccctggtgcaagtgctgtcagccctgtgtggtcaacgaatactactacaggaagaagtgcgagtccattgtggagccaaagccgacattaaagtatgtgtcctttgtggatgaatcccacattaggatggtgaaccagcagctactagggagaagtctgcaagatgtcaagggccaagaagtcccaagacctgcgatggacttcacagatttgtccaggctgcccctggccctccatgacacacccccgattcctggacaaccagaggagatacagctgcttagaaaggaggcgactcctagatccagggatagccccgtctggtgccagtgtggaagctgcctcccatctcaactccctgagagccacaggtgcctggaggagctgtgctgccggaaaaagccgggggcctgcatcaccacctcagagctgttcaggaagctggtcctgtccagacacgtcctgcagttcctcctgctctaccaggagcccttgctggcgctggatgtggattccaccaacagccggctgcggcactgtgcctacaggtgctacgccacctggcgcttcggctcccaggacatggctgactttgccaacctgcccagctgctgccgctggaggatccggaaagagtttccgaagagtgaagggcagtacagtggcttcaagagtccttactga

SEQ ID NO: 334332 - DNA, 828 bp, Artificial Sequence
  derived and/or modified sequence
atgcccgcctgctgcagctgcagcgacgtgttccagtacgagaccaacaaggtgaccagaatccagagcatgaactacggcaccatcaagtggttcttccacgtgatcatcttcagctacgtgtgcttcgccctggtgagcgacaagctgtaccagagaaaggagcccgtgatcagcagcgtgcacaccaaggtgaagggcatcgccgaggtgaaggaggagatcgtggagaacggcgtgaagaagctggtgcacagcgtgttcgacaccgccgactacaccttccccctgcagggcaacagcttcttcgtgatgaccaacttcctgaagaccgagggccaggagcagagactgtgccccgagtaccccaccagaagaaccctgtgcagcagcgacagaggctgcaagaagggctggatggacccccagagcaagggcatccagaccggcagatgcgtggtgtacgagggcaaccagaagacctgcgaggtgagcgcctggtgccccatcgaggccgtggaggaggcccccagacccgccctgctgaacagcgccgagaacttcaccgtgctgatcaagaacaacatcgacttccccggccacaactacaccacctacgccaagtactacaaggagaacaacgtggagaagagaaccctgatcaaggtgttcggcatcagattcgacatcctggtgttcggcaccggcggcaagttcgacatcatccagctggtggtgtacatcggcagcaccctgagctacttcggcctggtgagagacagcctgttccacgccctgggcaagtggttcggcgagggcagcgactag

SEQ ID NO: 334333 - DNA, 387 bp, Artificial Sequence
  derived and/or modified sequence
atgcccgcctgctgcagctgcagcgacgtgttccagtacgagaccaacaaggtgaccagaatccagagcatgaactacggcaccatcaagtggttcttccacgtgatcatcttcagctacgtgtgcttcgccctggtgagcgacaagctgtaccagagaaaggagcccgtgatcagcagcgtgcacaccaaggtgaagggcatcgccgaggtgaaggaggagatcgtggagaacggcgtgaagaagctggtgcacagcgtgttcgacaccgccgactacaccttccccctgcagggcaacagcttcttcgtgatgaccaacttcctgaagaccgagggccaggagcagagactgtgccccgaggagttcagacccgagggcgtgtag

SEQ ID NO: 334334 - DNA, 1278 bp, Artificial Sequence
  derived and/or modified sequence
atggatggccccgccgagcagcgcccggcactgctcaattccgccgaaaactttaccgtcctcataaagaataatattgattttccaggacataattatactactagaaatatcctccctgggctgaacattacgtgcacctttcacaagacacagaatcctcagtgtccaattttccggttgggggacatcttccgtgagaccggggacaatttctcagatgtagctattcagggtggcatcatgggaattgagatctactgggactgcaatctagaccgctggtttcatcattgtcgcccgaaatatagttttagaaggctcgatgataaaactacgaacgtaagcctctaccccggttataattttagatacgccaaatattataaggagaataatgtagagaaaaggacattgatcaaggtgtttggtatcagatttgatattctcgttttcggcactggtgggaagttcgatattatacagctggtggtttacataggcagcactctgtcatacttcggtttagccgctgtgttcatcgactttttgattgacacgtattccagcaactgctgcaggagccacatctacccttggtgcaagtgttgtcagccttgcgtcgtcaacgagtattactacaggaaaaagtgcgagagtatcgtagagcctaaaccaacactgaagtacgtgagttttgtggatgaaagtcatattcggatggtcaatcagcagctgttagggagaagcttgcaggatgtgaaaggacaggaagtgccacgcccagccatggactttactgacctgtctcgtctccctcttgcccttcacgacacccctccgatcccaggtcagcccgaagaaatccagctgctaagaaaagaagccaccccaagaagtagagattcaccagtttggtgtcaatgcggcagctgccttccatctcagctcccagagtcacacagatgcttagaagaattgtgttgtcgcaagaaacccggagcttgtatcacgacctccgagttgtttcggaaattagtcctgagcaggcacgtgcttcagtttctgctgttgtaccaggaaccactcctggcattggacgtcgactccaccaacagtcgcctgcgtcactgtgcataccggtgttatgccacctggaggtttgggtcccaggatatggcagattttgcgaatctgcctagctgctgccggtggcgtattcgcaaggaatttccgaagtctgagggccagtattcagggtttaaatccccctactag

SEQ ID NO: 334335 - DNA, 1278 bp, Artificial Sequence
  derived and/or modified sequence
atggatggccctgctgagcagaggcctgccctgctgaacagcgctgagaacttcaccgtgctgatcaagaacaacatcgacttccctggccacaactacaccaccaggaacatcctgcccggcctgaacatcacctgcaccttccacaagacccagaacccccagtgccccatcttccggctgggggacatcttccgggagaccggggacaacttcagtgatgtggccatccagggcggcatcatgggcatcgagatctactgggactgcaacctggaccgctggttccaccactgccggcccaagtacagcttccggcggctggatgacaagaccaccaacgtgtccctgtacccaggctacaacttccgctatgccaagtactacaaggaaaataatgtggagaagaggaccctcatcaaggtgtttggcatccgctttgacatcctggtgtttggcaccggcggcaagtttgacatcatccagctggtggtgtacatcggcagcaccctgagctacttcggcctggccgctgtgttcatcgacttcctgattgacacctacagcagcaactgctgccgcagccacatctacccctggtgcaagtgctgccagccctgtgtggtgaatgagtactactacaggaagaagtgtgagagcatcgtggagcccaagcccaccctgaagtatgtgtcctttgtggatgagagccacatccgcatggtgaaccagcagctgctgggccgcagcctgcaggatgtgaagggccaggaggtgcccaggcctgccatggacttcacagacctgagccggctgcccctggccctgcatgacaccccacccatccctggccagcctgaggagatccagctgctgaggaaggaggccacccccaggagccgggacagccctgtgtggtgccagtgtggcagctgcctgcccagccagctgcctgagagccaccgctgcctggaggagctgtgctgcaggaagaagccaggggcctgcatcaccaccagcgagctgttcaggaagctggtgctgagcagacatgtgctgcagttcctgctgctgtaccaggagcccctgctggccctggatgtggacagcaccaacagccggctgcggcactgtgcctaccgctgctacgccacctggaggtttggcagccaggacatggctgactttgccaacctgcccagctgctgccgctggaggatcaggaaggagttccccaagtctgagggccagtacagcggcttcaagagcccctactag

SEQ ID NO: 334336 - DNA, 1278 bp, Artificial Sequence
  derived and/or modified sequence
atggacggccccgccgagcagcggcccgccctgctgaacagcgccgagaacttcacggtgctcataaaaaacaacattgacttccccggtcataattataccactaggaatattctccctggccttaacatcacatgcactttccacaagacacagaatccgcagtgccctatatttagactgggggatatcttcagagagacgggcgacaacttttccgacgtggcaattcagggcggaataatgggcatcgagatctattgggactgcaaccttgatcgatggtttcaccactgccgccccaaatatagtttcagaaggctggacgacaagaccaccaacgtcagtttgtatccggggtacaactttagatatgccaagtactacaaagagaacaatgtagagaaacgcacacttatcaaggtcttcggaattcggtttgatattctggtgtttggtacaggcggtaaatttgacattatccaactggtggtttatattggctcgacactctcatatttcggcctggctgcggtgtttatcgatttcctgattgacacctactccagcaactgttgccgctcgcacatatatccatggtgtaaatgctgtcagccatgtgtcgtcaacgaatactactatcggaagaagtgtgagagcattgtagaacccaaacccacactgaagtacgtgtctttcgtggacgagtctcacattcggatggtgaatcagcagttactgggacgctccctgcaggatgtgaaaggccaagaggtgccccgcccagcgatggatttcaccgatcttagtcgcctaccgcttgcactgcacgatactccacctatccctggccagcccgaagaaatccagctgttacgcaaggaggcgacaccgcggagccgggacagccctgtttggtgccagtgcggtagctgccttcccagccaattacccgaaagccatagatgcctcgaagagctgtgttgtcggaaaaaacctggagcatgtattacaacaagcgagctgttccgcaagcttgtgctgtcccggcacgttctgcagttccttctgttgtaccaagagccccttttggctcttgacgtagatagcactaattctaggttgcgtcactgtgcttataggtgttacgccacatggcggtttgggtctcaggacatggcagatttcgccaacctcccatcttgctgtcgatggcgcattcggaaagaatttccaaaaagcgagggacaatattccggcttcaagagcccttactag

SEQ ID NO: 334337 - DNA, 1278 bp, Artificial Sequence
  derived and/or modified sequence
atggatggtccagccgaacagagaccagcactgctgaactccgcagaaaacttcaccgttctcattaaaaataacattgattttcctggtcataactacaccactagaaatattcttcccggtctgaatattacctgcacgttccacaaaacacagaacccacagtgccccatctttagactgggcgacatttttcgcgagaccggggacaatttctcagatgtcgcaatccaaggagggattatgggcattgaaatttattgggattgcaacctagatcgctggttccaccattgcagacccaaatatagcttcaggcggctcgacgacaagaccactaacgttagcctgtacccaggctacaatttccgctacgctaaatactacaaagagaataacgtggagaagcggactttaattaaagtgtttggaattaggtttgatattcttgtgttcggaactggaggcaagttcgacattattcagctggtagtctacataggctccaccctcagctactttggactggcggcagtttttattgacttcctgattgatacctactccagcaactgctgcagatctcacatttacccatggtgtaaatgctgccagccttgtgttgtaaacgagtactattaccggaagaagtgcgagtcaatcgtagagccgaagccaactctgaagtacgtttcatttgtcgatgagtcacacataaggatggtgaaccaacagctcctgggcaggagtctgcaggacgttaagggacaggaggtgccaaggccagctatggacttcacagacttgagtagactacctttagctctgcacgacacaccgccaatccccggacagccggaagagatacagctgttgcggaaggaggcaacacccagatccagagattcccctgtatggtgtcaatgtggctcctgcctcccaagccagctccctgagagtcacagatgtctcgaagaattgtgttgccggaagaaaccaggcgcatgtatcacaactagtgagctgttccggaaattggtgttatctcgacatgtcctgcagttccttcttctgtatcaagagccgctattggcattagatgtggatagtaccaatagccgcttgagacattgcgcctatcgctgctatgctacttggcggttcggttctcaagatatggctgactttgcaaatctcccctcctgttgccgctggcgcatccggaaagaattccctaagtcggagggtcagtattcgggtttcaaatccccttattag

SEQ ID NO: 334338 - DNA, 1799 bp, Artificial Sequence
  derived and/or modified sequence
atgccggcctgctgcagctgcagtgatgttttccagtatgagacgaacaaagtcactcggatccagagcatgaattatggcaccattaagtggttcttccacgtgatcatcttttcctacgtttgctttgctctggtgagtgacaagctgtaccagcggaaagagcctgtcatcagttctgtgcacaccaaggtgaaggggatagcagaggtgaaagaggagatcgtggagaatggagtgaagaagttggtgcacagtgtctttgacaccgcagactacaccttccctttgcaggggaactctttcttcgtgatgacaaactttctcaaaacagaaggccaagagcagcggttgtgtcccgaggaattcagaccggaaggtgtgtagtgtatgaagggaaccagaagacctgtgaagtctctgcctggtgccccatcgaggcagtggaagaggccccccggcctgctctcttgaacagtgccgaaaacttcactgtgctcatcaagaacaatatcgacttccccggccacaactacaccacgagaaacatcctgccaggtttaaacatcacttgtaccttccacaagactcagaatccacagtgtcccattttccgactaggagacatcttccgagaaacaggcgataatttttcagatgtggcaattcagggcggaataatgggcattgagatctactgggactgcaacctagaccgttggttccatcactgccgtcccaaatacagtttccgtcgccttgacgacaagaccaccaacgtgtccttgtaccctggctacaacttcagatacgccaagtactacaaggaaaacaatgttgagaaacggactctgataaaagtcttcgggatccgttttgacatcctggtttttggcaccggaggaaaatttgacattatccagctggttgtgtacatcggctcaaccctctcctacttcggtctggtaagagattctcttttccatgctttaggaaaatggtttggagaaggaagtgactaacgcagcgcttgtctgcattctccccaggccgctgtgttcatcgacttcctcatcgacacttactccagtaactgctgtcgctcccatatttatccctggtgcaagtgctgtcagccctgtgtggtcaacgaatactactacaggaagaagtgcgagtccattgtggagccaaagccgacattaaagtatgtgtcctttgtggatgaatcccacattaggatggtgaaccagcagctactagggagaagtctgcaagatgtcaagggccaagaagtcccaagacctgcgatggacttcacagatttgtccaggctgcccctggccctccatgacacacccccgattcctggacaaccagaggagatacagctgcttagaaaggaggcgactcctagatccagggatagccccgtctggtgccagtgtggaagctgcctcccatctcaactccctgagagccacaggtgcctggaggagctgtgctgccggaaaaagccgggggcctgcatcaccacctcagagctgttcaggaagctggtcctgtccagacacgtcctgcagttcctcctgctctaccaggagcccttgctggcgctggatgtggattccaccaacagccggctgcggcactgtgcctacaggtgctacgccacctggcgcttcggctcccaggacatggctgactttgccaacctgcccagctgctgccgctggaggatccggaaagagtttccgaagagtgaagggcagtacagtggcttcaagagtccttactga

SEQ ID NO: 334339 - DNA, 1278 bp, Artificial Sequence
  derived and/or modified sequence
atggacggccccgccgagcagagacccgccctgctgaacagcgccgagaacttcaccgtgctgatcaagaacaacatcgacttccccggccacaactacaccaccagaaacatcctgcccggcctgaacatcacctgcaccttccacaagacccagaacccccagtgccccatcttcagactgggcgacatcttcagagagaccggcgacaacttcagcgacgtggccatccagggcggcatcatgggcatcgagatctactgggactgcaacctggacagatggttccaccactgcagacccaagtacagcttcagaagactggacgacaagaccaccaacgtgagcctgtaccccggctacaacttcagatacgccaagtactacaaggagaacaacgtggagaagagaaccctgatcaaggtgttcggcatcagattcgacatcctggtgttcggcaccggcggcaagttcgacatcatccagctggtggtgtacatcggcagcaccctgagctacttcggcctggccgccgtgttcatcgacttcctgatcgacacctacagcagcaactgctgcagaagccacatctacccctggtgcaagtgctgccagccctgcgtggtgaacgagtactactacagaaagaagtgcgagagcatcgtggagcccaagcccaccctgaagtacgtgagcttcgtggacgagagccacatcagaatggtgaaccagcagctgctgggcagaagcctgcaggacgtgaagggccaggaggtgcccagacccgccatggacttcaccgacctgagcagactgcccctggccctgcacgacaccccccccatccccggccagcccgaggagatccagctgctgagaaaggaggccacccccagaagcagagacagccccgtgtggtgccagtgcggcagctgcctgcccagccagctgcccgagagccacagatgcctggaggagctgtgctgcagaaagaagcccggcgcctgcatcaccaccagcgagctgttcagaaagctggtgctgagcagacacgtgctgcagttcctgctgctgtaccaggagcccctgctggccctggacgtggacagcaccaacagcagactgagacactgcgcctacagatgctacgccacctggagattcggcagccaggacatggccgacttcgccaacctgcccagctgctgcagatggagaatcagaaaggagttccccaagagcgagggccagtacagcggcttcaagagcccctactag

SEQ ID NO: 334340 - protein, 306 aa, Artificial Sequence
  derived and/or modified sequence
MWQFRYAKYYKENNVEKRTLIKVFGIRFDILVFGTGGKFDIIQLVVYIGSTLSYFGLAAVFIDFLIDTYSSNCCRSHIYPWCKCCQPCVVNEYYYRKKCESIVEPKPTLKYVSFVDESHIRMVNQQLLGRSLQDVKGQEVPRPAMDFTDLSRLPLALHDTPPIPGQPEEIQLLRKEATPRSRDSPVWCQCGSCLPSQLPESHRCLEELCCRKKPGACITTSELFRKLVLSRHVLQFLLLYQEPLLALDVDSTNSRLRHCAYRCYATWRFGSQDMADFANLPSCCRWRIRKEFPKSEGQYSGFKSPY

SEQ ID NO: 334341 - DNA, 921 bp, Artificial Sequence
  derived and/or modified sequence
atgtggcagtttaggtacgcgaagtattataaagaaaacaacgtggagaagagaactttgattaaggtcttcggcatcagatttgacattctggtgttcggcactggaggaaaatttgatatcatccagctcgtcgtctacattggaagcaccctaagttactttggccttgccgcagtgttcattgactttcttattgacacctactcctcaaattgttgtcgctctcatatctatccatggtgtaaatgttgtcaaccctgcgtagtaaacgaatactattacaggaagaagtgtgagtccatagtggaacccaagccgactctcaaatacgtctcgttcgtggacgagtcgcacataaggatggtgaatcagcagcttttgggcaggtccctccaggacgtgaaaggccaagaggtaccgcgccctgctatggactttactgacctgagtaggttgccactggcccttcatgatacaccaccaattccaggacaaccagaagagatacaactgctgagaaaggaggcaacaccaagatctcgtgactctccggtttggtgccaatgtggcagctgcctgccatcacagcttcctgagagccacagatgtcttgaagagctctgctgtcgaaaaaaacctggcgcctgtattaccacgtccgaacttttccgcaaactggtcttgtcccggcatgtgctgcagttcctgctcttgtatcaggagcccctcctggctctggacgtcgattcaactaattcgaggctgagacattgtgcgtaccgttgctacgccacttggcgatttgggtcccaagacatggctgatttcgccaatctgccatcctgctgcaggtggcgcatacggaaggaattccccaaatctgaggggcaatatagtggcttcaagagcccctactag

SEQ ID NO: 334342 - DNA, 921 bp, Artificial Sequence
  derived and/or modified sequence
atgtggcagttccgctatgccaagtactacaaggagaacaacgtggagaagaggaccctcatcaaggtgtttggcatccgctttgacatcctggtgtttggaactggaggcaagtttgacatcatccagctggtggtgtacatcggcagcaccctgagctacttcggcctggccgctgtgttcatcgacttcctgattgacacctacagcagcaactgctgccgcagccacatctacccctggtgcaagtgctgccagccctgtgtggtgaatgagtactactacaggaagaagtgtgagagcatcgtggagcccaagcccaccctgaagtatgtgtcctttgtggatgagagccacatccgcatggtgaaccagcagctgctgggccgcagcctgcaggatgtgaagggccaggaggtgcccaggcctgccatggacttcacagacctgagccggctgcccctggccctgcatgacaccccacccatccctggccagcctgaggagatccagctgctgaggaaggaggccacccccaggagccgggacagccctgtgtggtgccagtgtggcagctgcctgcccagccagctgcctgagagccaccgctgcctggaggagctgtgctgcaggaagaagccaggggcctgcatcaccaccagcgagctgttcaggaagctggtgctgagccgccacgtgctgcagttcctgctgctgtaccaggagcccctgctggccctggatgtggacagcaccaacagccggctgcggcactgtgcctaccgctgctacgccacctggaggtttggcagccaggacatggctgactttgccaacctgcccagctgctgccgctggaggatcaggaaggagttccccaagtctgagggccagtacagcggcttcaagagcccctactag

SEQ ID NO: 334343 - DNA, 921 bp, Artificial Sequence
  derived and/or modified sequence
atgtggcagttccggtacgccaagtactacaaggagaacaacgtggagaaaagaacactgataaaagtcttcggcatcagatttgatatcttggtgtttgggactggtgggaaattcgatattatacagcttgtggtctacatcggctctacactgagctatttcggactggctgccgtgttcatcgatttcttaattgatacatactccagcaactgttgtagatcgcatatctatccatggtgcaaatgttgccagccatgcgtagtgaatgagtactattatagaaaaaaatgcgaatccatcgtggaacctaagcctacacttaagtacgtgtccttcgttgacgagagtcacatacggatggtgaaccagcagctgctggggcggagtctgcaggatgttaaaggccaagaggtcccaaggcctgccatggattttaccgacctttctcggctgccactagccctgcatgatacaccccctatccccgggcaacccgaagagatacagctgctgcgcaaggaggccacacctcgaagccgggactcacccgtgtggtgtcagtgtggctcttgtcttcccagtcagctacctgagtcccatcgctgcttggaagagctatgttgcaggaaaaaacccggcgcctgcataaccacttctgagctttttagaaagctggtgctgagccgccatgtgctgcagttcctcctgttgtaccaagagccccttttggcattagacgtcgattcaaccaacagccgcctccgtcactgcgcctaccgctgctacgccacctggcgattcgggtctcaagacatggccgatttcgccaatcttccgtcttgttgtcggtggaggattcggaaagagttccccaagagtgaaggccaatatagcggctttaagtcgccatattag

SEQ ID NO: 334344 - DNA, 921 bp, Artificial Sequence
  derived and/or modified sequence
atgtggcagttccgatatgcgaagtactacaaagagaataacgtggaaaagaggaccttgatcaaagtattcggcatccggttcgatattcttgtgtttggcaccggtgggaagtttgatattatccagctggtcgtatacattggatctacactgagttactttggactggctgcggtattcatagattttttaatcgacacgtactccagcaattgctgtagaagccacatatacccctggtgcaagtgctgccagccgtgcgttgtcaacgagtactactacagaaaaaaatgtgagagcattgtggagcctaagcccacgttgaaatatgtcagcttcgtagatgagtctcacatccggatggttaaccagcagttactcgggaggtccctgcaggacgtaaaggggcaggaggtgcctcggccagccatggacttcactgatctgtcccgacttcccctcgctctccatgacactcccccaattcctggccagcccgaggagatacagcttctcagaaaggaagctacccccaggtctagggatagtccggtgtggtgccagtgtgggagttgcctgccttcccagttaccagagtcccatcgttgcctggaggaactgtgctgtcgcaaaaagcccggtgcttgcattacgacaagcgaattattccggaaactggttctttcacgtcatgtgctgcagttcctactgctataccaagaaccattgttagcactggacgtggattccaccaacagtagactgcgtcattgcgcataccgatgctacgcaacttggaggttcggtagccaggatatggcagattttgctaacctgcccagctgttgccgctggcgaattcgcaaggaatttcccaaatctgaggggcaatatagcggcttcaaaagtccctactag

SEQ ID NO: 334345 - DNA, 921 bp, Artificial Sequence
  derived and/or modified sequence
atgtggcagttcagatacgccaagtactacaaggagaacaacgtggagaagagaaccctgatcaaggtgttcggcatcagattcgacatcctggtgttcggcaccggcggcaagttcgacatcatccagctggtggtgtacatcggcagcaccctgagctacttcggcctggccgccgtgttcatcgacttcctgatcgacacctacagcagcaactgctgcagaagccacatctacccctggtgcaagtgctgccagccctgcgtggtgaacgagtactactacagaaagaagtgcgagagcatcgtggagcccaagcccaccctgaagtacgtgagcttcgtggacgagagccacatcagaatggtgaaccagcagctgctgggcagaagcctgcaggacgtgaagggccaggaggtgcccagacccgccatggacttcaccgacctgagcagactgcccctggccctgcacgacaccccccccatccccggccagcccgaggagatccagctgctgagaaaggaggccacccccagaagcagagacagccccgtgtggtgccagtgcggcagctgcctgcccagccagctgcccgagagccacagatgcctggaggagctgtgctgcagaaagaagcccggcgcctgcatcaccaccagcgagctgttcagaaagctggtgctgagcagacacgtgctgcagttcctgctgctgtaccaggagcccctgctggccctggacgtggacagcaccaacagcagactgagacactgcgcctacagatgctacgccacctggagattcggcagccaggacatggccgacttcgccaacctgcccagctgctgcagatggagaatcagaaaggagttccccaagagcgagggccagtacagcggcttcaagagcccctactag

SEQ ID NO: 334346 - protein, 117 aa, Artificial Sequence
  derived and/or modified sequence
MSTAVLENPGLGRKLSDFGQETSYIEDNCNQNGAISLIFSLKEEVGALAKVLRLFEENDVNLTHIESRPSRLKKDEYEFFTHLDKRSLPALTNIIKILRHDIGATVHELSRDKKKDT

SEQ ID NO: 334347 - DNA, 351 bp, Artificial Sequence
  derived and/or modified sequence
atgagcaccgccgtgctggagaaccccggcctgggccgcaagctgagcgacttcggccaggagaccagctacatcgaggacaactgcaaccagaacggcgccatcagcctgatcttcagcctgaaggaggaggtgggcgccctggccaaggtgctgcgcctgttcgaggagaacgacgtgaacctgacccacatcgagagccgccccagccgcctgaagaaggacgagtacgagttcttcacccacctggacaagcgcagcctgcccgccctgaccaacatcatcaagatcctgcgccacgacatcggcgccaccgtgcacgagctgagccgcgacaagaagaaggacacc

SEQ ID NO: 334348 - DNA, 408 bp, Artificial Sequence
  derived and/or modified sequence
atgagcaccgccgtgctggagaaccccggcctgggccgcaagctgagcgacttcggccaggagaccagctacatcgaggacaactgcaaccagaacggcgccatcagcctgatcttcagcctgaaggaggaggtgggcgccctggccaaggtgctgcgcctgttcgaggagaacgacgtgaacctgacccacatcgagagccgccccagccgcctgaagaaggacgagtacgagttcttcacccacctggacaagcgcagcctgcccgccctgaccaacatcatcaagatcctgcgccacgacatcggcgccaccgtgcacgagctgagccgcgacaagaagaaggacaccgtgccctggttcccccgcaccatccaggagctggaccgcttcgccaaccagatcctg

SEQ ID NO: 334349 - DNA, 354 bp, Artificial Sequence
  derived and/or modified sequence
atgagcaccgccgtgctggagaaccccggcctgggcagaaagctgagcgacttcggccaggagaccagctacatcgaggacaactgcaaccagaacggcgccatcagcctgatcttcagcctgaaggaggaggtgggcgccctggccaaggtgctgagactgttcgaggagaacgacgtgaacctgacccacatcgagagcagacccagcagactgaagaaggacgagtacgagttcttcacccacctggacaagagaagcctgcccgccctgaccaacatcatcaagatcctgagacacgacatcggcgccaccgtgcacgagctgagcagagacaagaagaaggacacctag

SEQ ID NO: 334350 - DNA, 411 bp, Artificial Sequence
  derived and/or modified sequence
atgagcaccgccgtgctggagaaccccggcctgggcagaaagctgagcgacttcggccaggagaccagctacatcgaggacaactgcaaccagaacggcgccatcagcctgatcttcagcctgaaggaggaggtgggcgccctggccaaggtgctgagactgttcgaggagaacgacgtgaacctgacccacatcgagagcagacccagcagactgaagaaggacgagtacgagttcttcacccacctggacaagagaagcctgcccgccctgaccaacatcatcaagatcctgagacacgacatcggcgccaccgtgcacgagctgagcagagacaagaagaaggacaccgtgccctggttccccagaaccatccaggagctggacagattcgccaaccagatcctgtag

SEQ ID NO: 334351 - DNA, 354 bp, Artificial Sequence
  derived and/or modified sequence
atgtcaacggcagtcctcgagaatcccggccttgggcggaaactcagtgactttggacaggagaccagctacatagaagataactgtaatcagaatggggcaatttccctaatcttcagtctgaaagaggaagtgggcgctttagcaaaggtgttgagactattcgaagaaaatgatgtgaacctgactcacattgagtctcgaccgagcagattgaagaaggatgagtacgaattttttactcatctcgataagcggtccctgccagctctgactaacattatcaagatactccgacacgatatcggcgcaaccgtccacgaactcagtcgcgataaaaagaaggatacttag

SEQ ID NO: 334352 - DNA, 411 bp, Artificial Sequence
  derived and/or modified sequence
atgtccaccgcagtgctggagaatcccggtttgggccgtaagctgtctgacttcggacaggagacctcttatatcgaagataattgtaatcaaaacggcgcgatcagcctcattttttctctgaaggaggaggtgggagccttggccaaagtgcttagactattcgaagaaaatgatgttaacctcacccatattgagagcaggccctcacgactcaagaaggatgaatacgagttcttcacacatttagacaagagaagcctacccgctctgactaacatcatcaagatcctccgccacgatataggtgccaccgtccatgaactgagtcgagacaagaaaaaagatactgtgccatggtttccacgcaccatccaagaactcgaccggttcgccaaccagatcctctag

SEQ ID NO: 334353 - DNA, 354 bp, Artificial Sequence
  derived and/or modified sequence
atgagcacagctgtgctggagaaccctggcctgggcaggaagctgagtgactttggccaggagaccagctacatcgaggacaactgcaaccagaatggagccatcagcctcatcttcagcctgaaggaggaggtgggcgccctggccaaggtgctgcggctgtttgaagaaaatgatgtgaacctgacccacatcgagagccggcccagccggctgaagaaggatgaatatgagttcttcacccacctggacaagaggagcctgcctgccctgaccaacatcatcaagatcctgcggcatgacatcggggccaccgtgcatgagctgagccgggacaagaagaaggacacctag

SEQ ID NO: 334354 - DNA, 411 bp, Artificial Sequence
  derived and/or modified sequence
atgagcacagctgtgctggagaaccctggcctgggcaggaagctgagtgactttggccaggagaccagctacatcgaggacaactgcaaccagaatggagccatcagcctcatcttcagcctgaaggaggaggtgggcgccctggccaaggtgctgcggctgtttgaagaaaatgatgtgaacctgacccacatcgagagccggcccagccggctgaagaaggatgaatatgagttcttcacccacctggacaagaggagcctgcctgccctgaccaacatcatcaagatcctgcggcatgacatcggggccaccgtgcatgagctgagccgggacaagaagaaggacacagtgccctggttccccaggaccatccaggagctggacagatttgccaaccagatcctgtag

SEQ ID NO: 334355 - DNA, 354 bp, Artificial Sequence
  derived and/or modified sequence
atgagcaccgccgtgctggagaaccccggcctgggccggaagctgtcggattttggccaagaaacctcgtacattgaggataactgcaatcagaacggggctatcagtttgatcttttcattgaaagaagaagttggcgctctggcgaaggttctccgcctgtttgaggaaaatgatgtgaatctgactcatattgagagcagaccaagtaggctaaagaaggacgaatacgaattcttcacccacctggataagcgcagtttgccagccttgaccaacatcattaagatattgcgacacgatattggtgctaccgtgcacgaactgtcacgcgacaaaaaaaaagacacctag

SEQ ID NO: 334356 - DNA, 411 bp, Artificial Sequence
  derived and/or modified sequence
atgagcaccgccgtgctggagaaccccggcctgggccggaagctgtctgattttggtcaagagacaagttatatcgaagataactgcaatcagaatggggccatctcccttatattttctcttaaggaggaggtcggcgccctggcaaaggtgctacggctattcgaggaaaacgatgtaaacctgactcacattgagtcaaggccatctagactaaaaaaggacgaatacgaattctttacgcacttagataaacgctctctgccggcgttaactaacatcatcaagatccttaggcacgatatcggggccacagtccacgaattgtcaagggataagaagaaggataccgtaccctggttcccccggaccattcaagagctggaccgcttcgccaatcagatcctatag

SEQ ID NO: 334357 - DNA, 354 bp, Artificial Sequence
  derived and/or modified sequence
atgtcaaccgccgtgctggaaaatccagggctgggtcgaaagctgtccgactttggccaggagacttcatacatcgaggacaactgtaaccagaacggcgctatcagcttgatcttttccttaaaggaggaagttggcgcattggcaaaagttctgcggctgttcgaagagaatgacgtgaatttgacccatattgagtcccggcctagccgcctgaaaaaggacgaatacgagttctttacacacctggacaagcgtagtctgccggctttgaccaacataatcaagattctgaggcacgacatcggcgcaactgtgcatgaattgtctagagacaagaaaaaagatacctag

SEQ ID NO: 334358 - DNA, 411 bp, Artificial Sequence
  derived and/or modified sequence
atgtccaccgcagtccttgaaaaccctggactgggcaggaaactatcagatttcggacaggaaacgtcttacatcgaagataattgtaatcagaatggagcgatttccctaatcttcagccttaaggaagaggtaggcgcactggccaaggtactgagactgttcgaagaaaacgacgtgaacctgacccacatcgaatccagaccctctagacttaagaaagacgaatacgaattttttactcatttggataagaggtccttgcctgctcttaccaatataattaagattctgcgccacgatattggagccactgtgcatgaactgtctcgcgataagaagaaggacacagtcccctggtttcctagaacaattcaggagctggaccggttcgctaatcagatcctctag

SEQ ID NO: 334359 - DNA, 354 bp, Artificial Sequence
  derived and/or modified sequence
atgtcaacagccgtgttagagaatcccggccttggacggaagttatccgactttggacaggaaaccagttatattgaagataattgtaatcagaacggagcaatctcactcattttcagtctcaaggaggaagttggcgcactagcaaaggtgttgcgcttattcgaggagaacgatgtgaacctcacacatattgagtccaggccttcgcgcctcaaaaaagacgaatatgagttttttacgcacctggataaacgcagcctcccagccctaactaatattatcaaaatcctcagacatgacattggagccacagtccacgaattgtctcgagataagaaaaaagatacttag

SEQ ID NO: 334360 - DNA, 411 bp, Artificial Sequence
  derived and/or modified sequence
atgtccacagccgtgctcgaaaaccctgggttaggtaggaaattgtctgatttcggccaagagacgagctacatcgaagacaactgcaatcagaacggggcaattagtctgatcttctctctaaaagaggaggtgggggccttagcgaaagtactgagactgtttgaagaaaacgacgttaatttgacacatattgaatctagaccctccaggcttaagaaagacgagtatgagttcttcacacacttggataagcgatctctcccagccttgactaatatcatcaaaattctgagacatgacataggcgctaccgtccacgagctctcacgggataaaaagaaggatactgtcccttggtttcctcgcactatacaggagctagatcgttttgccaaccaaatcctctag

SEQ ID NO: 334361 - DNA, 354 bp, Artificial Sequence
  derived and/or modified sequence
atgtctacggcagtgcttgagaatcccggacttggtcggaaactcagtgactttggtcaagagacctcatatatagaagacaactgcaaccagaacggagccattagtctgatcttctctctgaaggaggaagtgggagccctcgcaaaagtcctaagactgttcgaagaaaatgatgtaaacctcacccacatcgaaagtaggccttctagactgaagaaggacgagtacgaattctttacccacctcgacaagcgtagcctgcccgccctaaccaacattattaagatcctgcgtcacgatataggcgccaccgtacacgagctctcccgcgataagaagaaagacacatag

SEQ ID NO: 334362 - DNA, 411 bp, Artificial Sequence
  derived and/or modified sequence
atgagcacagctgtgctcgagaaccccgggttaggcagaaagcttagtgatttcggccaagagaccagctatatcgaagacaattgcaaccagaatggagcgatctctctgatcttttctctaaaggaggaagttggggcactcgctaaagtcttgagattatttgaagaaaacgatgtaaacttgacccacatagagtctagacccagccgcttaaagaaggatgagtacgagttttttacacatcttgacaagagatcccttccagccctcacaaatatcatcaaaatcctgagacacgacatcggcgctactgtccacgaactgagcagggacaagaagaaagatacggtaccctggtttccccgcactattcaagaattggatcgctttgccaatcaaattctgtag

SEQ ID NO: 334363 - DNA, 705 bp, Artificial Sequence
  derived and/or modified sequence
tgagtgcgtcctggcgagtctcagcccccaagcgggtggaacgcaccaagggtctcatccgcgaggaagggctttaacgctcagggtcaggaacctctgagagctcttggggacttgcgcgcccttggatgctcttgcgttcaacagggctaggagactaccggctggggcgaggaatgcaggcgcctagagccttggagctcctgaaacgttcctgccgcctccggaaagcaagggcagtttaccgaagtgactgagtgcgaggttaaaaccttcagccccacgtgctgtttgcaaacctgcctgtacctgaggccctaaaaagccagagacctcactcccggggagccagcatgtccactgcggtcctggaaaacccaggcttgggcaggaaactctctgactttggacaggaaacaagctatattgaagacaactgcaatcaaaatggtgccatatcactgatcttctcactcaaagaagaagttggtgcattggccaaagtattgcgcttatttgaggagaatgatgtaaacctgacccacattgaatctagaccttctcgtttaaagaaagatgagtatgaatttttcacccatttggataaacgtagcctgcctgctctgacaaacatcatcaagatcttgaggcatgacattggtgccactgtccatgagctttcacgagataagaagaaagacacag

SEQ ID NO: 334364 - DNA, 675 bp, Artificial Sequence
  derived and/or modified sequence
gcggccgccgcggctgcggccgtggcaaagaaacaggctgcgggcggcaggaagggctgctggggctgcggctggggctgctggccggcgccgccgctctccatcttggcagagctttccatgcgcagcggcggccaaggagtcgcggaatcagagcgatccgggacgcgagtgcgaggttaaaaccttcagccccacgtgctgtttgcaaacctgcctgtacctgaggccctaaaaagccagagacctcactcccggggagccagcatgtccactgcggtcctggaaaacccaggcttgggcaggaaactctctgactttggacaggaaacaagctatattgaagacaactgcaatcaaaatggtgccatatcactgatcttctcactcaaagaagaagttggtgcattggccaaagtattgcgcttatttgaggagaatgatgtaaacctgacccacattgaatctagaccttctcgtttaaagaaagatgagtatgaatttttcacccatttggataaacgtagcctgcctgctctgacaaacatcatcaagatcttgaggcatgacattggtgccactgtccatgagctttcacgagataagaagaaagacacagtgccctggttcccaagaaccattcaagagctggacagatttgccaatcagattctc

SEQ ID NO: 334365 - RNA, 354 nt, Artificial Sequence
  derived and/or modified sequence
augucaacagccguguuagagaaucccggccuuggacggaaguuauccgacuuuggacaggaaaccaguuauauugaagauaauuguaaucagaacggagcaaucucacucauuuucagucucaaggaggaaguuggcgcacuagcaaagguguugcgcuuauucgaggagaacgaugugaaccucacacauauugaguccaggccuucgcgccucaaaaaagacgaauaugaguuuuuuacgcaccuggauaaacgcagccucccagcccuaacuaauauuaucaaaauccucagacaugacauuggagccacaguccacgaauugucucgagauaagaaaaaagauacuuag

SEQ ID NO: 334366 - RNA, 411 nt, Artificial Sequence
  derived and/or modified sequence
auguccacagccgugcucgaaaacccuggguuagguaggaaauugucugauuucggccaagagacgagcuacaucgaagacaacugcaaucagaacggggcaauuagucugaucuucucucuaaaagaggaggugggggccuuagcgaaaguacugagacuguuugaagaaaacgacguuaauuugacacauauugaaucuagacccuccaggcuuaagaaagacgaguaugaguucuucacacacuuggauaagcgaucucucccagccuugacuaauaucaucaaaauucugagacaugacauaggcgcuaccguccacgagcucucacgggauaaaaagaaggauacugucccuugguuuccucgcacuauacaggagcuagaucguuuugccaaccaaauccucuag

SEQ ID NO: 334367 - RNA, 354 nt, Artificial Sequence
  derived and/or modified sequence
augucuacggcagugcuugagaaucccggacuuggucggaaacucagugacuuuggucaagagaccucauauauagaagacaacugcaaccagaacggagccauuagucugaucuucucucugaaggaggaagugggagcccucgcaaaaguccuaagacuguucgaagaaaaugauguaaaccucacccacaucgaaaguaggccuucuagacugaagaaggacgaguacgaauucuuuacccaccucgacaagcguagccugcccgcccuaaccaacauuauuaagauccugcgucacgauauaggcgccaccguacacgagcucucccgcgauaagaagaaagacacauag

SEQ ID NO: 334368 - RNA, 411 nt, Artificial Sequence
  derived and/or modified sequence
augagcacagcugugcucgagaaccccggguuaggcagaaagcuuagugauuucggccaagagaccagcuauaucgaagacaauugcaaccagaauggagcgaucucucugaucuuuucucuaaaggaggaaguuggggcacucgcuaaagucuugagauuauuugaagaaaacgauguaaacuugacccacauagagucuagacccagccgcuuaaagaaggaugaguacgaguuuuuuacacaucuugacaagagaucccuuccagcccucacaaauaucaucaaaauccugagacacgacaucggcgcuacuguccacgaacugagcagggacaagaagaaagauacgguacccugguuuccccgcacuauucaagaauuggaucgcuuugccaaucaaauucuguag

SEQ ID NO: 334369 - protein, 523 aa, Artificial Sequence
  derived and/or modified sequence
MKKFKRRLSLTLRGSQTIDESLSELAEQMTIEENSSKDNEPIVKNGRPPTSHSMHSFLHQYTGSFKKPPLRRPHSVIGGSLGSFMAMPRNGSRLDIVHENLKMGSDGESDQASGTSSDEVQSPTGVCLRNRIHRRISMEDLNKRLSLPADIRIPDGYLEKLQINSPPFDQPMSRRSRRASLSEIGFGKMETYIKLEKLGEGTYATVYKGRSKLTENLVALKEIRLEHEEGAPCTAIREVSLLKDLKHANIVTLHDIVHTDKSLTLVFEYLDKDLKQYMDDCGNIMSMHNVKLFLYQILRGLAYCHRRKVLHRDLKPQNLLINEKGELKLADFGLARAKSVPTKTYSNEVVTLWYRPPDVLLGSSEYSTQIDMWGVGCIFFEMASGRPLFPGSTVEDELHLIFRLLGTPSQETWPGISSNEEFKNYNFPKYKPQPLINHAPRLDSEGIELITKFLQYESKKRVSAEEAMKHVYFRSLGPRIHALPESVSIFSLKEIQLQKDPGFRNSSYPETGVFVINHFTCRS

SEQ ID NO: 334370 - DNA, 1572 bp, Artificial Sequence
  derived and/or modified sequence
atgaagaagttcaagagaagactgagcctgaccctgagaggcagccagaccatcgacgagagcctgagcgagctggccgagcagatgaccatcgaggagaacagcagcaaggacaacgagcccatcgtgaagaacggcagaccccccaccagccacagcatgcacagcttcctgcaccagtacaccggcagcttcaagaagccccccctgagaagaccccacagcgtgatcggcggcagcctgggcagcttcatggccatgcccagaaacggcagcagactggacatcgtgcacgagaacctgaagatgggcagcgacggcgagagcgaccaggccagcggcaccagcagcgacgaggtgcagagccccaccggcgtgtgcctgagaaacagaatccacagaagaatcagcatggaggacctgaacaagagactgagcctgcccgccgacatcagaatccccgacggctacctggagaagctgcagatcaacagcccccccttcgaccagcccatgagcagaagaagcagaagagccagcctgagcgagatcggcttcggcaagatggagacctacatcaagctggagaagctgggcgagggcacctacgccaccgtgtacaagggcagaagcaagctgaccgagaacctggtggccctgaaggagatcagactggagcacgaggagggcgccccctgcaccgccatcagagaggtgagcctgctgaaggacctgaagcacgccaacatcgtgaccctgcacgacatcgtgcacaccgacaagagcctgaccctggtgttcgagtacctggacaaggacctgaagcagtacatggacgactgcggcaacatcatgagcatgcacaacgtgaagctgttcctgtaccagatcctgagaggcctggcctactgccacagaagaaaggtgctgcacagagacctgaagccccagaacctgctgatcaacgagaagggcgagctgaagctggccgacttcggcctggccagagccaagagcgtgcccaccaagacctacagcaacgaggtggtgaccctgtggtacagaccccccgacgtgctgctgggcagcagcgagtacagcacccagatcgacatgtggggcgtgggctgcatcttcttcgagatggccagcggcagacccctgttccccggcagcaccgtggaggacgagctgcacctgatcttcagactgctgggcacccccagccaggagacctggcccggcatcagcagcaacgaggagttcaagaactacaacttccccaagtacaagccccagcccctgatcaaccacgcccccagactggacagcgagggcatcgagctgatcaccaagttcctgcagtacgagagcaagaagagagtgagcgccgaggaggccatgaagcacgtgtacttcagaagcctgggccccagaatccacgccctgcccgagagcgtgagcatcttcagcctgaaggagatccagctgcagaaggaccccggcttcagaaacagcagctaccccgagaccggcgtgttcgtgatcaaccacttcacctgcagaagctag

SEQ ID NO: 334371 - DNA, 2442 bp, Artificial Sequence
  derived and/or modified sequence
ctcttgcactcgctctcctccggggaacaggcggaggcgtcaatccgcagccgccgagtgtgaaagcgacgcacacgcaaggagcgaacgcggccgcccgcagtctcctgagctccccgcgggccgccgcagagccgcggagaaggagccagcgcccggccagacagtctcagcccgccgtcggcgcccgccgcgctcgcgcccggctgctccgaggggattagtgggccgtccgcgcggctcgtcggcgcgggagccatgttgaccgagggacttggcaacgcgtgagacacccgcggcccctcccgaggctccggacccgcggcgagagccggaaggcggctgtggcggcggaggcctgcgctcggaagcgcctcacgtctgccggccgctgagacccggacttgcatccggtcgccgcgggcgtccgcggagcagcttccccccgcgcctctcttcgcctcgcctcgggacccgcggtccccgctcttgctggatttttcaagccacattcaattgataggatgaaaaaatttaagagaaggctatccctcacactccgaggaagtcagactattgatgaatcattgtctgaattggctgaacaaatgactattgaagaaaacagcagcaaggataatgagcctattgtgaagaatggcaggcctccaacgtctcacagtatgcattccttcctccaccagtacacaggatctttcaagaagcccccattgcggagaccacacagtgttattggagggagccttggctccttcatggcaatgcccagaaatggaagcagattagatattgttcatgaaaatctaaaaatgggatcagatggtgagagtgaccaagcttctgggacatcatctgatgaagtccagtcacctacaggtgtttgtctcagaaatcgtatacatagacggatctcaatggaggatttaaataagcggttatcactgcctgcagacatcagaatacctgatggatatcttgaaaagttgcagataaacagtccaccatttgaccaaccaatgagtcgaaggtctcgtagagcttccttatcagaaattggctttggaaaaatggaaacctacatcaaattggaaaagcttggagagggtacatatgcaacagtatataaaggaagaagtaaattgacagagaatttggtggcattaaaagagatccgattggaacatgaagaaggtgcaccctgcacagctataagagaagtttcactattaaaggatttaaaacatgcaaatatagtaaccttacatgacattgttcacacagataaatccttgactttggtgtttgagtatctggataaagacctgaaacagtacatggatgactgtggaaacatcatgagtatgcacaacgtaaagctgtttctgtaccaaattctacgtggtttggcatattgccatagaagaaaggtattgcatcgagacttgaaaccacagaacctcctcattaatgagaaaggagaattaaagctagcagattttggactagcccgagccaagtcagttcccacaaagacctactcaaatgaagttgtcacactatggtaccggccacctgatgtgcttcttggttcctcggagtactcaacacagattgacatgtggggtgttggttgcattttctttgaaatggcttctggaagacctttatttccaggatcaaccgtggaagatgaactgcacttaattttccgactgctaggaactccatctcaggaaacttggccaggtatttcttcaaatgaggagttcaagaactacaactttccaaaatataaaccacagcctctaattaaccacgcacccaggttagactctgaaggaattgagttgataacaaaatttcttcagtatgaatctaagaaaagggtttcagctgaagaggccatgaaacatgtgtactttcgaagtctgggaccaagaatacatgctttaccagaaagtgtatcaatattcagtttgaaagagattcagttgcaaaaggacccgggttttcgaaattcttcttatccagagacaggtgtgtttgtcataaaccatttcacgtgtcgatcatgaatttttgcgtggaaccaagcttttggtttataaattgatcagtaaaattattgatgtaaaaaccaatgtacagtgcattccacaactgtttatgtttagcattgcacgtactcacttttctgtatgatgtgggcagctcagtaaatcttcagagaaaaatctgactcagtcaagtcagggatcctgaaagctgcagatggcacaaagaccttttacaagtgacctggcttgatcactgcacacgccatccctggtacctgaggcagaagacacatcttgtgcttccctagtcatcaggttcatcacttcgaagcatagaagctgtagactgaccccgtcaacagaa

SEQ ID NO: 334372 - DNA, 1572 bp, Artificial Sequence
  derived and/or modified sequence
atgaaaaagtttaagcggcggctcagcctgacgctgcgaggctctcagaccatcgacgaatccctatccgagcttgcggagcagatgacgatcgaggagaatagtagtaaagataatgagccgatagtgaagaatggccgcccccctacctctcactccatgcattcttttcttcatcaatacactggcagttttaagaaacctccattgcggaggccccactctgtgatcggcggtagtctggggtcctttatggctatgcccaggaatggctcccggcttgacatagttcacgaaaacctgaagatggggtccgacggcgagagcgatcaggcctctggaacatccagcgacgaagtgcagtcacccacgggcgtctgtctgcggaacaggattcacaggaggatctccatggaggatctcaacaagcggctgtcactgcctgctgatattagaattcctgatggatatttggaaaagctgcagatcaactctccacctttcgaccagcccatgagtagacggtccagacgggcctccctgtccgagatcggatttggtaagatggagacatatatcaaattggaaaagctaggagaaggtacttatgcaaccgtctacaagggacggtcaaagctcactgagaatcttgtagccttgaaggaaatccgcctggaacatgaggagggcgctccttgtacggctattcgcgaagtgagtcttctgaaagacctcaagcacgctaatattgtgacgcttcatgacatcgtgcacacagacaagtccctgacactggtctttgagtatcttgataaagacctcaaacagtacatggatgattgtggcaacataatgagcatgcataatgtgaaactgtttctgtatcagatccttaggggcctagcctactgccatcggcggaaagtgttacaccgcgatcttaaaccccagaacttgctgatcaacgagaaaggcgagctgaagctggccgactttggactggcacgtgcaaagtcagttcccacaaagacttactccaacgaggtggtgacattatggtatcgccccccagacgtgctgctgggatccagcgagtatagcactcagatcgatatgtggggtgtgggctgtatcttcttcgagatggccagcggtcggccgctgtttcctggaagcacagtggaagacgagctgcacctgatcttccgactgctcggcacgccctcccaagagacgtggccagggatcagttccaacgaggagttcaagaactacaactttcctaagtataaaccacagccacttatcaaccatgcccctagattagacagtgaaggaatcgagctgattactaagtttctgcagtacgaaagtaagaagcgcgtatccgctgaagaagctatgaagcatgtctacttcagatcattgggtccccgaatccacgccctcccggagtctgtgtccatttttagcttgaaagaaattcagctgcaaaaggaccccggattccgtaacagctcatatcctgagacaggcgtcttcgtaattaaccactttacctgtcgctcatag

SEQ ID NO: 334373 - DNA, 1572 bp, Artificial Sequence
  derived and/or modified sequence
atgaagaagttcaagaggcggctgagcctgaccctgcggggcagccagaccattgatgagagcctgtctgagctggccgagcagatgaccatcgaggagaacagcagcaaggacaatgagcccatcgtgaagaatggccggccccccaccagccacagcatgcacagcttcctgcaccagtacacaggcagcttcaagaagccacccctgcggcggccccacagcgtgattggaggcagcctgggcagcttcatggccatgcccagaaatggcagccggctggacatcgtgcatgagaacctgaagatgggcagtgatggagagagtgaccaggccagcggcaccagcagtgatgaggtgcagagccccaccggggtgtgcctgaggaaccgcatccaccggcgcatctccatggaggacctgaacaagaggctgagcctgcctgctgacatccgcatcccagatggctacctggagaagctgcagatcaacagccccccatttgaccagcccatgagccgccgcagcagaagagccagcctgtctgagatcggctttgggaagatggagacctacatcaagctggagaagctgggggagggcacctacgccaccgtgtacaagggccgcagcaagctgacagagaacctggtggccctgaaggagatccggctggagcacgaggagggcgccccctgcacagccatccgggaggtgtccctgctgaaggacctgaagcacgccaacatcgtgaccctgcatgacatcgtgcacacagacaagagcctgaccctggtgtttgagtacctggacaaggacctgaagcagtacatggatgactgtggcaacatcatgtccatgcacaacgtgaagctgttcctgtaccagatcctgcggggcctggcctactgccacaggaggaaggtgctgcaccgggacctgaagccccagaacctgctgatcaatgagaagggggagctgaagctggccgactttggcctggcccgggccaagtctgtgcccaccaagacctacagcaatgaggtggtgaccctgtggtaccggcccccagatgtgctgctgggcagcagcgagtacagcacccagattgacatgtggggcgtgggctgcatcttctttgagatggccagcggccggcccctcttccctggcagcacagtggaggatgagctgcacctgatcttccggctgctgggcacccccagccaggagacctggccaggcatcagcagcaatgaggagttcaagaactacaacttccccaagtacaagccccagcccctcatcaaccacgccccccggctggacagcgagggcatcgagctgatcaccaagttcctgcagtatgagagcaagaagagggtgtctgctgaggaggccatgaagcacgtgtacttccgcagcctgggcccccgcatccacgccctgcctgagagcgtgtccatcttcagcctgaaggagatccagctgcagaaggaccccggcttcaggaacagcagctacccagagactggagtgtttgtgatcaaccacttcacctgccgctcctag

SEQ ID NO: 334374 - DNA, 1572 bp, Artificial Sequence
  derived and/or modified sequence
atgaagaagttcaagcggcggctgagcctgaccctgcggggcagccagacaatcgacgagtcactcagcgagctcgccgagcagatgacaatcgaggagaattcttcaaaagataatgaaccaattgtgaagaatggacgccctcctacctcccattctatgcattccttcctacatcaatatactggaagttttaagaaaccacccctgcgccggccccactccgttatcgggggcagcctcggcagcttcatggctatgccacgcaacggctctaggctggacattgtccacgaaaaccttaagatgggctctgacggcgaaagtgatcaggccagcggcacctccagtgatgaggtgcaaagccccaccggcgtgtgtcttagaaatcgaattcaccgtcgcatttctatggaagacttaaacaagaggctgtccctccccgcagacattcgaatcccggacggttatcttgagaaactccagatcaatagccctccatttgatcaacccatgtcccgccgaagccgaagagcatcactgagtgagattggtttcggcaaaatggaaacatatattaagttagaaaagctaggtgagggaacttatgcgaccgtgtataaggggcgcagtaagctgactgagaatctggtcgctctcaaggagatccgactggagcatgaggaaggcgccccatgcacagccatcagggaggtaagcctgttgaaggatctcaagcacgctaacatcgtcaccctccacgatatcgtgcacacagacaaatctcttacgctggtgttcgaatacctagacaaagacctcaagcagtacatggacgattgtggcaacataatgagtatgcacaacgtgaaactgtttctgtaccagattttaagggggctagcctactgtcatcgccgcaaagtcctgcaccgtgatctcaagccccaaaacttgttgatcaacgagaaaggcgagctaaaactagccgacttcggtctggcccgggcgaaaagtgtacctacaaaaacatactccaacgaggtggttaccctctggtacagacccccagatgtcttgcttggctcctctgagtacagcactcaaatcgatatgtggggcgtggggtgcattttcttcgagatggcatctggcagacctttattcccaggttcaacagttgaggacgaactgcacctgattttcagactcctcggtacaccctcccaggaaacgtggccagggatctcaagcaacgaagagtttaagaactataactttccgaaatacaaacctcagccactcatcaatcacgctccaaggctggactccgagggaattgagttaataacaaagttcttacagtacgagtcgaaaaagagggtttcagccgaagaggcaatgaaacacgtgtactttagaagcttagggccccgcatccatgcattgcccgagtctgtgtccatattttccctgaaagagatacagcttcaaaaggatcctggatttcgaaacagttcatacccagagactggcgtttttgttattaatcactttacgtgcaggagctag

SEQ ID NO: 334375 - DNA, 1572 bp, Artificial Sequence
  derived and/or modified sequence
atgaagaaattcaagagacggctgtccttgactttgcgaggatcccagaccatagacgaatccctgagcgagttggcagaacagatgaccatcgaggagaattcttctaaggacaatgagcccatcgtcaaaaacggaagaccacctacttctcactcgatgcacagctttctgcaccagtacactgggagcttcaaaaaacccccattgcgacggcctcattccgtgatcgggggtagcctgggctcctttatggccatgcctcgcaacggttctagactagatatcgtgcacgagaacctgaaaatggggtcagacggggagagcgatcaggcgagcggtacatcttctgacgaagtgcagagccccacgggggtgtgccttcggaaccggatccatagaagaatcagtatggaagatctgaacaagaggctgtcactacctgccgatataaggattcctgacggttatctcgagaagctccagataaactcgccacctttcgatcagcccatgtctcgcagatccagaagagcgtctttgtctgagatcgggtttggtaagatggagacctacattaagcttgaaaaactcggtgagggaacttatgcgaccgtgtacaagggacgcagcaagctgacagaaaacctcgtagcactaaaggagatccggctcgagcacgaagagggcgctccctgtaccgccatccgggaggtcagcctattaaaggacctcaagcatgcgaacatagtgacccttcacgacatcgtgcacactgacaaaagcttgaccctggtcttcgagtaccttgacaaagatctgaaacagtatatggacgattgtggcaacatcatgtctatgcacaatgtgaagttgtttctgtaccagatcctgagaggcctcgcctattgccatcgtcgaaaagtgctgcaccgggatctcaaaccccagaacctcctaatcaatgagaagggtgagctcaagcttgcggattttggattggctcgggctaagtcagttcctaccaagacttactccaatgaagtggttaccctatggtatagaccccctgacgttctgctgggatctagcgaatacagcacacaaatcgatatgtggggagttggatgtatcttctttgaaatggcctcaggacgcccactgtttccaggttcaaccgtggaggatgagctccacttaattttccggctgctgggtaccccaagccaagaaacatggccaggcatttcttccaatgaggagtttaagaactataattttcccaaatacaaacctcagcctctgattaatcacgctccacgactggattccgaagggattgagttgataaccaaatttctgcaatatgagtccaaaaaaagggtatccgcggaagaggccatgaaacacgtgtacttccgctctttagggccaaggattcacgcactgccggagtccgtatccatcttctcgctcaaggaaatccagctgcagaaggacccaggatttcgaaatagctcttatcctgagacaggggtatttgtgatcaaccatttcacctgcaggtcctag

SEQ ID NO: 334376 - protein, 179 aa, Artificial Sequence
  derived and/or modified sequence
MKKFKRRLSLTLRGSQTIDESLSELAEQMTIEENSSKDNEPIVKNGRPPTSHSMHSFLHQYTGSFKKPPLRRPHSVIGGSLGSFMAMPRNGSRLDIVHENLKMGSDGESDQASGTSSDEVQSPTGVCLRNRIHRRISMEDLNKRLSLPADIRIPDGYLEKLQINSPPFDQPMSRRSRRA

SEQ ID NO: 334377 - protein, 88 aa, Artificial Sequence
  derived and/or modified sequence
MKKFKRRLSLTLRGSQTIDESLSELAEQMTIEENSSKDNEPIVKNGRPPTSHSMHSFLHQYTGSFKKPPLRRPHSVIGGSLGSFMAMP

SEQ ID NO: 334378 - protein, 161 aa, Artificial Sequence
  derived and/or modified sequence
MKKFKRRLSLTLRGSQTIDESLSELAEQMTIEENSSKDNEPIVKNGRPPTSHSMHSFLHQYTGSFKKPPLRRPHSVIGGSLGSFMAMPRNGSRLDIVHENLKMGSDGESDQASGTSSDEVQSPTGVCLRNRIHRRISMEDLNKRLSLPADIRIPDGYLEKL

SEQ ID NO: 334379 - DNA, 540 bp, Artificial Sequence
  derived and/or modified sequence
atgaagaagttcaagagaagactgagcctgaccctgagaggcagccagaccatcgacgagagcctgagcgagctggccgagcagatgaccatcgaggagaacagcagcaaggacaacgagcccatcgtgaagaacggcagaccccccaccagccacagcatgcacagcttcctgcaccagtacaccggcagcttcaagaagccccccctgagaagaccccacagcgtgatcggcggcagcctgggcagcttcatggccatgcccagaaacggcagcagactggacatcgtgcacgagaacctgaagatgggcagcgacggcgagagcgaccaggccagcggcaccagcagcgacgaggtgcagagccccaccggcgtgtgcctgagaaacagaatccacagaagaatcagcatggaggacctgaacaagagactgagcctgcccgccgacatcagaatccccgacggctacctggagaagctgcagatcaacagcccccccttcgaccagcccatgagcagaagaagcagaagagcctag

SEQ ID NO: 334380 - DNA, 267 bp, Artificial Sequence
  derived and/or modified sequence
atgaagaagttcaagagaagactgagcctgaccctgagaggcagccagaccatcgacgagagcctgagcgagctggccgagcagatgaccatcgaggagaacagcagcaaggacaacgagcccatcgtgaagaacggcagaccccccaccagccacagcatgcacagcttcctgcaccagtacaccggcagcttcaagaagccccccctgagaagaccccacagcgtgatcggcggcagcctgggcagcttcatggccatgccctag

SEQ ID NO: 334381 - DNA, 486 bp, Artificial Sequence
  derived and/or modified sequence
atgaagaagttcaagagaagactgagcctgaccctgagaggcagccagaccatcgacgagagcctgagcgagctggccgagcagatgaccatcgaggagaacagcagcaaggacaacgagcccatcgtgaagaacggcagaccccccaccagccacagcatgcacagcttcctgcaccagtacaccggcagcttcaagaagccccccctgagaagaccccacagcgtgatcggcggcagcctgggcagcttcatggccatgcccagaaacggcagcagactggacatcgtgcacgagaacctgaagatgggcagcgacggcgagagcgaccaggccagcggcaccagcagcgacgaggtgcagagccccaccggcgtgtgcctgagaaacagaatccacagaagaatcagcatggaggacctgaacaagagactgagcctgcccgccgacatcagaatccccgacggctacctggagaagctgtag

SEQ ID NO: 334382 - DNA, 626 bp, Artificial Sequence
  derived and/or modified sequence
aaagatcagggcagcctcctgctggcgggtcacaccccggagtgttggtcaagagcggaggatttttcaagccacattcaattgataggatgaaaaaatttaagagaaggctatccctcacactccgaggaagtcagactattgatgaatcattgtctgaattggctgaacaaatgactattgaagaaaacagcagcaaggataatgagcctattgtgaagaatggcaggcctccaacgtctcacagtatgcattccttcctccaccagtacacaggatctttcaagaagcccccattgcggagaccacacagtgttattggagggagccttggctccttcatggcaatgcccagaaatggaagcagattagatattgttcatgaaaatctaaaaatgggatcagatggtgagagtgaccaagcttctgggacatcatctgatgaagtccagtcacctacaggtgtttgtctcagaaatcgtatacatagacggatctcaatggaggatttaaataagcggttatcactgcctgcagacatcagaatacctgatggatatcttgaaaagttgcagataaacagtccaccatttgaccaaccaatgagtcgaaggtctcgtagagct

SEQ ID NO: 334383 - DNA, 566 bp, Artificial Sequence
  derived and/or modified sequence
agtgttggtcaagagcggaggtagagggaaggtgggaaacccagcaaaccgatggggaggggaaaatggggggaggagggtgcctagtgctgtctccgtcgcagttgcttttctcagcatttttgtgcccgatgctatgcccgatgcttttgctccccaactcagctggatagctccagattccctccctcctgtcacccccacactgccacattgactctcctgtggtttttccctcgttctccccctacttttcacccactccttttcgggatttttcaagccacattcaattgataggatgaaaaaatttaagagaaggctatccctcacactccgaggaagtcagactattgatgaatcattgtctgaattggctgaacaaatgactattgaagaaaacagcagcaaggataatgagcctattgtgaagaatggcaggcctccaacgtctcacagtatgcattccttcctccaccagtacacaggatctttcaagaagcccccattgcggagaccacacagtgttattggagggagccttggctccttcatggcaatgccca

SEQ ID NO: 334384 - DNA, 583 bp, Artificial Sequence
  derived and/or modified sequence
aaagatcagggcagcctcctgctggcgggtcacaccccggagtgttggtcaagagcggaggtagagggaaggatttttcaagccacattcaattgataggatgaaaaaatttaagagaaggctatccctcacactccgaggaagtcagactattgatgaatcattgtctgaattggctgaacaaatgactattgaagaaaacagcagcaaggataatgagcctattgtgaagaatggcaggcctccaacgtctcacagtatgcattccttcctccaccagtacacaggatctttcaagaagcccccattgcggagaccacacagtgttattggagggagccttggctccttcatggcaatgcccagaaatggaagcagattagatattgttcatgaaaatctaaaaatgggatcagatggtgagagtgaccaagcttctgggacatcatctgatgaagtccagtcacctacaggtgtttgtctcagaaatcgtatacatagacggatctcaatggaggatttaaataagcggttatcactgcctgcagacatcagaatacctgatggatatcttgaaaagttg

SEQ ID NO: 334385 - DNA, 540 bp, Artificial Sequence
  derived and/or modified sequence
atgaaaaagtttaagaggcgcctatcactgactcttcgtggcagccagacaattgacgagtcactttcagagctcgctgagcagatgacaatagaggaaaacagttcaaaagacaatgagccgattgttaaaaacgggagaccccccacgtcccactctatgcactcgtttctgcaccagtacacaggatctttcaaaaaaccccccttacgacgaccccacagcgttatcggcggttccctggggagctttatggcgatgccaaggaatgggagtcgattggatatcgttcatgagaacctcaagatgggcagtgacggagaaagcgatcaggctagcggaaccagtagtgatgaagtacagagcccgacgggagtgtgtctgaggaaccggatccaccgaaggatttccatggaagatcttaacaagagactgtcccttcctgcagatatcagaatccctgatggatacctggagaagttgcagatcaattcccctcctttcgatcagcccatgtctcgtcgaagcaggcgtgcatag

SEQ ID NO: 334386 - DNA, 267 bp, Artificial Sequence
  derived and/or modified sequence
atgaaaaaatttaaacggcgcctgtctctcaccttacggggttcgcaaaccatcgatgaatctcttagtgaacttgcggagcagatgaccatagaggaaaatagtagtaaggacaatgaaccaattgtgaaaaatggccgccccccaacaagccacagcatgcacagcttcttacatcaatatacaggtagctttaaaaagccaccacttcgccgcccacattccgttataggaggatcccttggatcattcatggccatgccatag

SEQ ID NO: 334387 - DNA, 486 bp, Artificial Sequence
  derived and/or modified sequence
atgaagaaatttaaacgacgcctgagtttaacactccggggaagccagacgatcgatgagagcttgtctgagctggccgagcagatgacgatagaggaaaactcatccaaggataatgaacctatagtcaagaatgggaggccacctacatctcactccatgcactcctttctgcatcagtatactggctcttttaaaaagccacctttgagacggcctcactccgtaattggcggttcattgggtagtttcatggctatgccgcggaatgggtctcgcttggacatcgtccatgaaaacctgaaaatgggtagcgacggcgagtccgaccaagcctcgggaacttccagtgacgaagtccagtcccccacaggggtctgcctcaggaaccgaatacatagaagaataagtatggaggatctcaacaaaaggttgagcctgccagcggatatccgaatccctgacggctacctcgaaaaattgtag

SEQ ID NO: 334388 - DNA, 540 bp, Artificial Sequence
  derived and/or modified sequence
atgaagaagttcaagaggcggctgagcctgaccctgcggggcagccagaccattgatgagagcctgtctgagctggccgagcagatgaccatcgaggagaacagcagcaaggacaatgagcccatcgtgaagaatggccggccccccaccagccacagcatgcacagcttcctgcaccagtacacaggcagcttcaagaagccacccctgcggcggccccacagcgtgattggaggcagcctgggcagcttcatggccatgcccagaaatggcagccggctggacatcgtgcatgagaacctgaagatgggcagtgatggagagagtgaccaggccagcggcaccagcagtgatgaggtgcagagccccaccggggtgtgcctgaggaaccgcatccaccggcgcatctccatggaggacctgaacaagaggctgagcctgcctgctgacatccgcatcccagatggctacctggagaagctgcagatcaacagccccccatttgaccagcccatgagccgccgcagcagaagagcctag

SEQ ID NO: 334389 - DNA, 267 bp, Artificial Sequence
  derived and/or modified sequence
atgaagaagttcaagaggcggctgagcctgaccctgcggggcagccagaccattgatgagagcctgtctgagctggccgagcagatgaccatcgaggagaacagcagcaaggacaatgagcccatcgtgaagaatggccggccccccaccagccacagcatgcacagcttcctgcaccagtacacaggcagcttcaagaagccacccctgcggcggccccacagcgtgattggaggcagcctgggcagcttcatggccatgccctag

SEQ ID NO: 334390 - DNA, 486 bp, Artificial Sequence
  derived and/or modified sequence
atgaagaagttcaagaggcggctgagcctgaccctgcggggcagccagaccattgatgagagcctgtctgagctggccgagcagatgaccatcgaggagaacagcagcaaggacaatgagcccatcgtgaagaatggccggccccccaccagccacagcatgcacagcttcctgcaccagtacacaggcagcttcaagaagccacccctgcggcggccccacagcgtgattggaggcagcctgggcagcttcatggccatgcccagaaatggcagccggctggacatcgtgcatgagaacctgaagatgggcagtgatggagagagtgaccaggccagcggcaccagcagtgatgaggtgcagagccccaccggggtgtgcctgaggaaccgcatccaccggcgcatctccatggaggacctgaacaagaggctgagcctgcctgctgacatccgcatcccagatggctacctggagaagctgtag

SEQ ID NO: 334391 - DNA, 540 bp, Artificial Sequence
  derived and/or modified sequence
atgaagaagttcaagcggcggctgagcctgaccctgcggggcagccaaacaatcgacgaatcactgtcggaactagcggaacagatgactattgaggaaaacagcagtaaagataacgagcccatagtgaaaaatggaagacctccgacatcgcactcaatgcattccttcctacaccagtatacgggatccttcaagaaaccccctctgagaagaccacactctgtaatcgggggctcattaggaagttttatggccatgccgcgcaatggatccaggcttgacatcgttcatgaaaacctcaagatgggatccgacggtgagtctgatcaggcgtccggcacgagtagtgatgaggtgcagtccccaactggtgtgtgcttgagaaatcggattcatagacgcatatccatggaggacctcaataagaggctctccctccctgcagacatcagaattcccgatggatacttagagaagctacagatcaatagccccccttttgaccagcccatgagtcgtagatctcggcgcgcctag

SEQ ID NO: 334392 - DNA, 267 bp, Artificial Sequence
  derived and/or modified sequence
atgaagaagttcaagcggcggctgagcctgaccctgcggggcagccagaccattgatgagtccctgagcgagctggctgagcagatgacaatcgaagagaatagcagtaaggacaacgaacctatcgtcaagaacggccggccgcctaccagccacagcatgcacagtttccttcaccaatacaccggtagttttaagaagccacctctgcgaagaccccactcagtcatagggggcagcctgggctccttcatggcaatgccatag

SEQ ID NO: 334393 - DNA, 486 bp, Artificial Sequence
  derived and/or modified sequence
atgaagaagttcaagcggcggctgagcctgaccctgcggggcagccagacgattgatgagagcctgtcggagcttgcagaacagatgaccatcgaagagaacagctcaaaggacaacgaaccaatcgttaagaatggcagaccgccaacttcgcatagcatgcatagcttcctccaccaatatactgggagctttaagaagcctcctctgagacgtccccactctgtgataggtggatccctgggctcatttatggcaatgccaaggaacggttcacgattggatattgtccacgagaatctcaaaatgggcagtgacggtgaatcagaccaggctagcggaacgtccagtgacgaggtccagtccccaacaggcgtctgcttacggaaccgaatccacaggcgcatcagtatggaggacctcaataagcgcctttctctgcccgccgatatcagaattccagatggctaccttgagaaattgtag

SEQ ID NO: 334394 - DNA, 540 bp, Artificial Sequence
  derived and/or modified sequence
atgaaaaaattcaagagaaggctatccttaaccctgagaggctcacaaacgatcgacgagagtctgtcggagcttgcagagcagatgacaatcgaagagaattcctcaaaagataatgagccgattgtcaagaatggacgaccccctaccagtcacagtatgcattcatttttgcatcagtacaccggatcgttcaagaagccgcctctaaggagaccccacagcgtgatcggcggtagcctggggagctttatggctatgcccagaaacgggtcccggcttgatattgtccacgagaacttgaaaatgggaagcgatggagagtccgaccaggcctctggcaccagcagtgatgaggtgcaatcaccaaccggcgtctgtctccgcaatcgcatccacagaaggatcagcatggaggatctcaataagaggctatccctgccagccgacataaggattcctgacggttacctggaaaagctccagattaattcccctccttttgaccaaccgatgagccgacggtcacgtagagcctag

SEQ ID NO: 334395 - DNA, 267 bp, Artificial Sequence
  derived and/or modified sequence
atgaaaaagttcaagcgcagactgtccctcaccttgagaggatctcagactatcgatgagtccttaagtgagctggcagagcagatgacaatagaagagaattcatctaaagataatgagccaatcgtgaaaaacgggcgacctccgacaagccatagtatgcacagttttctccaccagtataccggcagcttcaagaagcctccactcaggcgaccacatagtgtcatcggtggaagtctgggctcgttcatggccatgccatag

SEQ ID NO: 334396 - DNA, 486 bp, Artificial Sequence
  derived and/or modified sequence
atgaagaagtttaaaagacggctctcactaacccttagaggaagccagaccattgatgaatccctgagcgaattagcagagcaaatgactatcgaggaaaattcaagtaaagataacgaacctatagtcaagaatggtaggcctcccacatctcacagtatgcattccttcctgcaccaatacaccggatccttcaaaaagccaccattaagacggccacactctgttatcggtgggagtctgggcagcttcatggcaatgcccaggaacggtagccggctcgacattgtccacgagaatctgaagatgggctcggacggcgagagtgatcaagcttcagggacctcctctgatgaagtgcaatctccaacaggcgtttgcttgcggaacagaattcacagacgtattagtatggaggacctgaacaagaggttgtcactgcctgctgacataaggattcccgacgggtaccttgagaaactctag

SEQ ID NO: 334397 - DNA, 57 bp, Artificial Sequence
  derived and/or modified sequence
atgagaaagggcgtgctgaaggaccccgagatcgccgacctgttctacaaggactag

SEQ ID NO: 334398 - DNA, 66 bp, Artificial Sequence
  derived and/or modified sequence
atgagaaagggcgtgctgaaggaccccgagatcgccgacctgttctacaaggacgaccccgagtag

SEQ ID NO: 334399 - DNA, 111 bp, Artificial Sequence
  derived and/or modified sequence
atgagaaagggcgtgctgaaggaccccgagatcgccgacctgttctacaaggacgaccccgaggagctgttcatcggcctgcacgagatcggccacggcagcttcggctag

SEQ ID NO: 334400 - DNA, 57 bp, Artificial Sequence
  derived and/or modified sequence
atgaggaaaggcgtgctcaaggaccccgagatagccgacttattctacaaggactag

SEQ ID NO: 334401 - DNA, 66 bp, Artificial Sequence
  derived and/or modified sequence
atgcgcaaaggagtgcttaaagacccagagatcgcagacctgttctataaggacgacccagaatag

SEQ ID NO: 334402 - DNA, 111 bp, Artificial Sequence
  derived and/or modified sequence
atgaggaaaggtgtgctgaaagatcccgagatcgcagatctgttctacaaagacgacccagaagagctgttcattggcttgcatgagatcggccacggcagttttggctag

SEQ ID NO: 334403 - DNA, 57 bp, Artificial Sequence
  derived and/or modified sequence
atgaggaaaggagtgctgaaggaccctgagattgctgacctcttctacaaggactag

SEQ ID NO: 334404 - DNA, 66 bp, Artificial Sequence
  derived and/or modified sequence
atgaggaaaggagtgctgaaggaccctgagattgctgacctcttctacaaggatgatcctgagtag

SEQ ID NO: 334405 - DNA, 111 bp, Artificial Sequence
  derived and/or modified sequence
atgaggaaaggagtgctgaaggaccctgagattgctgacctcttctacaaggatgatcctgaggagctgttcatcggcctgcacgagatcggccacggcagctttggatag

SEQ ID NO: 334406 - DNA, 57 bp, Artificial Sequence
  derived and/or modified sequence
atgcggaagggcgtgctgaaggaccccgagatcgccgacctgttctataaggattag

SEQ ID NO: 334407 - DNA, 66 bp, Artificial Sequence
  derived and/or modified sequence
atgcggaagggcgtgctgaaggaccccgagatcgccgacctgttctataaggatgaccccgaatag

SEQ ID NO: 334408 - DNA, 111 bp, Artificial Sequence
  derived and/or modified sequence
atgcggaagggcgtgctgaaggaccccgagatcgccgacctgttctataaggatgacccagaggaacttttcataggtttacatgagattggacatggaagcttcggctag

SEQ ID NO: 334409 - DNA, 57 bp, Artificial Sequence
  derived and/or modified sequence
atgcggaagggagttctaaaggatccagagatcgccgatttattctataaagactag

SEQ ID NO: 334410 - DNA, 66 bp, Artificial Sequence
  derived and/or modified sequence
atgcggaagggcgttctgaaggacccggagatcgctgatttattttataaagacgatcctgagtag

SEQ ID NO: 334411 - DNA, 111 bp, Artificial Sequence
  derived and/or modified sequence
atgagaaagggagttcttaaggatcccgagattgcggacctgttctataaggatgatcctgaggagttgttcattggcctacacgaaatcggacacggttcttttggctag

SEQ ID NO: 334412 - DNA, 132 bp, Artificial Sequence
  derived and/or modified sequence
atggaatcaacatcaaacagaatcaaacggaattatcgaatggaatcgaagacaatcatcgaatggactcgaatggaatcatctaatggaatggaatggaagaatccatggtctcgaatgcaatcatcatcg

SEQ ID NO: 334413 - protein, 267 aa, Artificial Sequence
  derived and/or modified sequence
MADSEALPSLAGDPVAVEALLRAVFGVVVDEAIQKGTSVSQKVCEWKEPEELKQLLDLELRSQGESQKQILERCRAVIRYSVKTGHPRFFNQLFSGLDPHALAGRIITESLNTSQYTYEIAPVFVLMEEEVLRKLRALVGWSSGDGIFCPGGSISNMYAVNLARYQRYPDCKQRGLRTLPPLALFTSKEVGKRHRPNPGLLILISSHVTTPSRRELRFWDLAPTVSEWSRLMREGKWSPRIWRGRLVWPRLRVLCRSWSVPPLAPLC

SEQ ID NO: 334414 - DNA, 804 bp, Artificial Sequence
  derived and/or modified sequence
atggccgacagcgaggccctgcccagcctggccggcgaccccgtggccgtggaggccctgctgagagccgtgttcggcgtggtggtggacgaggccatccagaagggcaccagcgtgagccagaaggtgtgcgagtggaaggagcccgaggagctgaagcagctgctggacctggagctgagaagccagggcgagagccagaagcagatcctggagagatgcagagccgtgatcagatacagcgtgaagaccggccaccccagattcttcaaccagctgttcagcggcctggacccccacgccctggccggcagaatcatcaccgagagcctgaacaccagccagtacacctacgagatcgcccccgtgttcgtgctgatggaggaggaggtgctgagaaagctgagagccctggtgggctggagcagcggcgacggcatcttctgccccggcggcagcatcagcaacatgtacgccgtgaacctggccagataccagagataccccgactgcaagcagagaggcctgagaaccctgccccccctggccctgttcaccagcaaggaggtgggcaagagacacagacccaaccccggcctgctgatcctgatcagcagccacgtgaccacccccagcagaagagagctgagattctgggacctggcccccaccgtgagcgagtggagcagactgatgagagagggcaagtggagccccagaatctggagaggcagactggtgtggcccagactgagagtgctgtgcagaagctggagcgtgccccccctggcccccctgtgctag

SEQ ID NO: 334415 - DNA, 804 bp, Artificial Sequence
  derived and/or modified sequence
atggcagattccgaggcattgcctagcctggctggagaccctgtagcggttgaagcactgctgagggccgtgttcggggtggtggttgacgaagccattcagaaggggacctcagtctctcagaaggtttgtgagtggaaggagccggaggaactcaaacaactccttgatcttgaactgaggagccagggagaatctcagaaacagattctggagcggtgcagagcagtgatcagatactcagtgaaaaccgggcacccaaggttttttaatcagctgttttccggcttggacccccatgccctggcaggtcggattattaccgagtccctgaatacttcccagtacacctatgagatcgccccggttttcgtgcttatggaggaggaagtacttcggaaactacgggctcttgtggggtggagttccggcgacggtattttctgccccggcggaagcatctctaacatgtatgccgtgaaccttgctcgctaccagcgatatcccgactgcaaacagcgaggactgagaactcttccacctctggctctgttcacaagtaaggaggtcggaaaaagacacaggccgaaccctgggttattgatccttatctcctcacacgttacgactcctagtaggagggagttgagattttgggatcttgccccgaccgtctctgagtggagtcgactgatgcgggaggggaaatggtctcctcgcatttggaggggacggttagtctggcccagattgcgggtcctttgcaggtcttggagtgtccctcctctggcccccctgtgttag

SEQ ID NO: 334416 - DNA, 804 bp, Artificial Sequence
  derived and/or modified sequence
atggctgacagcgaggccctgcccagcctggccggggaccctgtggccgtggaggccctgctgcgggctgtgtttggagtggtggtggatgaggccatccagaagggcacctctgtgtcccagaaggtgtgtgagtggaaggagcctgaggagctgaagcagctgctggacctggagctgcggagccagggcgagagccagaagcagatcctggagcgctgccgggccgtcatccgctacagcgtgaagacaggccacccccgcttcttcaaccagctgttcagcggcctggacccccacgccctggccggccgcatcatcacagagagcctgaacaccagccagtacacctatgagatcgcccctgtgtttgtgctgatggaggaggaggtgctgaggaagctgcgggccctggtgggctggagcagtggagatggcatcttctgccctgggggcagcatcagcaacatgtatgctgtgaacctggcccgctaccagcgctacccagactgcaagcagaggggcctgcggaccctgccccccctggccctcttcaccagcaaggaggtgggcaagaggcaccggcccaaccctggcctgctgatcctgatcagcagccacgtgaccacccccagcagaagagagctgcgcttctgggacctggcccccaccgtgtctgagtggagccggctgatgagggagggcaagtggagcccccgcatctggaggggccgcctggtgtggccccggctgcgggtgctgtgccgctcctggagcgtgccccccctggcccccctgtgctag

SEQ ID NO: 334417 - DNA, 804 bp, Artificial Sequence
  derived and/or modified sequence
atggccgacagcgaggccctgcccagcctggccggcgaccccgtggccgttgaagcgctgctgcgtgcagtgttcggagtcgtcgtggatgaggcaattcagaaagggacctcagtcagccaaaaggtgtgcgaatggaaagaacctgaggaacttaagcagctcctcgatcttgagttacgctcccaaggtgagagccaaaagcaaatccttgagcgatgccgcgctgtaatccgttacagcgtgaagaccggccatccaaggtttttcaaccaactcttctcaggattagatccgcacgcgctcgccggcagaatcatcacggaatcactgaacacttcacagtacacttatgagatcgcacccgtatttgttcttatggaggaggaggtgctgcggaagctgcgtgctttggtggggtggtcaagtggggatggcattttttgtcccggcggttccatctctaatatgtacgctgtcaacctcgcacggtaccaacgttaccccgactgtaaacagcgaggattaaggacacttccgccacttgcgctgttcaccagcaaagaggtggggaagcgtcaccggcccaatcctggcttgcttattctaatcagttctcatgtcaccactccttcacgccgagagttgcgattctgggacctagcacccacagtctcagagtggtcgaggcttatgcgggaagggaagtggagtccgcggatttggcgcggtcgtttggtttggccaagactgcgtgtgctttgtcggtcttggtccgtgccaccactggcacctctatgttag

SEQ ID NO: 334418 - DNA, 804 bp, Artificial Sequence
  derived and/or modified sequence
atggctgatagcgaagccctcccgagtctggccggagacccagtcgccgtagaagcactgttgagggccgtatttggggttgtcgtcgacgaggcgattcagaaaggtacttccgtctctcagaaggtgtgtgagtggaaggaacccgaggagcttaaacagcttctggatttggagcttcgttcacagggggagtcccagaaacagatcctagaacgctgtcgggctgtgatccgctattccgttaagacaggtcaccctcgcttcttcaatcagctgttctccggtctggatcctcacgccctggctggtcgcattattacagaatcgctgaatacatcccaatatacttacgagatcgcccctgtattcgtgctaatggaggaggaagtgttgaggaagctcagagccttggtgggctggtctagcggagatggcatcttctgccccggagggtctatttcaaatatgtatgccgtgaatctcgccaggtatcagcgctatcccgactgtaaacaaagggggcttcgcactttgcctcctctcgcattgtttacttctaaagaggttgggaaaaggcatcgtccgaaccccggactcctgattctaataagcagccacgtgactactccctcccgcagagagctgcggttctgggatctcgctcccaccgttagcgaatggtccagacttatgagagagggtaagtggagtccacgaatctggaggggcaggctggtctggcccagactgagagtactctgtcgatcgtggagcgtcccacctctggcccctctttgttag

SEQ ID NO: 334419 - DNA, 2155 bp, Artificial Sequence
  derived and/or modified sequence
gcttggggacgcacggagaggtgcagctgggtgagtgggcggcgccgtgcgccgagggcatggaggaggctgaggagctacctgtgcaccctgcctccggctctcctgagcagagagatcctgatggctgactcagaagcactcccctcccttgctggggacccagtggctgtggaagccttgctccgggccgtgtttggggttgttgtggatgaggccattcagaaaggaaccagtgtctcccagaaggtctgtgagtggaaggagcctgaggagctgaagcagctgctggatttggagctgcggagccagggcgagtcacagaagcagatcctggagcggtgtcgggctgtgattcgctacagtgtcaagactggtcaccctcggttcttcaaccagctcttctctgggttggatccccatgctctggccgggcgcattatcactgagagcctcaacaccagccagtacacatatgaaatcgcccccgtgtttgtgctcatggaagaggaggtgctgaggaaactgcgggccctggtgggctggagctctggggacggaatcttctgccctggtggctccatctccaacatgtatgctgtaaatctggcccgctatcagcgctacccggattgcaagcagaggggcctccgcacactgccgcccctggccctattcacatcgaaggaggtggggaagaggcacaggcccaaccctgggctcctgattctaatctccagccatgtcactactccatccagaagggagctgcgtttctgggacttggcaccgacagtgtccgagtggtcaaggctgatgagagagggaaaatggtccccgaggatctggagaggcagattggtatggccgaggctgagggtgctgtgccgttcctggtcagtgccacctctggcaccactgtgctaggggcctttgaccccctggaggcaattgctgatgtgtgccagcgtcatgggctatggctgcatgtggatggctgactctgtggcctggaatccccacaagctcctcgcagcaggcctgcaatgctctgcacttcttctccaggatacctcgaacctgctcaagcgctgccatgggtcccaggccagctaccttttccagcaggacaagttctacgatgtggctctggacacgggagacaaggtggtgcagtgtggccgccgtgtggactgtctgaagctgtggctcatgtggaaggcacagggcgatcaagggctggagcggcgcatcgaccaggcctttgtccttgcccggtacctggtggaggaaatgaagaagcgggaagggtttgagctagtcatggagcctgagtttgtcaatgtgtgtttctggttcgtaccccccagcctgcgagggaagcaggagagtccagattaccacgaaaggctgtcaaaggtggctcacgcctgtaatcccagcactttgggaggccgaggcgggtggatcacttgaggtcaggagttcgagaccagcctggccaataaggtgaaaccctgtctctactaaaaatacaaaaattagccgagcatggtggcctgtgcctgtaaacccagctactcaggaggttggggcagaattgcttgaacccagggggcagaggttgcagtgagccgagattgcacccctgcactccaggctgggcaacagtacgagactctgttccaaaaaaaataaaaaagaacagcctttttaggccacagtgacctgcgcaatgtttatatgctttgacctactaactttctcctaactaaatatttgattttaggagagtgtttaaataaattacagtatgtctatatgatgaaatgttattttgccattaaaattttgtttacaaagataatttttattgacataaaaataactttaatgtaatttatgttgaaaaagctgaatacaagtctttatatagagtaatatttgagctgtgttcaaaaatacataggaaaagactgataaaatgaaatatggcaaaatgttaatagttttccctggaataggataataggcaattttaaaacagactcctttaaaaaaacaaacaaacaaaaaaaacatagacttctttatatcttttgagctccctcccttttattatgtaatgaatatgtgttgcttttgtaataggaaa

SEQ ID NO: 334420 - DNA, 459 bp, Artificial Sequence
  derived and/or modified sequence
atggccgacagcgaggccctgcccagcctggccggcgaccccgtggccgtggaggccctgctgagagccgtgttcggcgtggtggtggacgaggccatccagaagggcaccagcgtgagccagaaggtgtgcgagtggaaggagcccgaggagctgaagcagctgctggacctggagctgagaagccagggcgagagccagaagcagatcctggagagatgcagagccgtgatcagatacagcgtgaagaccggccaccccagattcttcaaccagctgttcagcggcctggacccccacgccctggccggcagaatcatcaccgagagcctgaacaccagccagtacacctacgagatcgcccccgtgttcgtgctgatggaggaggaggtgctgagaaagctgagagccctggtgggctggagcagcggcgacggcatcttctgccccggcctgtag

SEQ ID NO: 334421 - DNA, 459 bp, Artificial Sequence
  derived and/or modified sequence
atggccgactctgaagctctgccaagcctggcaggcgaccccgttgctgtcgaggctctgcttagggctgtgttcggagtggtggtcgacgaggccatacaaaaagggactagtgttagccagaaggtttgcgaatggaaagaacctgaagagctcaagcagctgctggatttagagctgaggtcccaaggggaatctcagaagcagatcttagagaggtgtagggcagtcatacgatatagcgtcaagacgggtcacccaagattctttaatcagctgttctccggcctggatccgcatgcgctcgccggtcggatcataacagagtcactgaatacctcccaatacacatatgaaattgcaccagtcttcgtgttaatggaagaggaggtgctgagaaaactgcgggctcttgtgggatggtcctccggagacgggatattctgtccaggcttgtag

SEQ ID NO: 334422 - DNA, 459 bp, Artificial Sequence
  derived and/or modified sequence
atggctgacagcgaggccctgcccagcctggccggggaccctgtggccgtggaggccctgctgcgggctgtgtttggagtggtggtggatgaggccatccagaagggcacctctgtgtcccagaaggtgtgtgagtggaaggagcctgaggagctgaagcagctgctggacctggagctgcggagccagggcgagagccagaagcagatcctggagcgctgccgggccgtcatccgctacagcgtgaagacaggccacccccgcttcttcaaccagctgttcagcggcctggacccccacgccctggccggccgcatcatcacagagagcctgaacaccagccagtacacctatgagatcgcccctgtgtttgtgctgatggaggaggaggtgctgaggaagctgcgggccctggtgggctggagcagtggagatggcatcttctgccccggcctgtag

SEQ ID NO: 334423 - DNA, 459 bp, Artificial Sequence
  derived and/or modified sequence
atggccgacagcgaggccctgcccagcctggccggcgaccccgtggccgtcgaagccttactgcgggcagttttcggagtggtcgttgacgaggctattcaaaaagggacaagcgtctcacagaaagtctgtgaatggaaggaaccagaagaactaaaacagctcctagatctcgagctgaggtcacagggcgagtcccagaaacagatactcgagcggtgccgggccgtgatcagatattccgtaaagaccggacatcctcggttcttcaaccagctgttctccggtctggatccccacgcccttgccgggcgaattatcactgagagtcttaataccagtcagtatacgtacgagattgcccctgtttttgtgctcatggaagaagaggtgctgagaaaattaagagccctggtcggttggtcctcaggggacggcattttctgcccaggactgtag

SEQ ID NO: 334424 - DNA, 459 bp, Artificial Sequence
  derived and/or modified sequence
atggctgactcagaggccctgccaagtctggccggagatcctgtcgcagtggaggctctgctgagggctgtgttcggcgtcgtggtggacgaggcgattcaaaagggcacaagcgtcagccaaaaggtgtgtgaatggaaggagccagaggagttaaagcaactcctggacctggagctgaggtcacagggagaaagtcagaaacagattttggaaagatgccgcgctgtgatccgctattctgtgaaaactggacaccccagattcttcaatcagctgttctccggcctagatccgcacgcactggcgggtcgcataattactgagtcgctcaatacatctcaatacacgtatgagatagcgccagtttttgtcttgatggaagaggaggttctccgaaagctgcgagccctggtgggctggagttcaggcgacggaatcttctgccccggattgtag

SEQ ID NO: 334425 - DNA, 1041 bp, Artificial Sequence
  derived and/or modified sequence
atggccgacagcgaggccctgcccagcctggccggcgaccccgtggccgtggaggccctgctgagagccgtgttcggcgtggtggtggacgaggccatccagaagggcaccagcgtgagccagaagtgccactacagcatccagaagggcgccgccttcctgggcctgggcaccgacagcgtgagagtggtgaaggccgacgagagaggcaagatggtgcccgaggacctggagagacagatcggcatggccgaggccgagggcgccgtgcccttcctggtgagcgccaccagcggcaccaccgtgctgggcgccttcgaccccctggaggccatcgccgacgtgtgccagagacacggcctgtggctgcacgtggacgccgcctggggcggcagcgtgctgctgagccagacccacagacacctgctggacggcatccagagagccgacagcgtggcctggaacccccacaagctgctggccgccggcctgcagtgcagcgccctgctgctgcaggacaccagcaacctgctgaagagatgccacggcagccaggccagctacctgttccagcaggacaagttctacgacgtggccctggacaccggcgacaaggtggtgcagtgcggcagaagagtggactgcctgaagctgtggctgatgtggaaggcccagggcgaccagggcctggagagaagaatcgaccaggccttcgtgctggccagatacctggtggaggagatgaagaagagagagggcttcgagctggtgatggagcccgagttcgtgaacgtgtgcttctggttcgtgccccccagcctgagaggcaagcaggagagccccgactaccacgagagactgagcaaggtggcccccgtgctgaaggagagaatggtgaaggagggcagcatgatgatcggctaccagccccacggcaccagaggcaacttcttcagagtggtggtggccaacagcgccctgacctgcgccgacatggacttcctgctgaacgagctggagagactgggccaggacctgtag

SEQ ID NO: 334426 - DNA, 2253 bp, Artificial Sequence
  derived and/or modified sequence
acttccgggctcggcagctagactagcgggggcagcctcagagcgggtgagcttggggacgcacggagaggtgcagctgggccgtccagcatcaaacactagcctccacacgtggaaaagaccctgactcccacagtagactagtcttatgggagtcctggctcttgggccaggctgcattaggaaaatggaaaccagactgtcttcaaattcttctgcctagccttagccattagagagaggtcctgctaaagatggactgcaaatgcgcttgatggaaggagatgtcaattccactgaagtcctcatttctgctgagctacctgtgcaccctgcctccggctctcctgagcagagagatcctgatggctgactcagaagcactcccctcccttgctggggacccagtggctgtggaagccttgctccgggccgtgtttggggttgttgtggatgaggccattcagaaaggaaccagtgtctcccagaagtgtcactactccatccagaagggagctgcgtttctgggacttggcaccgacagtgtccgagtggtcaaggctgatgagagagggaaaatggtccccgaggatctggagaggcagattggtatggccgaggctgagggtgctgtgccgttcctggtcagtgccacctctggcaccactgtgctaggggcctttgaccccctggaggcaattgctgatgtgtgccagcgtcatgggctatggctgcatgtggatgctgcctggggtgggagcgtcctgctgtcacagacacacaggcatctcctggatgggatccagagggctgactctgtggcctggaatccccacaagctcctcgcagcaggcctgcaatgctctgcacttcttctccaggatacctcgaacctgctcaagcgctgccatgggtcccaggccagctaccttttccagcaggacaagttctacgatgtggctctggacacgggagacaaggtggtgcagtgtggccgccgtgtggactgtctgaagctgtggctcatgtggaaggcacagggcgatcaagggctggagcggcgcatcgaccaggcctttgtccttgcccggtacctggtggaggaaatgaagaagcgggaagggtttgagctagtcatggagcctgagtttgtcaatgtgtgtttctggttcgtaccccccagcctgcgagggaagcaggagagtccagattaccacgaaaggctgtcaaaggtggcccccgtgctcaaggagcgcatggtgaaggagggctccatgatgattggctaccagccccacgggacccggggcaacttcttccgtgtggttgtggccaactctgcactgacctgtgctgatatggacttcctcctcaacgagctggagcggctaggccaggacctgtgagccttctctgtcttgctgccggccttgataccacccctcacccgcagagtcactgcattccctcccagcctttgaggccgggtgcagtggctcacgcctgtaatcccagcactttgggaggccgaggcgggtggatcacttgaggtcaggagttcgagaccagcctggccaataaggtgaaaccctgtctctactaaaaatacaaaaattagccgagcatggtggcctgtgcctgtaaacccagctactcaggaggttggggcagaattgcttgaacccagggggcagaggttgcagtgagccgagattgcacccctgcactccaggctgggcaacagtacgagactctgttccaaaaaaaataaaaaagaacagcctttttaggccacagtgacctgcgcaatgtttatatgctttgacctactaactttctcctaactaaatatttgattttaggagagtgtttaaataaattacagtatgtctatatgatgaaatgttattttgccattaaaattttgtttacaaagataatttttattgacataaaaataactttaatgtaatttatgttgaaaaagctgaatacaagtctttatatagagtaatatttgagctgtgttcaaaaatacataggaaaagactgataaaatgaaatatggcaaaatgttaatagttttccctggaataggataataggcaattttaaaacagactcctttaaaaaaacaaacaaacaaaaaaaacatagacttctttatatcttttgagctccctcccttttattatgtaatgaatatgtgttgcttttgtaataggaaaataataaagttaaaatttcaactgc

SEQ ID NO: 334427 - DNA, 1962 bp, Artificial Sequence
  derived and/or modified sequence
gcttggggacgcacggagaggtgcagctggggtggctcacacctgtaatcccagcacgttgggaagccgaggtggggaatgactctgctctgccacagatcctgatggctgactcagaagcactcccctcccttgctggggacccagtggctgtggaagccttgctccgggccgtgtttggggttgttgtggatgaggccattcagaaaggaaccagtgtctcccagaagtgtcactactccatccagaagggagctgcgtttctgggacttggcaccgacagtgtccgagtggtcaaggctgatgagagagggaaaatggtccccgaggatctggagaggcagattggtatggccgaggctgagggtgctgtgccgttcctggtcagtgccacctctggcaccactgtgctaggggcctttgaccccctggaggcaattgctgatgtgtgccagcgtcatgggctatggctgcatgtggatgctgcctggggtgggagcgtcctgctgtcacagacacacaggcatctcctggatgggatccagagggctgactctgtggcctggaatccccacaagctcctcgcagcaggcctgcaatgctctgcacttcttctccaggatacctcgaacctgctcaagcgctgccatgggtcccaggccagctaccttttccagcaggacaagttctacgatgtggctctggacacgggagacaaggtggtgcagtgtggccgccgtgtggactgtctgaagctgtggctcatgtggaaggcacagggcgatcaagggctggagcggcgcatcgaccaggcctttgtccttgcccggtacctggtggaggaaatgaagaagcgggaagggtttgagctagtcatggagcctgagtttgtcaatgtgtgtttctggttcgtaccccccagcctgcgagggaagcaggagagtccagattaccacgaaaggctgtcaaaggtggcccccgtgctcaaggagcgcatggtgaaggagggctccatgatgattggctaccagccccacgggacccggggcaacttcttccgtgtggttgtggccaactctgcactgacctgtgctgatatggacttcctcctcaacgagctggagcggctaggccaggacctgtgagccttctctgtcttgctgccggccttgataccacccctcacccgcagagtcactgcattccctcccagcctttgaggccgggtgcagtggctcacgcctgtaatcccagcactttgggaggccgaggcgggtggatcacttgaggtcaggagttcgagaccagcctggccaataaggtgaaaccctgtctctactaaaaatacaaaaattagccgagcatggtggcctgtgcctgtaaacccagctactcaggaggttggggcagaattgcttgaacccagggggcagaggttgcagtgagccgagattgcacccctgcactccaggctgggcaacagtacgagactctgttccaaaaaaaataaaaaagaacagcctttttaggccacagtgacctgcgcaatgtttatatgctttgacctactaactttctcctaactaaatatttgattttaggagagtgtttaaataaattacagtatgtctatatgatgaaatgttattttgccattaaaattttgtttacaaagataatttttattgacataaaaataactttaatgtaatttatgttgaaaaagctgaatacaagtctttatatagagtaatatttgagctgtgttcaaaaatacataggaaaagactgataaaatgaaatatggcaaaatgttaatagttttccctggaataggataataggcaattttaaaacagactcctttaaaaaaacaaacaaacaaaaaaaacatagacttctttatatcttttgagctccctcccttttattatgtaatgaatatgtgttgcttttgtaata

SEQ ID NO: 334428 - DNA, 1041 bp, Artificial Sequence
  derived and/or modified sequence
atggctgactccgaggccttacccagtctcgcaggagatccggtagcagtagaagccctgctcagggctgtcttcggggtcgtggtggacgaggcaatccagaaagggacctcagtatcgcagaagtgccactatagcatacagaagggggccgctttcttgggactgggcaccgattccgtcagagtggtaaaggcagacgagcggggcaaaatggtccccgaagatttggagcgccaaatcgggatggccgaggccgaaggagcagtcccatttcttgtgtctgcaacatccgggacgactgtattaggagcattcgatcccttggaagccatcgcagacgtgtgccagaggcacgggctctggctgcacgtggacgcagcatggggcgggagcgtgttgctttcccagacccaccgacatttactggacggcatccaaagggcggattccgtggcctggaatccacacaaattactggcggccggccttcagtgtagcgcactgttgcttcaagacacttcaaatcttctgaagcggtgccatgggagtcaggccagctacctgtttcagcaggacaagttttacgatgtggcacttgacactggtgacaaggttgttcagtgcggaaggagagtcgattgtctgaagttgtggcttatgtggaaagcgcagggtgaccaaggtttggaaagaaggatagaccaggcctttgtcctggcgagatacctagtggaggaaatgaaaaaacgggaagggtttgagctggtcatggagcccgaatttgtcaacgtgtgtttttggtttgtccccccctctctgagaggaaaacaggaatcccctgattaccacgagcgtctgtcaaaagtagcgcccgttcttaaggaacggatggttaaagagggctctatgatgattggctaccagccacatggcactcggggcaatttctttagagtggttgtggcaaatagcgcgttgacatgcgccgacatggatttcctgctgaatgagctggaaagattggggcaggatttgtag

SEQ ID NO: 334429 - DNA, 1041 bp, Artificial Sequence
  derived and/or modified sequence
atggccgacagcgaagccctcccctccttggccggggatccagtcgccgtagaggctctgctcagggctgtgttcggagtggtggtcgatgaagctattcaaaaggggacgtccgtgtcacagaaatgtcactactctatccagaagggcgctgcctttttaggcctgggcaccgatagcgtcagggtggtcaaagctgacgagcgaggcaagatggtacctgaagatctggaaaggcaaataggcatggctgaggccgagggagctgtgccttttctggtgtccgccacatcaggaacaaccgtcctgggcgcctttgacccattggaggccattgccgacgtatgccaaaggcatggtctctggctgcacgtggacgctgcctggggcggttcagtcttactgtctcagactcatcgccaccttttggatgggatccaaagagcagatagcgtggcctggaacccccacaagctgcttgccgctggtctccagtgcagcgctctgttactccaggacacttccaatctccttaagcggtgccacggcagccaagccagctacctgtttcagcaggataagttttatgatgtggccctagacacaggggacaaggtagttcagtgcgggcggcgggtcgattgcttgaagctctggctcatgtggaaggcccagggcgatcagggattagaacgtcgaatcgaccaggcttttgttctggcgcgctatttagtggaagaaatgaagaagcgagaggggtttgagctggttatggagcccgagttcgtaaatgtctgtttctggttcgtgccacctagcctgcgcggcaaacaggagagccccgactaccacgagagactgagcaaggtcgcaccagtactgaaggagcggatggtcaaagaagggagcatgatgatcgggtatcaaccacatgggacacgaggcaattttttcagagttgtggtcgccaactctgccctcacgtgtgcagacatggacttcttattaaatgaactagagaggctggggcaggacctgtag

SEQ ID NO: 334430 - DNA, 1041 bp, Artificial Sequence
  derived and/or modified sequence
atggctgacagcgaggccctgcccagcctggccggggaccctgtggccgtggaggccctgctgcgggctgtgtttggagtggtggtggatgaggccatccagaagggcacctctgtgtcccagaagtgccactacagcatccagaagggagctgccttcctgggcctgggcacagacagcgtgcgggtggtgaaggcagatgagcggggcaagatggtgcctgaggacctggagcggcagatcggcatggccgaggccgagggcgctgtgcccttcctggtgtctgccaccagcggcaccaccgtgctgggcgcctttgaccccctggaggccatcgcagatgtgtgccagagacatggcctgtggctgcacgtggatgctgcctggggcggctctgtgctgctgagccagacccaccgccacctgctggatggcatccagagagctgacagcgtggcctggaacccccacaagctgctggccgccggcctgcagtgcagcgccctgctgctgcaggacaccagcaacctgctgaagcgctgccacggcagccaggccagctacctgttccagcaggacaagttctatgatgtggccctggacaccggggacaaggtggtgcagtgtggcagaagagtggactgcctgaagctgtggctgatgtggaaggcccagggcgaccagggcctggagaggagaattgaccaggcctttgtgctggcccgctacctggtggaggagatgaagaagcgggagggctttgagctggtgatggagcctgagtttgtgaatgtgtgcttctggtttgtgccccccagcctgcggggcaagcaggagagcccagactaccacgagcggctgagcaaggtggcccctgtgctgaaggagaggatggtgaaggagggctccatgatgattggctaccagccccacggcacccggggcaacttcttccgggtggtggtggccaacagcgccctgacctgtgccgacatggacttcctgctgaatgagctggagcggctgggccaggacctgtag

SEQ ID NO: 334431 - DNA, 1041 bp, Artificial Sequence
  derived and/or modified sequence
atggccgacagcgaggccctgcccagcctggccggcgaccccgtggctgtggaagcattgctgcgagccgttttcggcgtggtcgtggacgaggcaatccaaaagggaacctctgtgtcacagaagtgccactattccattcagaagggagccgccttcctaggactcggtaccgattccgtccgcgtggttaaagctgatgagcgaggtaaaatggtcccggaagacttagagcgtcagatcgggatggctgaagccgagggtgccgtgcctttcttagtgtccgctacctcagggaccacagtgctgggagcctttgatccacttgaggctatcgcagacgtgtgccagcggcacgggctgtggctgcacgtcgatgccgcttggggcggctcagttctgctgtcacagactcaccgccatttgcttgacggcattcagagggcagactccgttgcttggaatccgcataaactcctagcagcagggctccagtgcagtgctctactgttgcaggacacatcgaacctgctgaagagatgtcacgggagccaggcctcctatttgttccagcaggataaattctatgatgtagcactggacactggagataaggtggtccagtgcggcaggcgcgtggactgtttaaaattatggctcatgtggaaagctcagggcgatcaagggctcgaaaggcgtattgaccaggcattcgtgctggcccgctatttagtggaggaaatgaagaagagagaaggatttgaactcgtcatggaacccgagtttgtcaacgtgtgcttttggttcgtccccccttcgctacgaggtaagcaggagtcaccagactaccacgaacggctatccaaagtggcccccgttttaaaggaaaggatggtcaaggagggctcaatgatgatcggataccagccccacggaactcgcggaaatttcttcagggttgtggttgcgaattctgcattgacctgcgccgacatggacttcttactcaacgagttagaacgtctcggtcaggatttgtag

SEQ ID NO: 334432 - DNA, 1041 bp, Artificial Sequence
  derived and/or modified sequence
atggccgacagcgaggccctgcccagcctggccggcgaccccgtggctgtggaggcccttttgcgcgctgtgttcggagttgttgttgacgaggctatccagaaggggacttccgtgagccagaaatgtcattactccattcagaagggtgctgcctttcttggactgggcaccgattctgtgagggtggtgaaggctgacgagagaggcaaaatggtgccggaggacctcgagcggcagattggtatggcagaggcagagggagcggtgccttttctggtcagcgcaacttccggaactactgttctcggggcattcgatccactagaagccatagctgatgtgtgccaacgccacgggctgtggctccacgtagacgcagcctggggcggttctgttctcctgtcccagacacatcgtcacctcctggatggaatccagcgagctgactccgtggcgtggaatccgcataaactgctggcagctggactgcaatgcagcgctctgctcttgcaggatacctccaatctgctgaagcggtgtcacgggagccaggcctcttaccttttccagcaggacaaattttatgatgtcgcactagatactggtgacaaagttgtacagtgtggacgccgtgtggattgcctgaaactttggctgatgtggaaagcgcagggggaccagggcctggagagacgaattgaccaggcctttgtcctagctcgatacctcgttgaggagatgaagaaacgtgaagggtttgagcttgtaatggaaccagagttcgttaacgtgtgcttttggtttgtgcccccatctttgcgaggcaaacaggaatcccccgactaccacgaaaggcttagcaaggtggcgccggtactgaaagagcgaatggtcaaggagggctccatgatgattggttatcagccgcatggaacccggggtaatttcttccgggttgttgtggccaattccgcactgacatgcgctgacatggatttcctcttgaatgagctagagcggttgggtcaggacctctag

SEQ ID NO: 334433 - DNA, 1041 bp, Artificial Sequence
  derived and/or modified sequence
atggctgactctgaagctcttcccagtctggccggtgatcccgtcgctgttgaggcacttctgagagccgtattcggagttgtggtggacgaagcaatccagaaagggacatctgtgtctcaaaagtgccactatagtattcagaagggtgcagcttttctggggctgggaacagattccgtccgggtcgtgaaagctgacgagagaggtaaaatggtccccgaagacctggagagacaaattgggatggcagaagccgagggagcagtgccctttctggtgtccgctacctccgggaccaccgtactaggtgctttcgaccccctcgaagctatcgcggatgtctgtcagcgtcacggactgtggctgcatgtggacgcagcttggggaggtagtgtgctcctttcccaaacacatagacacttgctggatggaattcagcgggcagatagcgttgcatggaatcctcataagctgctcgcagccggactccagtgtagtgcactactgctccaggatacctctaacctacttaaaaggtgccatgggagtcaggcctcgtatttgtttcaacaggacaaattttacgacgttgcattggatacaggagataaagtggtgcagtgcggcaggagggtggactgcttaaaactctggctgatgtggaaggcacagggggatcagggtctcgagcgcaggatagatcaggccttcgtgctagctaggtacttggtggaggagatgaagaagcgggaggggtttgaactggtaatggaacctgagtttgttaacgtgtgtttttggtttgtacctccttctcttaggggcaagcaggaaagcccagactatcacgaaagactttcgaaagtggccccagttttgaaagagcgaatggtcaaggaaggctctatgatgatcggataccagccacacgggaccagagggaacttttttcgagtggtggtcgccaactccgcgctcacttgcgctgacatggatttcttgttgaacgagctagagagattgggacaggacctgtag

SEQ ID NO: 334434 - DNA, 1041 bp, Artificial Sequence
  derived and/or modified sequence
atggcggacagcgaagccctgccctctctggctggggaccctgttgcagtggaggctctcttgagggcggtgtttggagtggtggtcgatgaagctatccagaaaggcacctctgtaagtcagaaatgccactattctatccaaaagggggcagctttcctcgggctgggtacagatagtgtcagggtggtgaaagccgatgagcgcggtaagatggtgcccgaggatctcgagaggcagatcggcatggcagaagcagagggcgctgtacctttcctggtaagtgcaacgtccggcacgaccgtgctcggtgcctttgatccactggaggccatcgccgacgtatgtcagagacatgggctctggctgcatgtggacgcggcatggggcggttcagttttgctgagccagacgcatagacacctcttggacggcatccagagagctgacagtgtagcctggaacccgcacaagctcctggccgcaggacttcagtgctccgcacttctgctgcaggatacctcgaatctcttaaagaggtgccacggctcacaggcgtcctatctcttccagcaggataaattctacgacgtcgctctcgatacgggagataaagtagtgcaatgcgggagaagggtcgactgtctaaagttgtggctgatgtggaaggcccaaggcgatcaaggccttgaaaggcggatagaccaggctttcgttctcgctcgataccttgtggaggaaatgaagaaaagagaaggctttgagctcgtcatggagcctgagttcgttaatgtgtgcttctggttcgtgccacctagcctccgcggtaagcaggagtcccctgattatcacgagcggttgtctaaggtcgctcccgtgttaaaggaacggatggtaaaggaaggctcgatgatgatcggataccaaccacacgggacccgagggaacttcttccgagttgtggtggcaaactcagccctgacttgcgcagacatggatttccttttaaatgaactggagagattgggccaagacctctag

SEQ ID NO: 334435 - protein, 760 aa, Artificial Sequence
  derived and/or modified sequence
MESSPFNRRQWTSLSLRVTAKELSLVNKNKSSAIVEIFSKYQKAAEETNMEKKRSNTENLSQHFRKGTLTVLKKKWENPGLGAESHTDSLRNSSTEIRHRADHPPAEVTSHAASGAKADQEEQIHPRSRLRSPPEALVQGRYPHIKDGEDLKDHSTESKKMENCLGESRHEVEKSEISENTDASGKIEKYNVPLNRLKMMFEKGEPTQTKILRAQSRSASGRKISENSYSLDDLEIGPGQLSSSTFDSEKNESRRNLELPRLSETSIKDRMAKYQAAVSKQSSSTNYTNELKASGGEIKIHKMEQKENVPPGPEVCITHQEGEKISANENSLAVRSTPAEDDSPGDSQVKSEVQQPVHPKPLSPDSRASSLSESSPPKAMKKFQAPARETCVECQKTVYPMERLLANQQVFHISCFRCSYCNNKLSLGTYASLHGRIYCKPHFNQLFKSKGNYDEGFGHRPHKDLWASKNENEEILERPAQLANARETPHSPGVEDAPIAKVGVLAASMEAKASSQQEKEDKPAETKKLRIAWPPPTELGSSGSALEEGIKMSKPKWPPEDEISKPEVPEDVDLDLKKLRRSSSLKERSRPFTVAASFQSTSVKSPKTVSPPIRKGWSMSEQSEESVGGRVAERKQVENAKASKKNGNVGKTTWQNKESKGETGKRSKEGHSLEMENENLVENGADSDEDDNSFLKQQSPQEPKSLNWSSFVDNTFAEEFTTQNQKSQDVELWEGEVVKELSVEEQIKRNRYYDEDEDEE

SEQ ID NO: 334436 - protein, 600 aa, Artificial Sequence
  derived and/or modified sequence
MENCLGESRHEVEKSEISENTDASGKIEKYNVPLNRLKMMFEKGEPTQTKILRAQSRSASGRKISENSYSLDDLEIGPGQLSSSTFDSEKNESRRNLELPRLSETSIKDRMAKYQAAVSKQSSSTNYTNELKASGGEIKIHKMEQKENVPPGPEVCITHQEGEKISANENSLAVRSTPAEDDSPGDSQVKSEVQQPVHPKPLSPDSRASSLSESSPPKAMKKFQAPARETCVECQKTVYPMERLLANQQVFHISCFRCSYCNNKLSLGTYASLHGRIYCKPHFNQLFKSKGNYDEGFGHRPHKDLWASKNENEEILERPAQLANARETPHSPGVEDAPIAKVGVLAASMEAKASSQQEKEDKPAETKKLRIAWPPPTELGSSGSALEEGIKMSKPKWPPEDEISKPEVPEDVDLDLKKLRRSSSLKERSRPFTVAASFQSTSVKSPKTVSPPIRKGWSMSEQSEESVGGRVAERKQVENAKASKKNGNVGKTTWQNKESKGETGKRSKEGHSLEMENENLVENGADSDEDDNSFLKQQSPQEPKSLNWSSFVDNTFAEEFTTQNQKSQDVELWEGEVVKELSVEEQIKRNRYYDEDEDEE

SEQ ID NO: 334437 - DNA, 2283 bp, Artificial Sequence
  derived and/or modified sequence
atggagtccagcccatttaataggagacagtggacatctttatcccttagggtgacagcgaaagagctgtccttagtgaataaaaacaagagttctgcaatcgtggaaatttttagtaagtaccaaaaagctgctgaggaaaccaacatggaaaaaaagcgcagcaatacggagaacctgagccaacacttccggaagggcaccctgacagtccttaagaagaagtgggagaatccaggcctgggggctgagtctcacacagactctttgagaaactcctcgaccgagatccggcacagggcagaccatcctcccgcagaggtcacctcccacgctgccagcggcgctaaagccgatcaagaagaacaaattcaccccagatcgcggctgcgcagcccaccggaagctttagtacagggtcgttatccacacataaaggatggcgaagatctgaaggaccattccactgaaagcaaaaaaatggagaattgcttgggcgagagtaggcatgaagtggaaaagagcgagatctctgaaaatacagatgccagtggcaaaattgagaagtacaacgtccctctgaaccggttaaaaatgatgtttgagaagggcgaacccacgcagacgaagattttgcgtgcccaaagccgttccgcaagtggaagaaaaatttctgaaaacagttacagcttagacgatctggagatcggtcctgggcaactgagctcctccaccttcgattcagagaaaaatgaaagccgaaggaatctagagctcccacgcctgtcagagaccagtataaaagataggatggccaaataccaggcggctgtcagtaaacagtcttcaagcacgaattatactaacgagctgaaggcctctggaggagagatcaagatccacaagatggaacagaaagagaatgttccccccgggcctgaggtgtgcattacacatcaggagggagagaagatttccgccaatgaaaacagtctggcagtacgcagtacacccgctgaggatgacagtcctggcgactcccaggtcaaaagtgaagtgcagcaaccagtccacccgaagcctctctcccctgattcaagggccagttctctctcggagagttctccccctaaggctatgaagaagtttcaggcaccagccagagaaacctgcgtcgaatgtcagaagacagtctacccaatggaacgattgcttgcaaaccagcaagtgttccatattagttgcttcagatgctcatactgtaacaacaaattgagtcttggcacctatgcttccctgcatggccgcatttactgtaagccacactttaatcagctgttcaaatcaaaagggaactacgacgaggggttcggacaccgtccgcacaaagatttgtgggcttccaagaatgaaaatgaggaaatactggagcggcctgcccagctggccaacgccagagaaaccccccactcgcccggcgtggaggacgcgcctatcgccaaggttggggtactggctgcctctatggaggccaaagcatcctcccaacaagagaaggaagataaacctgccgagaccaagaaactgagaatagcatggccaccccccactgagctgggctctagcggcagcgccctcgaagaaggaatcaagatgtcaaagccaaagtggccccctgaagacgagatatccaaacccgaggtgccagaagatgtcgatctggacttaaagaagttgcggcgctcgtctagtctcaaggaacgctccagaccctttacggtggcggcttcttttcagtccacatccgtgaagtcacccaaaacagtcagtccaccaataaggaaaggctggtcaatgtccgagcaaagcgaagaatctgtgggtgggagagtcgctgagagaaaacaggtcgagaatgccaaggccagtaaaaagaacgggaatgtgggcaagactacttggcagaacaaagaatctaagggagagactggcaagcggagtaaggaaggccacagcctagagatggagaatgagaatctggtcgagaatggtgctgattcagacgaggacgataacagtttcctcaagcagcagtcgccgcaagagccgaagagtcttaattggagcagcttcgttgataacacgttcgccgaagagtttactacccagaaccagaagagccaagatgttgagttgtgggaaggagaggtagtgaaggagctctctgtggaggaacagatcaagcggaatagatactacgacgaagacgaggacgaagagtag

SEQ ID NO: 334438 - DNA, 1803 bp, Artificial Sequence
  derived and/or modified sequence
atggaaaattgcctcggtgagagtcgtcatgaggtcgagaaatctgagatttctgaaaacaccgatgccagtggcaagatcgagaaatacaatgtccccctaaatcgccttaagatgatgtttgaaaagggggaacccacccagaccaagatccttagagctcagagcaggtccgcctccggaagaaaaatcagtgaaaactcatattccctggatgatctggaaattggtccaggacaactctcctcgagcacattcgattccgaaaagaacgaatcaagaaggaacttggagctgccaagactgtccgaaacgtctataaaggaccggatggctaaatatcaggccgccgtatctaagcagtctagcagcacgaattacactaatgagcttaaagcgtccgggggtgagattaagattcacaagatggagcaaaaagagaacgtgccgccgggacccgaggtgtgtattacacaccaggaaggtgagaaaatttctgctaacgaaaactcattggccgtcagaagcactcctgccgaggatgacagccctggtgactcccaggtcaaaagtgaagtgcagcagcctgtgcaccctaaacctctgtcacctgactcccgcgcctctagtctgtcggagtcatcacctcccaaggccatgaaaaaattccaggcaccagccagggaaacctgcgtcgaatgccagaaaacggtttaccctatggagcggctcctggcaaatcagcaagtgttccacatctcatgttttagatgttcatattgcaataataaactatctctcggaacctatgccagtctgcacggcagaatttactgtaagcctcattttaatcagctgttcaagtcgaaaggtaactacgatgaaggatttggccataggccacataaagatctttgggcatccaagaatgagaatgaggaaatactcgagaggcccgcacagcttgctaatgcacgcgagactcctcacagtcccggagtcgaggatgcccctatcgcgaaagtgggggtacttgcagcatctatggaagcgaaggcttctagtcagcaggaaaaggaagataaacctgcggaaacaaagaaattgcggatcgcctggcctccgccaaccgagttgggcagttcgggttctgccttagaagagggcatcaagatgagtaagccaaaatggccacctgaagacgaaatctccaagccagaggttcctgaagatgtggatctggacctgaagaagctgcgacgaagtagtagcttgaaggagcgctcccgcccatttaccgtagccgcctccttccaaagcacttcggttaagtcgccaaaaacagtatccccaccaatcaggaaaggctggtccatgtccgaacaatctgaggagagtgttggcggacgagtggccgaaaggaagcaggtggaaaacgctaaagctagtaagaaaaacggtaacgtcggcaagacaacctggcagaataaggaaagtaagggggagacgggcaaaagatcaaaggaaggccatagtctcgagatggagaacgagaacttagtggagaacggtgcagatagtgacgaggacgacaactcttttctaaagcagcagagcccacaggagcctaaaagccttaactggtcaagttttgtggataacacattcgcagaagagtttaccacacagaatcagaagtcccaggatgtggagctgtgggaaggcgaagtggtgaaggagctcagcgtcgaagagcagatcaagcggaaccgatattacgacgaggacgaggatgaagagtag

SEQ ID NO: 334439 - DNA, 2283 bp, Artificial Sequence
  derived and/or modified sequence
atggagagcagccccttcaacagacggcagtggaccagcctgagcctgcgggtgacagccaaggagctgagcctggtgaacaagaacaagagcagcgccatcgtggagatcttcagcaagtaccagaaggctgctgaggagaccaacatggagaagaagaggagcaacacagagaacctgagccagcacttcaggaagggcaccctgactgtgctgaagaagaagtgggagaaccctggcctgggcgctgagagccacacagacagcctgaggaacagcagcacagagatccgccacagagctgaccaccccccagctgaggtgaccagccacgccgccagcggggccaaggctgaccaggaggagcagatccaccccaggagccggctgcggagccccccagaggccctggtgcagggccgctacccccacatcaaggatggagaggacctgaaggaccacagcacagagagcaagaagatggagaactgcctgggggagagcagacatgaggtggagaagtctgagatcagtgaaaatacagatgccagcggcaagattgagaagtacaacgtgcccctgaaccggctgaagatgatgtttgagaagggggagcccacccagaccaagatcctgcgggcccagagccgcagcgccagcggcaggaagatcagcgagaacagctacagcctggatgacctggagatcggccctggccagctgagcagcagcacctttgacagcgagaagaatgaaagcagaagaaacctggagctgccccggctgtctgagaccagcatcaaggacaggatggccaagtaccaggccgctgtgtccaagcagagcagcagcaccaactacaccaatgagctgaaggccagcggcggggagatcaagatccacaagatggagcagaaggaaaatgtgcccccaggccctgaggtgtgcatcacccaccaggagggggagaagatcagcgccaatgaaaacagcctggccgtgcgcagcaccccagcagaagatgacagccctggggacagccaggtgaagtctgaggtgcagcagcctgtgcaccccaagcccctgagcccagacagccgggccagcagcctgtctgagagcagcccccccaaggccatgaagaagttccaggccccagcccgggagacctgtgtggagtgccagaagacagtgtaccccatggagcggctgctggccaaccagcaggtgttccacatcagctgcttccgctgcagctactgcaacaacaagctgagcctgggcacctacgccagcctgcacggccgcatctactgcaagccccacttcaaccagctgttcaagagcaagggcaactatgatgagggcttcggccaccggccccacaaggacctgtgggccagcaagaatgaaaatgaggagatcctggagaggcctgcccagctggccaatgcccgggagaccccccacagccctggggtggaggatgcccccatcgccaaggtgggcgtgctggccgcctccatggaggccaaggccagcagccagcaggagaaggaggacaagccagctgagaccaagaagctgagaattgcctggcccccacccacagagctgggcagcagcggcagcgccctggaggagggcatcaagatgagcaagcccaagtggcccccagaagatgagatcagcaagccagaggtgcctgaagatgtggacctggacctgaagaagctgcggcgcagcagcagcctgaaggagaggagccggcccttcaccgtggccgccagcttccagagcacctctgtgaagagccccaagacagtgtccccacccatcaggaagggctggagcatgtctgagcagagcgaggagagcgtgggcggccgggtggccgagaggaagcaggtggagaatgccaaggccagcaagaagaatggaaatgtgggcaagaccacctggcagaacaaggagagcaagggggagaccgggaagaggagcaaggagggccacagcctggagatggagaatgaaaacctggtggagaatggagctgacagtgatgaagatgacaacagcttcctgaagcagcagagcccccaggagcccaagagcctgaactggagcagctttgtggacaacacctttgctgaggagttcaccacccagaaccagaagagccaggatgtggagctgtgggagggggaggtggtgaaggagctgtctgtggaggagcagatcaagaggaaccgctactatgatgaagatgaagatgaggagtag

SEQ ID NO: 334440 - DNA, 1803 bp, Artificial Sequence
  derived and/or modified sequence
atggagaactgcctgggggagagcagacatgaggtggagaagtctgagatcagtgaaaatacagatgccagcggcaagattgagaagtacaacgtgcccctgaaccggctgaagatgatgtttgagaagggggagcccacccagaccaagatcctgcgggcccagagccgcagcgccagcggcaggaagatcagcgagaacagctacagcctggatgacctggagatcggccctggccagctgagcagcagcacctttgacagcgagaagaatgaaagcagaagaaacctggagctgccccggctgtctgagaccagcatcaaggacaggatggccaagtaccaggccgctgtgtccaagcagagcagcagcaccaactacaccaatgagctgaaggccagcggcggggagatcaagatccacaagatggagcagaaggaaaatgtgcccccaggccctgaggtgtgcatcacccaccaggagggggagaagatcagcgccaatgaaaacagcctggccgtgcgcagcaccccagcagaagatgacagccctggggacagccaggtgaagtctgaggtgcagcagcctgtgcaccccaagcccctgagcccagacagccgggccagcagcctgtctgagagcagcccccccaaggccatgaagaagttccaggccccagcccgggagacctgtgtggagtgccagaagacagtgtaccccatggagcggctgctggccaaccagcaggtgttccacatcagctgcttccgctgcagctactgcaacaacaagctgagcctgggcacctacgccagcctgcacggccgcatctactgcaagccccacttcaaccagctgttcaagagcaagggcaactatgatgagggcttcggccaccggccccacaaggacctgtgggccagcaagaatgaaaatgaggagatcctggagaggcctgcccagctggccaatgcccgggagaccccccacagccctggggtggaggatgcccccatcgccaaggtgggcgtgctggccgcctccatggaggccaaggccagcagccagcaggagaaggaggacaagccagctgagaccaagaagctgagaattgcctggcccccacccacagagctgggcagcagcggcagcgccctggaggagggcatcaagatgagcaagcccaagtggcccccagaagatgagatcagcaagccagaggtgcctgaagatgtggacctggacctgaagaagctgcggcgcagcagcagcctgaaggagaggagccggcccttcaccgtggccgccagcttccagagcacctctgtgaagagccccaagacagtgtccccacccatcaggaagggctggagcatgtctgagcagagcgaggagagcgtgggcggccgggtggccgagaggaagcaggtggagaatgccaaggccagcaagaagaatggaaatgtgggcaagaccacctggcagaacaaggagagcaagggggagaccgggaagaggagcaaggagggccacagcctggagatggagaatgaaaacctggtggagaatggagctgacagtgatgaagatgacaacagcttcctgaagcagcagagcccccaggagcccaagagcctgaactggagcagctttgtggacaacacctttgctgaggagttcaccacccagaaccagaagagccaggatgtggagctgtgggagggggaggtggtgaaggagctgtctgtggaggagcagatcaagaggaaccgctactatgatgaagatgaagatgaggagtag

SEQ ID NO: 334441 - DNA, 3669 bp, Artificial Sequence
  derived and/or modified sequence
gcttggtcgcgacaggtgcgctaggtagagcgccgggacctgtgacagggctggtagcagcgcagaggaaaggcggcttttagccaggtatttcagtgtctgtagacaagatggaatcatctccatttaatagacggcaatggacctcactatcattgagggtaacagccaaagaactttctcttgtcaacaagaacaagtcatcggctattgtggaaatattctccaagtaccagaaagcagctgaagaaacaaacatggagaagaagagaagtaacaccgaaaatctctcccagcactttagaaaggggaccctgactgtgttaaagaagaagtgggagaacccagggctgggagcagagtctcacacagactctctacggaacagcagcactgagattaggcacagagcagaccatcctcctgctgaagtgacaagccacgctgcttctggagccaaagctgaccaagaagaacaaatccaccccagatctagactcaggtcacctcctgaagccctcgttcagggtcgatatccccacatcaaggacggtgaggatcttaaagaccactcaacagaaagtaaaaaaatggaaaattgtctaggagaatccaggcatgaagtagaaaaatcagaaatcagtgaaaacacagatgcttcgggcaaaatagagaaatataatgttccgctgaacaggcttaagatgatgtttgagaaaggtgaaccaactcaaactaagattctccgggcccaaagccgaagtgcaagtggaaggaagatctctgaaaacagctattctctagatgacctggaaataggcccaggtcagttgtcatcttctacatttgactcggagaaaaatgagagtagacgaaatctggaacttccacgcctctcagaaacctctataaaggatcgaatggccaagtaccaggcagctgtgtccaaacaaagcagctcaaccaactatacaaatgagctgaaagccagtggtggcgaaatcaaaattcataaaatggagcaaaaggagaatgtgcccccaggtcctgaggtctgcatcacccatcaggaaggggaaaagatttctgcaaatgagaatagcctggcagtccgttccacccctgccgaagatgactccccaggtgactcccaggttaagagtgaggttcaacagcctgtccatcccaagccactaagtccagattccagagcctccagtctttctgaaagttctcctcccaaagcaatgaagaagtttcaggcacctgcaagagagacctgcgtggaatgtcagaagacagtctatccaatggagcgtctcttggccaaccagcaggtgtttcacatcagctgcttccgttgctcctattgcaacaacaaactcagtctaggaacatatgcatctttacatggaagaatctattgtaagcctcacttcaatcaactctttaaatctaagggcaactatgatgaaggctttgggcacagaccacacaaggatctatgggcaagcaaaaatgaaaacgaagagattttggagagaccagcccagcttgcaaatgcaagggagacccctcacagcccaggggtagaagatgcccctattgctaaggtgggtgtcctggctgcaagtatggaagccaaggcctcctctcagcaggagaaggaagacaagccagctgaaaccaagaagctgaggatcgcctggccaccccccactgaacttggaagttcaggaagtgccttggaggaagggatcaaaatgtcaaagcccaaatggcctcctgaagacgaaatcagcaagcccgaagttcctgaggatgtcgatctagatctgaagaagctaagacgatcttcttcactgaaggaaagaagccgcccattcactgtagcagcttcatttcaaagcacctctgtcaagagcccaaaaactgtgtccccacctatcaggaaaggctggagcatgtcagagcagagtgaagagtctgtgggtggaagagttgcagaaaggaaacaagtggaaaatgccaaggcttctaagaagaatgggaatgtgggaaaaacaacctggcaaaacaaagaatctaaaggagagacagggaagagaagtaaggaaggtcatagtttggagatggagaatgagaatcttgtagaaaatggtgcagactccgatgaagatgataacagcttcctcaaacaacaatctccacaagaacccaagtctctgaattggtcgagttttgtagacaacacctttgctgaagaattcactactcagaatcagaaatcccaggatgtggaactctgggagggagaagtggtcaaagagctctctgtggaagaacagataaagagaaatcggtattatgatgaggatgaggatgaagagtgacaaattgcaatgatgctgggccttaaattcatgttagtgttagcgagccactgccctttgtcaaaatgtgatgcacataagcaggtatcccagcatgaaatgtaatttacttggaagtaactttggaaaagaattccttcttaaaatcaaaaacaaaacaaaaaaacacaaaaaacacattctaaatactagagataactttacttaaattcttcattttagcagtgatgatatgcataagtgctgtaaggcttgtaactggggaaatattccacctgataatagcccagattctactgtattcccaaaaggcaatattaaggtagacagatgattagtagtatattgttacacactattttggaattagagaacatacagaaggaatttaggggcttaaacattacgactgaatgcactttagtataaagggcacagtttgtatatttttaaatgaataccaatttaattttttagtatttacctgttaagagattatttagtctttaaattttttaggttaattttcttgctgtgatatatatgaggaatttactactttatgtcctgctctctaaactacatcctgaactcgacgtcctgaggtataatacaacagagcactttttgaggcaattgaaaaaccaacctacactcttcggtgcttagagagatctgctgtctcccaaataagcttttgtatctgccagtgaatttactgtactccaaatgattgctttcttttctggtgatatctgtgcttctcataattactgaaagctgcaatattttagtaataccttcgggatcactgtcccccatcttccgtgttagagcaaagtgaagagtttaaaggaggaagaagaaagaactgtcttacaccacttgagctcagacctctaaaccctgtatttcccttatgatgtcccctttttgagacactaatttttaaatacttactagctctgaaatatattgatttttatcacagtattctcagggtgaaattaaaccaactataggcctttttcttgggatgattttctagtcttaaggtttggggacattataaacttgagtacatttgttgtacacagttgatattccaaattgtatggatgggagggagaggtgtcttaagctgtaggcttttctttgtactgcatttatagagatttagctttaatattttttagagatgtaaaacattctgctttcttagtcttacctagtctgaaacatttttattcaataaagattttaattaaaatttgaa

SEQ ID NO: 334442 - DNA, 3612 bp, Artificial Sequence
  derived and/or modified sequence
ttcctgcttcagctcctgagtttttctctcttcccctctccctctccctctgccgggtggatgctttctccatgtggcaaggctgtaactgttcacagctgtctgaaacagcagtggaccaggagcagcttggagttttaactttcattttacaaagaacaacatgtttgaatgtttcagcaggcaagttataactggcatctacttcttgttcttctagaacaccgaaaatctctcccagcactttagaaaggggaccctgactgtgttaaagaagaagtgggagaacccagggctgggagcagagtctcacacagactctctacggaacagcagcactgagattaggcacagagcagaccatcctcctgctgaagtgacaagccacgctgcttctggagccaaagctgaccaagaagaacaaatccaccccagatctagactcaggtcacctcctgaagccctcgttcagggtcgatatccccacatcaaggacggtgaggatcttaaagaccactcaacagaaagtaaaaaaatggaaaattgtctaggagaatccaggcatgaagtagaaaaatcagaaatcagtgaaaacacagatgcttcgggcaaaatagagaaatataatgttccgctgaacaggcttaagatgatgtttgagaaaggtgaaccaactcaaactaagattctccgggcccaaagccgaagtgcaagtggaaggaagatctctgaaaacagctattctctagatgacctggaaataggcccaggtcagttgtcatcttctacatttgactcggagaaaaatgagagtagacgaaatctggaacttccacgcctctcagaaacctctataaaggatcgaatggccaagtaccaggcagctgtgtccaaacaaagcagctcaaccaactatacaaatgagctgaaagccagtggtggcgaaatcaaaattcataaaatggagcaaaaggagaatgtgcccccaggtcctgaggtctgcatcacccatcaggaaggggaaaagatttctgcaaatgagaatagcctggcagtccgttccacccctgccgaagatgactccccaggtgactcccaggttaagagtgaggttcaacagcctgtccatcccaagccactaagtccagattccagagcctccagtctttctgaaagttctcctcccaaagcaatgaagaagtttcaggcacctgcaagagagacctgcgtggaatgtcagaagacagtctatccaatggagcgtctcttggccaaccagcaggtgtttcacatcagctgcttccgttgctcctattgcaacaacaaactcagtctaggaacatatgcatctttacatggaagaatctattgtaagcctcacttcaatcaactctttaaatctaagggcaactatgatgaaggctttgggcacagaccacacaaggatctatgggcaagcaaaaatgaaaacgaagagattttggagagaccagcccagcttgcaaatgcaagggagacccctcacagcccaggggtagaagatgcccctattgctaaggtgggtgtcctggctgcaagtatggaagccaaggcctcctctcagcaggagaaggaagacaagccagctgaaaccaagaagctgaggatcgcctggccaccccccactgaacttggaagttcaggaagtgccttggaggaagggatcaaaatgtcaaagcccaaatggcctcctgaagacgaaatcagcaagcccgaagttcctgaggatgtcgatctagatctgaagaagctaagacgatcttcttcactgaaggaaagaagccgcccattcactgtagcagcttcatttcaaagcacctctgtcaagagcccaaaaactgtgtccccacctatcaggaaaggctggagcatgtcagagcagagtgaagagtctgtgggtggaagagttgcagaaaggaaacaagtggaaaatgccaaggcttctaagaagaatgggaatgtgggaaaaacaacctggcaaaacaaagaatctaaaggagagacagggaagagaagtaaggaaggtcatagtttggagatggagaatgagaatcttgtagaaaatggtgcagactccgatgaagatgataacagcttcctcaaacaacaatctccacaagaacccaagtctctgaattggtcgagttttgtagacaacacctttgctgaagaattcactactcagaatcagaaatcccaggatgtggaactctgggagggagaagtggtcaaagagctctctgtggaagaacagataaagagaaatcggtattatgatgaggatgaggatgaagagtgacaaattgcaatgatgctgggccttaaattcatgttagtgttagcgagccactgccctttgtcaaaatgtgatgcacataagcaggtatcccagcatgaaatgtaatttacttggaagtaactttggaaaagaattccttcttaaaatcaaaaacaaaacaaaaaaacacaaaaaacacattctaaatactagagataactttacttaaattcttcattttagcagtgatgatatgcataagtgctgtaaggcttgtaactggggaaatattccacctgataatagcccagattctactgtattcccaaaaggcaatattaaggtagacagatgattagtagtatattgttacacactattttggaattagagaacatacagaaggaatttaggggcttaaacattacgactgaatgcactttagtataaagggcacagtttgtatatttttaaatgaataccaatttaattttttagtatttacctgttaagagattatttagtctttaaattttttaggttaattttcttgctgtgatatatatgaggaatttactactttatgtcctgctctctaaactacatcctgaactcgacgtcctgaggtataatacaacagagcactttttgaggcaattgaaaaaccaacctacactcttcggtgcttagagagatctgctgtctcccaaataagcttttgtatctgccagtgaatttactgtactccaaatgattgctttcttttctggtgatatctgtgcttctcataattactgaaagctgcaatattttagtaataccttcgggatcactgtcccccatcttccgtgttagagcaaagtgaagagtttaaaggaggaagaagaaagaactgtcttacaccacttgagctcagacctctaaaccctgtatttcccttatgatgtcccctttttgagacactaatttttaaatacttactagctctgaaatatattgatttttatcacagtattctcagggtgaaattaaaccaactataggcctttttcttgggatgattttctagtcttaaggtttggggacattataaacttgagtacatttgttgtacacagttgatattccaaattgtatggatgggagggagaggtgtcttaagctgtaggcttttctttgtactgcatttatagagatttagctttaatattttttagagatgtaaaacattctgctttcttagtcttacctagtctgaaacatttttattcaataaagattttaattaaaatttg

SEQ ID NO: 334443 - DNA, 2283 bp, Artificial Sequence
  derived and/or modified sequence
atggagagcagccccttcaaccggcggcagtggaccagcctgagcctgagggtcactgcaaaagaattgtccctcgtcaacaagaacaagtctagtgccatcgttgaaatcttttcaaagtatcagaaagcggcagaagagacaaatatggagaaaaagcggtctaataccgaaaacttgagccagcacttccgcaaaggaactttaaccgtgctaaaaaagaagtgggaaaaccccggactgggtgctgaaagccacaccgactcactgcgtaactcctcaactgaaatccgtcaccgtgcagatcaccctcccgcagaggtcacatcacatgctgcttctggggccaaagctgaccaagaggagcagattcatcctagaagtcggctcaggagccccccagaagctctggttcagggccgatacccccacatcaaggatggcgaagatcttaaagaccactctactgaatccaaaaagatggaaaattgtctgggcgagtcgagacatgaggtggaaaaatctgaaatcagcgaaaacactgatgccagtggcaaaatcgaaaagtacaacgtgccattgaaccgactgaaaatgatgtttgagaagggcgaacctacacagacaaaaatactgagggcccagtctcgttccgcctcaggtaggaagataagtgaaaactcctacagccttgatgaccttgaaattggaccaggccagctgtcttcatcaacattcgactccgagaagaacgaatccagacggaatctggaactgccgagactctccgagacgagtatcaaagataggatggctaaataccaagctgccgtctccaagcagagctcttctaccaattacaccaatgaactgaaggcttctggtggcgagattaagatccacaagatggaacaaaaggaaaacgtgccgccgggtccagaagtgtgtatcacccaccaagaaggtgagaaaatcagcgccaacgaaaactctctcgcagtccgatccacacctgccgaagacgactccccaggagatagtcaggttaagtctgaggttcagcagcctgtacatcccaaacctttgtcaccagactcaagggcctccagtctttcagagtcatcccctcctaaagccatgaagaagtttcaggcgcctgcccgagagacctgcgttgagtgtcagaagacagtctatcccatggagcggctgctggctaaccaacaggtttttcatatctcctgttttcgctgtagctactgcaataataaactctctctggggacatacgcttccctgcatggacgcatttactgcaagcctcactttaaccagctctttaagtcaaaggggaattatgacgagggatttggccaccggccccacaaggacctgtgggcctctaagaacgaaaatgaggagattttggagcgcccagcgcagctggctaatgcacgagaaacaccccattccccgggtgtggaggacgcgccgatcgccaaggttggcgtcctggccgcgagtatggaggcaaaagcctcatcccagcaggagaaggaagacaagcctgccgaaacgaagaaactacggatcgcctggccacccccaacggagctgggatcctcgggttcagcactggaagaaggcatcaagatgtcaaaaccaaaatggccccctgaggacgagatctccaagccggaggtacctgaagacgtcgacctggacctgaaaaagttgcggaggagctccagtcttaaggagcggtctaggcccttcaccgttgctgccagtttccagtctaccagcgttaagtcacctaagaccgttagtccccctatcagaaagggctggtctatgtccgagcagtccgaggaaagtgtaggtgggagggtagccgagagaaagcaggtggagaacgccaaggcttctaaaaaaaacgggaatgtggggaaaactacatggcagaataaggagtccaagggcgagactgggaaacggtctaaagaggggcacagcctggagatggagaacgagaacctggtcgagaacggagctgactccgatgaggatgataactctttcctcaagcaacaaagcccacaggaaccaaagagtctgaattggagtagtttcgtggacaatacttttgcagaagagtttacaacgcaaaatcagaagagtcaggacgtggagctttgggagggcgaagtggtgaaggaactgagtgttgaggagcaaataaagcgaaatcgctattatgatgaagacgaggacgaggagtag

SEQ ID NO: 334444 - DNA, 1803 bp, Artificial Sequence
  derived and/or modified sequence
atggagaactgcctgggcgagagccggcacgaggtggagaagagcgaaattagtgagaacaccgatgcatcagggaaaatagaaaaatataacgtgcccctaaacagactcaagatgatgtttgagaagggagagccaacccagacaaagatcctcagggcacagtcacgtagcgcatctggacgaaaaatcagtgaaaactcatactcactcgatgacctggagatcgggcccggccagctgtcctcatctactttcgacagcgaaaaaaacgagtcaaggaggaatctcgagctgccccggctcagcgaaacttctattaaagacagaatggctaaataccaggcggccgtatctaagcagagcagctccacaaactacaccaacgagctgaaggcctcaggcggggagataaaaatccacaagatggagcagaaggagaatgtgcctcccggcccggaagtgtgcatcacacaccaggaaggagaaaaaatatccgctaacgagaactccctggcagtcagatcaacaccagccgaggacgattcccctggggatagccaagttaagagtgaagtgcagcaaccagtccaccctaaaccactgtccccagacagcagagcatcttcactaagtgagtcaagtccaccaaaagctatgaaaaagttccaggcacctgctagagaaacctgtgttgagtgccagaaaacagtttatccaatggaaagactcctagcaaaccagcaggttttccacatctcttgttttagatgtagttactgcaacaataaattgtccctgggaacatatgcgtccttgcacgggcgaatctactgcaaaccccacttcaaccaactgttcaagtctaaaggtaattacgatgagggttttggtcaccgaccccataaggatctctgggcctcgaaaaatgagaacgaagaaatactagaaagaccagcccagctagctaacgcccgggaaacgccacacagccctggtgtcgaagacgctcctattgctaaagttggggtactggctgctagcatggaagcaaaggcttcatctcagcaggagaaggaagacaaacctgccgagacaaagaagctgcggatcgcttggcctccacccaccgagctcggctccagtggctcagcactcgaggagggaattaagatgtctaagcccaagtggccacctgaggacgaaatctccaaacctgaggtcccagaagacgtggacctggatctgaagaagctgcgccgctctagcagtctcaaagaaagaagccgaccttttacggtggcagcttcttttcaatccacctccgtgaagtcaccaaaaactgtcagtccccctatccgcaagggctggagcatgtccgagcagagcgaggagtccgtcggaggcagggtggctgagaggaagcaagtcgagaacgcaaaagcaagtaaaaaaaatgggaacgtggggaaaaccacctggcagaacaaggaaagcaagggggagactgggaaaaggtccaaggaaggacactcgctggaaatggagaatgagaatctggtcgagaatggggccgattcggacgaggacgacaatagcttcctgaagcaacagtctcctcaggagcccaagtcccttaactggtcctcgttcgtcgataacaccttcgccgaggagttcaccacccagaatcaaaagagtcaggacgttgaattgtgggagggagaggtcgtcaaagagttgtccgtcgaagagcagattaaacgaaatcgctactacgatgaagacgaagatgaagagtag

SEQ ID NO: 334445 - DNA, 2283 bp, Artificial Sequence
  derived and/or modified sequence
atggaaagcagcccattcaatcgaagacagtggacgagcttaagtctccgggtaacagccaaggaactcagtctcgtgaacaagaataagtcctcagcaattgtcgaaattttttcgaaataccagaaagccgctgaggaaaccaatatggagaaaaaacgctccaacactgagaacctgtcccagcatttccggaaagggacactaacagtgttgaaaaaaaagtgggagaatccaggcctgggggctgagtcgcacacagactctctgcgaaacagttcaacagaaatccgtcatagggctgatcatccgccagccgaggtcacgagccacgccgctagcggagctaaagcagatcaggaggaacagattcacccaagatcccgcctcagatcaccacctgaggcactggtacaggggaggtatccccacatcaaggatggagaggatctgaaggaccattcaactgaaagcaaaaaaatggagaattgcttgggcgagtctcgacacgaggtcgagaaaagcgagatttcagaaaacactgacgcatcaggaaagatcgagaaatataacgtgcccctgaatcggttgaagatgatgttcgaaaaaggggaaccaacccagaccaaaatccttcgggctcaatcacgctccgctagcggcaggaagatctcagagaacagctacagccttgatgaccttgaaatcggcccagggcagctgagcagcagtacgttcgattcagagaaaaatgagagccgaaggaatctcgagttacccagactgtctgagacatcaattaaagacaggatggcgaagtaccaggcggcagtgtccaagcaaagttcaagtactaactacacgaatgaactcaaggcatcaggaggtgagatcaagattcacaagatggaacagaaggaaaatgtgcctccaggaccagaggtctgcattacacaccaggaaggagaaaagatcagtgccaacgaaaactccctggccgtcagaagtactccagccgaggatgactctccaggcgacagccaggtgaagtccgaggtgcagcaacccgttcaccctaaacccctgagccccgatagcagggcctcgtcactgtccgagagctcaccacctaaagccatgaagaagttccaggcacctgcccgtgagacttgcgtggagtgccagaagacagtttaccctatggagcggctgctggccaatcagcaggtgttccacataagttgttttaggtgcagctactgcaataacaaactgtctcttggcacctatgctagcttgcatgggaggatttactgcaaaccacattttaaccagctcttcaagagcaaggggaactacgacgagggatttggacatcgccctcataaggacctctgggcctccaagaacgagaacgaggagatccttgagagaccagcccagctggcgaatgcgcgagaaactccacatagcccaggggtggaggacgccccaatcgctaaagtgggcgtgctcgcggcaagcatggaggccaaagcttcgagtcagcaggaaaaggaggacaaacctgctgaaacaaaaaagctgcggatcgcttggccacccccaacagaactgggctcttcaggatcggcgttggaggagggcattaaaatgtctaagcctaaatggccacctgaggatgagattagtaaacccgaggtgcctgaagatgtagatctggacttaaagaaactacgcagatcgagtagtctcaaggaacgaagccggccattcacagtcgctgcatcctttcagtctacaagcgttaagtccccaaagaccgtttcaccacctatccgtaagggctggtcaatgtcagagcaatcagaggagagcgtgggtggacgcgtggcagaacgcaaacaagtcgagaacgcaaaggcgtctaagaaaaatggcaacgttggtaaaactacctggcagaacaaggagtcgaagggagagactggcaaacggagcaaggaaggtcactcattggaaatggagaatgagaatctcgtcgaaaacggagcggatagcgacgaggacgataattcttttctgaaacagcagagcccccaggaaccaaaaagtctgaattggtcctcctttgtcgataacacgtttgcagaggagtttactactcagaaccagaagtctcaggatgtggagctttgggagggtgaagtagtgaaagagctgtcagtggaagagcaaattaaaagaaaccggtattacgacgaggacgaagatgaggagtag

SEQ ID NO: 334446 - DNA, 1803 bp, Artificial Sequence
  derived and/or modified sequence
atggagaactgcctcggagaaagccggcatgaggtcgagaagtcggagatatccgagaatacagatgcaagcgggaaaatagagaaatacaatgtccccctcaacaggctgaagatgatgtttgaaaaaggggaacccacgcagacaaaaatccttcgcgcacagtctcgaagtgccagcggacgcaaaatcagcgagaacagctactcactcgatgaccttgagatcggcccagggcaactgagttcgtccacatttgacagcgagaagaacgagtctcggaggaaccttgaactcccccgactgtcagagaccagtattaaagaccgtatggctaagtaccaggccgctgtgagcaaacagagcagctccacaaactataccaatgagctcaaagcctcggggggagagattaaaatccacaaaatggagcagaaggagaatgtgccacccggtcctgaagtgtgcattacccaccaggagggtgaaaaaatttcagctaacgaaaactccctggccgtccggtccacacccgctgaggatgacagtccgggagactcacaagtgaaaagcgaagtccagcagcctgtgcatcccaagcccctcagtcccgacagtcgggcaagtagtctatctgaatcaagcccacctaaggccatgaagaaatttcaggccccagcacgagagacatgcgtggagtgccagaagacagtgtaccccatggaaagactcctagccaatcagcaggtcttccatatcagctgctttcgctgcagctactgtaataataaattatccctgggcacgtacgcttccttacacgggaggatttattgcaagcctcactttaatcagttgttcaaatccaaagggaattacgacgagggctttggccaccgccctcataaagacctctgggccagtaaaaacgaaaacgaggagatccttgaacgtcccgctcagctggcgaacgccagggagactcctcactcccccggtgtcgaagacgccccaattgccaaagtgggggtgctggctgcgtccatggaagccaaagcttcttcgcagcaagagaaagaagataagcccgcagagactaagaagctgcgcatagcctggcctccccctactgagctgggttcatccggctctgccctcgaggagggcatcaaaatgtctaaacccaagtggcctcctgaggacgagattagcaaaccggaagttcccgaagacgtagatcttgacttgaaaaaactacgcagaagttcctccttgaaggagagatctagacctttcacagtagccgcatccttccagagcacttcagtaaaatcacccaagacagtgtctccaccaattcgtaagggatggtctatgagcgagcagtctgaggagtccgtgggaggcagggttgccgaacgaaagcaggtggaaaatgccaaagcctcaaagaagaatgggaacgtgggtaagaccacatggcagaataaagaatcgaaaggagaaaccggcaaaagaagcaaggaaggacatagtctggaaatggagaacgaaaatctcgtcgagaacggagccgacagcgacgaagacgacaactctttcctgaaacagcagtctccccaagagcccaagtctttgaattggagctcctttgttgataatacctttgccgaggagttcacaacacagaatcagaaatcccaggatgtggagctgtgggagggtgaggtggtgaaagagctgagcgtggaggagcaaattaagcgtaatcggtattacgacgaggacgaggacgaagaatag

SEQ ID NO: 334447 - DNA, 2283 bp, Artificial Sequence
  derived and/or modified sequence
atggagagcagccccttcaacagaagacagtggaccagcctgagcctgagagtgaccgccaaggagctgagcctggtgaacaagaacaagagcagcgccatcgtggagatcttcagcaagtaccagaaggccgccgaggagaccaacatggagaagaagagaagcaacaccgagaacctgagccagcacttcagaaagggcaccctgaccgtgctgaagaagaagtgggagaaccccggcctgggcgccgagagccacaccgacagcctgagaaacagcagcaccgagatcagacacagagccgaccacccccccgccgaggtgaccagccacgccgccagcggcgccaaggccgaccaggaggagcagatccaccccagaagcagactgagaagcccccccgaggccctggtgcagggcagatacccccacatcaaggacggcgaggacctgaaggaccacagcaccgagagcaagaagatggagaactgcctgggcgagagcagacacgaggtggagaagagcgagatcagcgagaacaccgacgccagcggcaagatcgagaagtacaacgtgcccctgaacagactgaagatgatgttcgagaagggcgagcccacccagaccaagatcctgagagcccagagcagaagcgccagcggcagaaagatcagcgagaacagctacagcctggacgacctggagatcggccccggccagctgagcagcagcaccttcgacagcgagaagaacgagagcagaagaaacctggagctgcccagactgagcgagaccagcatcaaggacagaatggccaagtaccaggccgccgtgagcaagcagagcagcagcaccaactacaccaacgagctgaaggccagcggcggcgagatcaagatccacaagatggagcagaaggagaacgtgccccccggccccgaggtgtgcatcacccaccaggagggcgagaagatcagcgccaacgagaacagcctggccgtgagaagcacccccgccgaggacgacagccccggcgacagccaggtgaagagcgaggtgcagcagcccgtgcaccccaagcccctgagccccgacagcagagccagcagcctgagcgagagcagcccccccaaggccatgaagaagttccaggcccccgccagagagacctgcgtggagtgccagaagaccgtgtaccccatggagagactgctggccaaccagcaggtgttccacatcagctgcttcagatgcagctactgcaacaacaagctgagcctgggcacctacgccagcctgcacggcagaatctactgcaagccccacttcaaccagctgttcaagagcaagggcaactacgacgagggcttcggccacagaccccacaaggacctgtgggccagcaagaacgagaacgaggagatcctggagagacccgcccagctggccaacgccagagagaccccccacagccccggcgtggaggacgcccccatcgccaaggtgggcgtgctggccgccagcatggaggccaaggccagcagccagcaggagaaggaggacaagcccgccgagaccaagaagctgagaatcgcctggcccccccccaccgagctgggcagcagcggcagcgccctggaggagggcatcaagatgagcaagcccaagtggccccccgaggacgagatcagcaagcccgaggtgcccgaggacgtggacctggacctgaagaagctgagaagaagcagcagcctgaaggagagaagcagacccttcaccgtggccgccagcttccagagcaccagcgtgaagagccccaagaccgtgagcccccccatcagaaagggctggagcatgagcgagcagagcgaggagagcgtgggcggcagagtggccgagagaaagcaggtggagaacgccaaggccagcaagaagaacggcaacgtgggcaagaccacctggcagaacaaggagagcaagggcgagaccggcaagagaagcaaggagggccacagcctggagatggagaacgagaacctggtggagaacggcgccgacagcgacgaggacgacaacagcttcctgaagcagcagagcccccaggagcccaagagcctgaactggagcagcttcgtggacaacaccttcgccgaggagttcaccacccagaaccagaagagccaggacgtggagctgtgggagggcgaggtggtgaaggagctgagcgtggaggagcagatcaagagaaacagatactacgacgaggacgaggacgaggagtag

SEQ ID NO: 334448 - DNA, 1803 bp, Artificial Sequence
  derived and/or modified sequence
atggagaactgcctgggcgagagcagacacgaggtggagaagagcgagatcagcgagaacaccgacgccagcggcaagatcgagaagtacaacgtgcccctgaacagactgaagatgatgttcgagaagggcgagcccacccagaccaagatcctgagagcccagagcagaagcgccagcggcagaaagatcagcgagaacagctacagcctggacgacctggagatcggccccggccagctgagcagcagcaccttcgacagcgagaagaacgagagcagaagaaacctggagctgcccagactgagcgagaccagcatcaaggacagaatggccaagtaccaggccgccgtgagcaagcagagcagcagcaccaactacaccaacgagctgaaggccagcggcggcgagatcaagatccacaagatggagcagaaggagaacgtgccccccggccccgaggtgtgcatcacccaccaggagggcgagaagatcagcgccaacgagaacagcctggccgtgagaagcacccccgccgaggacgacagccccggcgacagccaggtgaagagcgaggtgcagcagcccgtgcaccccaagcccctgagccccgacagcagagccagcagcctgagcgagagcagcccccccaaggccatgaagaagttccaggcccccgccagagagacctgcgtggagtgccagaagaccgtgtaccccatggagagactgctggccaaccagcaggtgttccacatcagctgcttcagatgcagctactgcaacaacaagctgagcctgggcacctacgccagcctgcacggcagaatctactgcaagccccacttcaaccagctgttcaagagcaagggcaactacgacgagggcttcggccacagaccccacaaggacctgtgggccagcaagaacgagaacgaggagatcctggagagacccgcccagctggccaacgccagagagaccccccacagccccggcgtggaggacgcccccatcgccaaggtgggcgtgctggccgccagcatggaggccaaggccagcagccagcaggagaaggaggacaagcccgccgagaccaagaagctgagaatcgcctggcccccccccaccgagctgggcagcagcggcagcgccctggaggagggcatcaagatgagcaagcccaagtggccccccgaggacgagatcagcaagcccgaggtgcccgaggacgtggacctggacctgaagaagctgagaagaagcagcagcctgaaggagagaagcagacccttcaccgtggccgccagcttccagagcaccagcgtgaagagccccaagaccgtgagcccccccatcagaaagggctggagcatgagcgagcagagcgaggagagcgtgggcggcagagtggccgagagaaagcaggtggagaacgccaaggccagcaagaagaacggcaacgtgggcaagaccacctggcagaacaaggagagcaagggcgagaccggcaagagaagcaaggagggccacagcctggagatggagaacgagaacctggtggagaacggcgccgacagcgacgaggacgacaacagcttcctgaagcagcagagcccccaggagcccaagagcctgaactggagcagcttcgtggacaacaccttcgccgaggagttcaccacccagaaccagaagagccaggacgtggagctgtgggagggcgaggtggtgaaggagctgagcgtggaggagcagatcaagagaaacagatactacgacgaggacgaggacgaggagtag

SEQ ID NO: 334449 - protein, 189 aa, Artificial Sequence
  derived and/or modified sequence
MLGSRAVMLLLLLPWTAQGRAVPGGSSPAWTQCQQLSQKLCTLAWSAHPLVGHMDLREEGDEETTNDVPHIQCGDGCDPQGLRDNSQFCLQRIHQGLIFYEKLLGSDIFTGEPSLLPDSPVGQLHASLLGLSQLLQPEGHHWETQQIPSLSPSQPWQRLLLRFKILRSLQAFVAVAARVFAHGAATLSP

SEQ ID NO: 334450 - DNA, 570 bp, Artificial Sequence
  derived and/or modified sequence
atgctgggcagcagagccgtgatgctgctgctgctgctgccctggaccgcccagggcagagccgtgcccggcggcagcagccccgcctggacccagtgccagcagctgagccagaagctgtgcaccctggcctggagcgcccaccccctggtgggccacatggacctgagagaggagggcgacgaggagaccaccaacgacgtgccccacatccagtgcggcgacggctgcgacccccagggcctgagagacaacagccagttctgcctgcagagaatccaccagggcctgatcttctacgagaagctgctgggcagcgacatcttcaccggcgagcccagcctgctgcccgacagccccgtgggccagctgcacgccagcctgctgggcctgagccagctgctgcagcccgagggccaccactgggagacccagcagatccccagcctgagccccagccagccctggcagagactgctgctgagattcaagatcctgagaagcctgcaggccttcgtggccgtggccgccagagtgttcgcccacggcgccgccaccctgagcccctag

SEQ ID NO: 334451 - DNA, 570 bp, Artificial Sequence
  derived and/or modified sequence
atgttagggtctcgggccgtcatgcttcttttgttgctcccctggacagctcaaggacgcgccgtgcccggcggttcttcccccgcctggacacagtgtcagcagctcagccagaagctgtgtacactagcctggtctgcacatcccctggtcggacatatggacttacgcgaggaaggtgatgaggaaactaccaacgacgtgccccatatccaatgcggggatggttgtgacccccagggcctgagagataattcccagttctgccttcagcgcatacatcaggggctgattttctacgagaaattgctgggatctgacatcttcactggcgagccaagcctgctcccagattcacccgttggccagctgcacgcctctttactgggcctgtctcaacttctgcagccggaaggccatcactgggagacccaacagattcctagcctttcaccatcccagccttggcaacgcctgcttctgaggttcaaaatcctgcgaagtctgcaggccttcgttgccgtggctgcacgggtcttcgcccatggggcggccacattgagtccttag

SEQ ID NO: 334452 - DNA, 570 bp, Artificial Sequence
  derived and/or modified sequence
atgctgggcagcagagctgtgatgctgctgctgctgctgccctggacagcccagggccgggctgtgcctgggggcagcagccctgcctggacccagtgccagcagctgagccagaagctgtgcaccctggcctggagcgcccaccccctggtgggccacatggacctgcgggaggagggagatgaggagaccaccaatgatgtgccccacatccagtgtggagatggctgtgacccccagggcctgcgggacaacagccagttctgcctgcagaggatccaccagggcctcatcttctatgagaagctgctgggcagtgacatcttcaccggggagcccagcctgctgcctgacagccctgtgggccagctgcacgccagcctgctgggcctgagccagctgctgcagcctgagggccaccactgggagacccagcagatccccagcctgagccccagccagccctggcagaggctgctgctgcgcttcaagatcctgcggagcctgcaggcctttgtggccgtggccgcccgggtgtttgcccacggggccgccaccctgagcccctag

SEQ ID NO: 334453 - DNA, 570 bp, Artificial Sequence
  derived and/or modified sequence
atgctgggcagccgggccgtgatgctgctgctgctgctgccctggaccgcacaaggacgcgccgtacccggaggcagttcccccgcctggacccagtgccagcagttatcacagaagctttgtaccctcgcctggagcgcccaccctcttgttggtcatatggacttgcgagaagagggcgatgaggaaaccactaacgatgtacctcacatacagtgcggcgacggctgcgatccacaggggctacgggacaactcccagttctgcctacaacgcattcaccaaggcctcatcttctatgaaaaacttttaggaagcgacatatttacaggggagccgtctttgctgccagatagcccagtgggtcagctacacgcgagcctcctggggctgtcacagctgcttcagcctgagggacaccattgggagacccagcagatccccagtctgagtcccagtcaaccatggcaacggctcctgttgaggttcaagattctcaggagtcttcaggcgttcgtcgcagtcgccgctcgggttttcgcccacggcgctgctactctatccccctag

SEQ ID NO: 334454 - DNA, 570 bp, Artificial Sequence
  derived and/or modified sequence
atgcttggctctagggcagtgatgctattacttctgttgccttggacggcacaagggcgagccgttcccggagggagcagcccagcctggacccagtgccagcagctcagccaaaaactttgtaccttagcctggtccgctcatcccctggtggggcacatggacctcagagaggagggcgatgaagagactaccaatgatgttccccatatccaatgcggcgacggttgcgatcctcaagggctgcgggacaattcccaattctgcctacagcggattcatcagggtcttatcttctacgaaaagctgctgggaagcgacatcttcaccggcgagccctctcttctgccggactctccagtcgggcagcttcacgcttcattgctggggctcagtcaactgctacagcccgaaggccatcattgggagacccagcagatcccctccctctcaccatctcaaccatggcagcggctcctgttgcgcttcaaaatcctcagatctctgcaggccttcgtcgccgtggcagcacgagtcttcgcccacggggctgctaccctctcgccttag

SEQ ID NO: 334455 - DNA, 1041 bp, Artificial Sequence
  derived and/or modified sequence
aaaacaacaggaagcagcttacaaactcggtgaacaactgagggaaccaaaccagagacgcgctgaacagagagaatcaggctcaaagcaagtggaagtgggcagagattccaccaggactggtgcaaggcgcagagccagccagatttgagaagaaggcaaaaagatgctggggagcagagctgtaatgctgctgttgctgctgccctggacagctcagggcagagctgtgcctgggggcagcagccctgcctggactcagtgccagcagctttcacagaagctctgcacactggcctggagtgcacatccactagtgggacacatggatctaagagaagagggagatgaagagactacaaatgatgttccccatatccagtgtggagatggctgtgacccccaaggactcagggacaacagtcagttctgcttgcaaaggatccaccagggtctgattttttatgagaagctgctaggatcggatattttcacaggggagccttctctgctccctgatagccctgtgggccagcttcatgcctccctactgggcctcagccaactcctgcagcctgagggtcaccactgggagactcagcagattccaagcctcagtcccagccagccatggcagcgtctccttctccgcttcaaaatccttcgcagcctccaggcctttgtggctgtagccgcccgggtctttgcccatggagcagcaaccctgagtccctaaaggcagcagctcaaggatggcactcagatctccatggcccagcaaggccaagataaatctaccaccccaggcacctgtgagccaacaggttaattagtccattaattttagtgggacctgcatatgttgaaaattaccaatactgactgacatgtgatgctgacctatgataaggttgagtatttattagatgggaagggaaatttggggattatttatcctcctggggacagtttggggaggattatttattgtatttatattgaattatgtacttttttcaataaagtcttatttttgtggct

SEQ ID NO: 334456 - DNA, 3045 bp, Artificial Sequence
  derived and/or modified sequence
atgagcgacctgagaaagagagagctgggcgccctgttcaccagcagaggcaccggcggcgtggagtgggacggcacccaggtgagccccggcgcccactactgcagccccaccggcgccggctgccccagaccctgcgccgacacccccggcccccagccccagcccatggacctgagagtgggccagagaccccccgtggagcccccccccgagcccaccctgctggccctgcagagaccccagagactgcaccaccacctgttcctggccggcctgcagcagcagagaagcgtggagcccatgagactgagcatggacacccccatgcccgagctgcaggtgggcccccaggagcaggagctgagacagctgctgcacaaggacaagagcaagagaagcgccgtggccagcagcgtggtgaagcagaagctggccgaggtgatcctgaagaagcagcaggccgccctggagagaaccgtgcaccccaacagccccggcatcccctacagaaccctggagcccctggagaccgagggcgccaccagaagcatgctgagcagcttcctgccccccgtgcccagcctgcccagcgacccccccgagcacttccccctgagaaagaccgtgagcgagcccaacctgaagctgagatacaagcccaagaagagcctggagagaagaaagaaccccctgctgagaaaggagagcgccccccccagcctgagaagaagacccgccgagaccctgggcgacagcagccccagcagcagcagcacccccgccagcggctgcagcagccccaacgacagcgagcacggccccaaccccatcctgggcagcgaggccctgctgggccagagactgagactgcaggagaccagcgtggcccccttcgccctgcccaccgtgagcctgctgcccgccatcaccctgggcctgcccgcccccgccagagccgacagcgacagaagaacccaccccaccctgggccccagaggccccatcctgggcagcccccacacccccctgttcctgccccacggcctggagcccgaggccggcggcaccctgcccagcagactgcagcccatcctgctgctggaccccagcggcagccacgcccccctgctgaccgtgcccggcctgggccccctgcccttccacttcgcccagagcctgatgaccaccgagagactgagcggcagcggcctgcactggcccctgagcagaaccagaagcgagcccctgccccccagcgccaccgccccccccccccccggccccatgcagcccagactggagcagctgaagacccacgtgcaggtgatcaagagaagcgccaagcccagcgagaagcccagactgagacagatccccagcgccgaggacctggagaccgacggcggcggccccggccaggtggtggacgacggcctggagcacagagagctgggccacggccagcccgaggccagaggccccgcccccctgcagcagcacccccaggtgctgctgtgggagcagcagagactggccggcagactgcccagaggcagcaccggcgacaccgtgctgctgcccctggcccagggcggccacagacccctgagcagagcccagagcagccccgccgcccccgccagcctgagcgcccccgagcccgccagccaggccagagtgctgagcagcagcgagacccccgccagaaccctgcccttcaccaccggcctgatctacgacagcgtgatgctgaagcaccagtgcagctgcggcgacaacagcagacaccccgagcacgccggcagaatccagagcatctggagcagactgcaggagagaggcctgagaagccagtgcgagtgcctgagaggcagaaaggccagcctggaggagctgcagagcgtgcacagcgagagacacgtgctgctgtacggcaccaaccccctgagcagactgaagctggacaacggcaagctggccggcctgctggcccagagaatgttcgtgatgctgccctgcggcggcgtgggcgtggacaccgacaccatctggaacgagctgcacagcagcaacgccgccagatgggccgccggcagcgtgaccgacctggccttcaaggtggccagcagagagctgaagaacggcttcgccgtggtgagaccccccggccaccacgccgaccacagcaccgccatgggcttctgcttcttcaacagcgtggccatcgcctgcagacagctgcagcagcagagcaaggccagcaagatcctgatcgtggactgggacgtgcaccacggcaacggcacccagcagaccttctaccaggaccccagcgtgctgtacatcagcctgcacagacacgacgacggcaacttcttccccggcagcggcgccgtggacgaggtgggcgccggcagcggcgagggcttcaacgtgaacgtggcctgggccggcggcctggacccccccatgggcgaccccgagtacctggccgccttcagaatcgtggtgatgcccatcgccagagagttcagccccgacctggtgctggtgagcgccggcttcgacgccgccgagggccaccccgcccccctgggcggctaccacgtgagcgccaagtgcttcggctacatgacccagcagctgatgaacctggccggcggcgccgtggtgctggccctggagggcggccacgacctgaccgccatctgcgacgccagcgaggcctgcgtggccgccctgctgggcaacagagtggaccccctgagcgaggagggctggaagcagaagcccaacctgaacgccatcagaagcctggaggccgtgatcagagtgcacatgggcgccctgaccctgagccagatccccggccacggcagcagccagcagcaggccggcggcgccttcagctggcccggccacccctgcagagccgccgtggtgatggtgaacaccggcgccgcctgcagcgcctggccccccgtgcagacccccggctgcctggagtgccagggcctgaccaagaagaagtggagacagtag

SEQ ID NO: 334457 - DNA, 3045 bp, Artificial Sequence
  derived and/or modified sequence
atgtctgatctacgcaaaagagaactgggagctctgttcacaagcaggggtacgggcggggtggagtgggacggaacccaggtgtctccaggagcccactactgcagcccaaccggagcagggtgtccacgcccatgcgcagatacccctggtccacaaccacaacccatggatctgcgcgtaggtcagaggccaccagttgagccgccgcccgaacccactttgctggccctccagcggccccagagactgcaccaccacctgtttcttgccggcctgcagcagcagaggtccgtggaacccatgcgcctcagcatggacacccctatgcctgagcttcaagtggggcctcaggagcaggaacttcgccagttgttgcacaaggataaatccaagcgctctgccgtggcgtcgagtgttgtgaaacagaaactggcagaggttatcctcaagaagcagcaggccgcattggaaaggactgtgcaccccaatagcccgggcatcccttaccgcaccctagagcccctcgagacagaaggcgctacaagatctatgctctcctcttttctcccccccgtgcctagccttccctccgacccgcccgagcactttcctttacgcaagacagtctctgagcccaacctaaagctgcggtacaagcctaaaaagagcctggaacggcggaagaacccccttctgagaaaagaaagtgcacccccctccttacgcaggaggcctgcggagactttgggcgattcctccccctcgtcaagtagcactcctgccagcggctgctcaagtcctaacgattcggagcatggccccaacccaatcttgggtagcgaagcactactgggacagcggctacgcctgcaggaaacatctgtggcacctttcgctttaccaactgtgagcttgttacccgctatcactttgggtttacccgctccagctcgggccgattctgaccgcagaacccacccaactcttggcccccgcggccccatactgggaagtccacacacaccactgtttcttcctcacggcttggagcctgaggccgggggcacccttccgtcacggctgcagccaatcctcttgctggaccctagtgggtctcacgccccgctgctaacagttccagggttgggtcctcttcccttccattttgcacagagtctaatgacgacagagcgtttgtctggctccggcctccattggccacttagtcgaacccggtccgagccattgcctccctcagctaccgccccgcctcccccggggcctatgcagccacgactggagcaactcaaaactcatgtgcaggtaattaagcgctctgctaaaccatcagagaaacctagattgcgacagataccctccgccgaggacctcgagactgacggtgggggtcccggacaggtggtagacgatggcctcgagcaccgcgagcttggccacggccagcctgaggcacgcggtccagctccactgcaacagcacccccaggtgctattgtgggagcagcagaggctcgccggtcgtctgcctagagggtccaccggcgataccgtgctccttccattggcccaggggggccatcggcccctaagtcgggcccagtcttctccggctgcgcctgcatccttgagcgccccggagccagcgagccaggcccgagtgttgtctagttccgaaacgcccgcccgcaccttgccattcacaaccggcttaatttatgattccgtcatgttgaaacatcagtgctcctgtggtgataattcccggcacccagagcacgccggcagaattcaaagcatctggtccaggctgcaggagagaggtctgagatcacaatgcgaatgtctccgcggccggaaagcaagtcttgaggaattacagtccgtgcattctgaacggcacgtcctcctctacggcacaaatccactgtctcggctcaaactggacaatggcaaactagctggccttttggcacagaggatgtttgtgatgttgccatgtggcggggtgggcgttgacacagacacaatttggaatgagctgcattcctccaacgccgcccgctgggcggcgggctcggtgacggatcttgcattcaaagtcgccagcagggagctgaaaaacggattcgccgtcgtccgtcccccgggtcaccatgccgaccacagcacggctatgggcttctgtttcttcaattcggtggccatcgcctgtagacagctccaacaacagtccaaggcaagtaaaatactgatagtagattgggatgtgcatcatggtaatggaacacagcaaaccttctatcaggatcccagtgtgctttatatcagcctccataggcacgatgacggcaatttctttccagggtccggcgccgttgacgaggtgggggcaggcagcggagagggctttaacgtgaacgtggcgtgggcaggaggcctggaccctccaatgggtgatcctgagtatttagcagcgttcagaatcgtggtcatgcctatcgccagagagttttcccccgaccttgtcctggttagcgccggatttgacgccgctgaaggacatccagccccccttgggggatatcacgtatcagcaaagtgctttggctacatgacccagcagcttatgaacttggcaggcggcgcagtcgtccttgctctcgagggaggccatgaccttacagcaatctgtgatgcttcggaagcttgtgtcgccgctcttttaggcaatagggtggatccgctcagcgaggaaggttggaaacaaaaacccaatctaaacgctatcagaagtctagaggccgtgatacgggtgcacatgggggcactgacactgagtcagattccaggccatggttcctcacagcagcaagcaggcggggctttttcatggcctggccacccttgccgagcagccgtggtaatggtgaatactggggccgcatgcagcgcgtggccccctgtgcagacgccagggtgcctggagtgccagggcttgacaaagaaaaaatggcgccagtag

SEQ ID NO: 334458 - DNA, 3261 bp, Artificial Sequence
  derived and/or modified sequence
atttagaatgagtgacttgaggaagagggagctgggagcccttttcaccagcagggggactggaggagtcgaatgggatgggacccaggtgagcccgggtgcccactactgcagccccactggcgcaggctgccccaggccctgtgcagacacaccaggccctcagccgcagcccatggacctgcgggtgggccagcggcccccagtggagcccccaccagagcccacattgctggccctgcagcgtccccagcgcctgcaccaccacctcttcctagcaggcctgcagcagcagcgctcggtggagcccatgaggctctccatggacacgccgatgcccgagttgcaggtgggaccccaggaacaagagctgcggcagcttctccacaaggacaagagcaagcgaagtgctgtagccagcagcgtggtcaagcagaagctagcggaggtgattctgaaaaaacagcaggcggccctagaaagaacagtccatcccaacagccccggcattccctacagaaccctggagcccctggagacggaaggagccacccgctccatgctcagcagctttttgcctcctgttcccagcctgcccagtgaccccccagagcacttccctctgcgcaagacagtctctgagcccaacctgaagctgcgctataagcccaagaagtccctggagcggaggaagaatccactgctccgaaaggagagtgcgccccccagcctccggcggcggcccgcagagaccctcggagactcctccccaagtagtagcagcacgcccgcatcagggtgcagctcccccaatgacagcgagcacggccccaatcccatcctgggctcggaggcgctcttgggccagcggctgcggctgcaggagacttctgtggccccgttcgccttgccgacagtgtccttgctgcccgcaatcactctggggctgcccgcccctgccagggctgacagtgaccgcaggacccatccgactctgggccctcgggggccaatcctggggagcccccacactcccctcttcctgccccatggcttggagcccgaggctgggggcaccttgccctctcgcctgcagcccattctcctcctggacccctcaggctctcatgccccgctgctgactgtgcccgggcttgggcccttgcccttccactttgcccagtccttaatgaccaccgagcggctctctgggtcaggcctccactggccactgagccggactcgctcagagcccctgccccccagtgccaccgctcccccaccgccgggccccatgcagccccgcctggagcagctcaaaactcacgtccaggtgatcaagaggtcagccaagccgagtgagaagccccggctgcggcagataccctcggctgaagacctggagacagatggcgggggaccgggccaggtggtggacgatggcctggagcacagggagctgggccatgggcagcctgaggccagaggccccgctcctctccagcagcaccctcaggtgttgctctgggaacagcagcgactggctgggcggctcccccggggcagcaccggggacactgtgctgcttcctctggcccagggtgggcaccggcctctgtcccgggctcagtcttccccagccgcacctgcctcactgtcagccccagagcctgccagccaggcccgagtcctctccagctcagagacccctgccaggaccctgcccttcaccacagggctgatctatgactcggtcatgctgaagcaccagtgctcctgcggtgacaacagcaggcacccggagcacgccggccgcatccagagcatctggtcccggctgcaggagcgggggctccggagccagtgtgagtgtctccgaggccggaaggcctccctggaagagctgcagtcggtccactctgagcggcacgtgctcctctacggcaccaacccgctcagccgcctcaaactggacaacgggaagctggcagggctcctggcacagcggatgtttgtgatgctgccctgtggtggggttggggtggacactgacaccatctggaatgagcttcattcctccaatgcagcccgctgggccgctggcagtgtcactgacctcgccttcaaagtggcttctcgtgagctaaagaatggtttcgctgtggtgcggcccccaggacaccatgcagatcattcaacagccatgggcttctgcttcttcaactcagtggccatcgcctgccggcagctgcaacagcagagcaaggccagcaagatcctcattgtagactgggacgtgcaccatggcaacggcacccagcaaaccttctaccaagaccccagtgtgctctacatctccctgcatcgccatgacgacggcaacttcttcccggggagtggggctgtggatgaggtaggggctggcagcggtgagggcttcaatgtcaatgtggcctgggctggaggtctggacccccccatgggggatcctgagtacctggctgctttcaggatagtcgtgatgcccatcgcccgagagttctctccagacctagtcctggtgtctgctggatttgatgctgctgagggtcacccggccccactgggtggctaccatgtttctgccaaatgttttggatacatgacgcagcaactgatgaacctggcaggaggcgcagtggtgctggccttggagggtggccatgacctcacagccatctgtgacgcctctgaggcctgtgtggctgctcttctgggtaacagggtggatcccctttcagaagaaggctggaaacagaaacccaacctcaatgccatccgctctctggaggccgtgatccgggtgcacatgggtgccctcacactgagccagattccaggacatggttcctcacagcagcaggcaggaggagcattctcctggcctgggcacccatgcagagcggccgtggtgatggtaaatactggggctgcatgcagcgcctggcctcctgtccagactcctgggtgcctagagtgccaggggctgacaaagaagaagtggaggcagtgaccgcactggcgtccctctctgtgggcatcctggctgaagataggccctcggagcagctggtggaggaggaagaacctatgaatctctaaggctctggaaccatctgcccgcccaccatgcccttgggacctggttctcttctaacccctggcaatagcccccattcctgggtctttagagatcctgtgggcaagtagttggaaccagag

SEQ ID NO: 334459 - DNA, 3045 bp, Artificial Sequence
  derived and/or modified sequence
atgtctgacctgaggaagcgggagctgggcgccctcttcaccagccggggcaccggcggcgtggagtgggatggcacccaggtgtcccctggggcccactactgcagccccaccggggccggctgcccccggccctgtgccgacaccccaggcccccagccccagcccatggacctgcgggtgggccagaggcctcctgtggagcccccacctgagcccaccctgctggccctgcagaggccccagaggctgcaccaccacctgttcctggccggcctgcagcagcagaggtctgtggagcccatgaggctgtccatggacacccccatgcctgagctgcaggtgggcccccaggagcaggagctgcggcagctgctgcacaaggacaagagcaagaggtctgctgtggccagctctgtggtgaagcagaagctggccgaggtgatcctgaagaagcagcaggccgccctggagaggacagtgcaccccaacagccctggcatcccctaccgcaccctggagcccctggagacagagggcgccaccaggtccatgctgagcagcttcctgccccctgtgcccagcctgcccagcgaccccccagagcacttccccctgaggaagacagtgtctgagcccaacctgaagctgcgctacaagcccaagaagagcctggagaggaggaagaaccccctgctgaggaaggagagcgccccacccagcctgcggcggcggcctgctgagaccctgggggacagcagccccagcagcagcagcaccccagccagcggctgcagcagccccaatgattctgaacatggccccaaccccatcctgggcagcgaggccctgctgggccagaggctgcggctgcaggagacctctgtggccccctttgccctgcccaccgtgtccctgctgcctgccatcaccctgggcctgcctgccccagcccgggctgacagcgacaggaggacccaccccaccctgggcccccggggccccatcctgggcagcccccacacccccctcttcctgccccacggcctggagcctgaggccggcggcaccctgcccagccggctgcagcccatcctgctgctggaccccagcggcagccacgcccccctgctgactgtgcccggcctgggccccctgcccttccactttgcccagagcctgatgaccacagagcggctgagcggcagcggcctgcactggcccctgagcaggaccaggtctgagcccctgccccccagcgccacagcccctcctcctcctggccccatgcagccccggctggagcagctgaagacccacgtgcaggtgatcaagaggtctgccaagcccagcgagaagccccggctgcggcagatccccagcgctgaggacctggagacagatggcggcggccctggccaggtggtggatgatggcctggagcaccgggagctgggccacggccagcctgaggcccggggccctgcccccctgcagcagcacccccaggtgctgctgtgggagcagcagaggctggccggccgcctgccccggggcagcactggagacacagtgctgctgcccctggcccagggcggccaccggcccctgagccgggcccagagcagccctgctgccccagccagcctgagcgcccctgagcccgccagccaggcccgggtgctgagcagcagcgagaccccagcccggaccctgcccttcaccaccggcctcatctatgacagcgtgatgctgaagcaccagtgcagctgtggggacaacagccgccaccctgagcacgccggccgcatccagagcatctggagccggctgcaggagcggggcctgcggagccagtgtgaatgtctgcggggcaggaaggccagcctggaggagctgcagagcgtgcacagcgagagacatgtgctgctgtatggcaccaaccccctgagccggctgaagctggacaatggcaagctggccggcctgctggcccagaggatgtttgtgatgctgccctgtggcggcgtgggcgtggacacagacaccatctggaatgagctgcacagcagcaatgctgcccgctgggccgccggctctgtgacagacctggccttcaaggtggccagccgggagctgaagaatggatttgctgtggtgcggcccccaggccaccacgccgaccacagcacagccatgggcttctgcttcttcaacagcgtggccatcgcctgccggcagctgcagcagcagagcaaggccagcaagatcctgattgtggactgggatgtgcaccacggcaatggcacccagcagaccttctaccaggaccccagcgtgctgtacatcagcctgcacagacatgatgatggcaacttcttccctggcagcggggctgtggatgaggtgggcgccggcagcggggagggcttcaacgtgaatgtggcctgggccggcggcctggacccccccatgggagaccctgagtacctggccgccttccgcatcgtggtgatgcccatcgcccgggagttctccccagacctggtgctggtgtctgctggctttgatgctgctgagggccacccagcccccctgggcggctaccacgtgtctgccaagtgcttcggctacatgacccagcagctgatgaacctggccggcggcgctgtggtgctggccctggagggcggccatgacctgacagccatctgtgatgccagcgaggcctgtgtggccgccctgctgggcaacagagtggaccccctgtctgaggagggctggaagcagaagcccaacctgaatgccatccgcagcctggaggccgtcatccgggtgcacatgggcgccctgaccctgagccagatccctggccacggcagcagccagcagcaggccggcggggccttctcctggccaggccacccctgcagagctgctgtggtgatggtgaacacaggagctgcctgcagcgcctggccccctgtgcagaccccaggctgcctggagtgccagggcctgaccaagaagaagtggaggcagtag

SEQ ID NO: 334460 - DNA, 3045 bp, Artificial Sequence
  derived and/or modified sequence
atgagcgacctgcggaagcgggagctgggcgccctgttcaccagcagaggtaccgggggcgtggaatgggatgggacgcaagtgagtcctggggcgcattactgttctcccaccggagccggttgtccccggccgtgtgccgacacacccggccctcagccccaacccatggacttgcgcgtcggccagcgccccccagtggaacccccgcccgaaccaactttgctagccctccagcgcccccaacgcctccaccaccacctgttcctcgcgggtctccagcagcagcgcagtgttgaaccaatgagactgtctatggatacacccatgcctgaactccaagtggggccccaggagcaggagttgcgccaactactacataaagacaagagtaaaaggtcagctgtggcctcctctgtggtgaaacaaaagctggccgaagtaattctcaaaaagcagcaggccgccttagagaggaccgtgcatcccaactctccaggcattccgtaccgcacactcgaacccctcgagactgagggtgcaacacgatccatgttgagttctttcttgcctcccgttcctagtctcccgtccgaccccccagagcactttccattgagaaagaccgttagtgaacccaacctgaaactccgatacaagcccaagaagtctcttgaacggcgcaaaaatcccttgcttcgcaaggagtcggcaccaccttccctcagacggaggcctgctgagacactgggcgacagcagtccatctagttcatcaaccccggcatcagggtgctcctctcctaatgactccgagcacggccccaatccgatcttggggtccgaagcactgctggggcagcgcctgaggttacaggagacctcagtggctcccttcgcactaccaacggtaagcctcctccccgcgatcacactggggctgcctgccccagcccgggccgattccgaccggcggacccaccccaccctaggtccaagaggacccatcctgggttcacctcatactcctctttttcttccccatggattggagcccgaagccggcggaaccctaccatcccgtttacagcctatcctgttactggaccctagcgggtcacatgcccctctcctgacagttcccggcttgggtcccctcccctttcacttcgcccaaagcctgatgacaaccgagcgcctctccggaagcggcctccattggccgctgagccggacaagatctgagcccctgccaccatctgcaaccgcccccccacctcccggcccaatgcagccgagactggagcagctgaagacacatgtgcaggttatcaagcgctccgctaaaccttcggagaaaccaagacttcgtcaaattccaagtgctgaggatttggagacagacggggggggtcccggacaggttgttgatgacggcttggagcaccgagagttgggacatggccagcctgaagcgaggggccccgctcccctgcagcagcatcctcaggtgcttttgtgggagcagcaaagactagcaggccgcctgcccagagggtccacaggtgacaccgtccttcttcccctcgcccagggcgggcatcgaccactctcccgggcccagtcgagtcctgcagcgcccgcgtctctgagcgcacctgagcccgcaagtcaggctcgagtgctttcctcctccgaaactccagcccgcaccctgccctttaccacaggcctaatctacgatagcgtaatgctgaaacatcagtgcagctgtggggacaatagcaggcaccctgaacacgctggcagaatacagtctatctggtccaggctgcaggagaggggactgcggtcccagtgcgagtgccttcggggtcggaaagccagtctggaagagctgcagagcgtccattcggagcgccacgttcttctatatggtacgaatcccctgtctagactgaaactcgacaacgggaagctcgccgggcttttggcccaacgaatgttcgtgatgctaccatgcggaggagtaggggttgataccgacaccatctggaacgagctccattcaagcaatgccgcaaggtgggccgctggaagtgtgacagacctggcattcaaggtggcctccagagagctcaaaaatggttttgccgttgtccgacctccgggtcatcatgcagaccactccaccgcaatgggtttttgctttttcaactccgtcgctattgcctgtcggcaacttcagcaacagtctaaggcctcgaaaatactaattgttgactgggatgtgcatcacggcaacggtactcagcagactttttaccaggatcctagtgttctttatataagcctgcatcgtcacgacgacggtaacttcttcccagggagtggcgcagtggatgaggtgggggcaggatcgggagagggtttcaacgtaaacgtggcttgggcagggggactggaccctccaatgggcgatccagagtatctggccgcgttccgtattgtggtcatgcctattgccagggagttctcccctgacctggttttggtgtctgctgggtttgatgcggctgaagggcatcctgcaccactgggcgggtaccatgtgtccgctaaatgttttggctacatgactcaacagttgatgaacctggctgggggcgcagtggtcctggcactggaagggggtcacgacttaaccgcaatttgtgacgcaagtgaggcttgcgtggcggccctgttgggaaatcgggttgatcccctgtctgaagagggatggaaacagaaacctaatcttaacgcaatcaggtcactcgaggccgttatccgtgtgcacatgggtgcactgacactctctcagattcccgggcacggatcctcccagcaacaggccggaggcgcctttagctggcctggacatccttgtcgagctgcggtggtgatggtgaataccggcgccgcctgtagcgcatggcccccagttcagaccccaggctgtcttgagtgtcaggggctgacaaagaaaaaatggaggcagtag

SEQ ID NO: 334461 - DNA, 3045 bp, Artificial Sequence
  derived and/or modified sequence
atgagtgatctcaggaagcgagagctcggggctctatttactagccgtggtaccgggggagtggagtgggacgggactcaggtcagtccaggcgctcactattgctcacctaccggcgctggctgccctaggccttgcgccgatacacctggccctcagccgcagcctatggacctgagggtggggcaacgtccccctgtagagcctcccccagaaccaacgctgctcgctttacagaggcctcaaaggctgcatcaccacctttttcttgctggccttcaacagcagcgcagtgtggagcctatgagattaagcatggacactcccatgccggagcttcaagtcggacctcaggaacaggagcttcgccagctgcttcacaaagataaatctaaaagaagcgcggtggcctcatcggtggtcaaacagaaactagcggaggttatccttaagaagcagcaagcggctctggagaggaccgtgcatcccaactccccgggtattccttatcgcaccctggaacctctagagacggaaggagcaacacgatccatgctgtcatcattcctccccccagtgccatctttaccttcggacccacccgaacatttcccccttagaaagactgtctctgaaccgaatttaaagctccgctacaaaccgaagaagagtctcgagcggcgaaagaaccctctgctccgcaaggaaagcgcacctccttctcttcgaaggaggccggctgaaacactcggggatagctcaccttccagcagcagcacccccgcatccggttgctcaagtcctaatgactcagagcatggccctaacccgattcttggttcggaagccctgttgggccaacgcctgcgcctgcaggaaacatctgtggctccgtttgccttgcctaccgtttcactgttaccggctatcactctgggcctgcccgcaccagccagggccgattccgatagacggacacaccctacattgggccctcggggtcctattctaggatctccacatacccccctgtttctcccgcacggactcgaacccgaggccggtggaaccctgccctcgaggcttcaaccgatcctgttattagatccctcgggcagccacgcccctctgctgacggtcccagggctcggccctttgccatttcactttgcacagtccctgatgactacagagaggctcagtgggagcggcctgcactggcccctctcaagaacccgctccgagccactgcccccttccgccactgctcctccacctccgggacctatgcaaccccgacttgagcagcttaagacacacgtccaggtgattaaaagaagcgccaaaccatctgaaaaaccaagactgaggcagatcccaagcgctgaagacctcgagaccgatggcggaggccctggacaggtggtagacgacggtctcgaacaccgggaactgggacacggacaacctgaagccaggggacctgcgccactccagcagcacccccaggtgctcctgtgggagcaacaacgtttagccggaaggctaccaagggggtctacgggagatacggtgctcctccccctcgcccaggggggtcaccgccctctgagtcgagcgcagagctcacctgctgctcccgcatctctcagcgccccagagccagcaagtcaagccagggtgcttagtagcagcgagaccccagccagaacgctcccttttacaacgggactgatctacgacagtgtgatgctaaaacaccagtgcagttgcggagataattcccggcacccggaacatgccggaagaattcagtctatatggagtcgcctgcaagaacgcggacttaggtcacagtgcgagtgcctaaggggacggaaagctagtctggaagaactgcaatcagtccattccgagaggcatgtgctcttgtacggaacgaatcccctctccagattaaagttggacaacgggaagctggccggactgctggcccagcggatgtttgtgatgcttccctgtgggggagtgggcgtcgacaccgacaccatttggaacgaacttcatagctccaatgcagcacggtgggcagcgggtagcgtgactgatttggcctttaaagtcgcctccagggagctgaaaaatggttttgccgtggtgagacctcctggccatcacgcagaccactccaccgccatgggattttgcttctttaattcggttgcaattgcatgtagacaactccagcaacagagcaaggcttctaagattcttattgtggattgggacgtacatcatggcaatggtactcagcaaactttttaccaagatccctctgtcctgtacatttcattacatcgtcacgatgatggcaatttctttcccggttcaggcgcagtggacgaggtcggagccggatctggagaaggattcaatgtcaacgtggcatgggccggaggcctggacccgccaatgggggatccagagtacctggctgcctttcggatagtggttatgccgatcgctcgcgaattcagtcctgatctggttctcgttagtgcaggttttgacgcagccgaaggacaccccgctcctctcgggggttaccacgttagcgcaaaatgctttgggtatatgactcaacagctcatgaatctggctggcggagccgtggtgctggccctggagggtggccacgacctcactgcaatttgcgacgcatccgaggcctgcgtagctgccctactgggtaacagagtcgatcccctgtcggaggaaggttggaagcagaagcccaatttgaatgccatccgcagcctcgaggccgtcatacgagtgcacatgggagctctcactctgtctcagatccctggtcacggcagcagccagcagcaagctggaggcgcattcagctggccaggacacccttgtagggctgccgtggtcatggttaatacgggcgctgcctgcagcgcttggcctcctgttcaaactcccggatgtctagaatgccaagggctcactaagaagaagtggagacagtag

SEQ ID NO: 334462 - protein, 1014 aa, Artificial Sequence
  derived and/or modified sequence
MSDLRKRELGALFTSRGTGGVEWDGTQVSPGAHYCSPTGAGCPRPCADTPGPQPQPMDLRVGQRPPVEPPPEPTLLALQRPQRLHHHLFLAGLQQQRSVEPMRLSMDTPMPELQVGPQEQELRQLLHKDKSKRSAVASSVVKQKLAEVILKKQQAALERTVHPNSPGIPYRTLEPLETEGATRSMLSSFLPPVPSLPSDPPEHFPLRKTVSEPNLKLRYKPKKSLERRKNPLLRKESAPPSLRRRPAETLGDSSPSSSSTPASGCSSPNDSEHGPNPILGSEALLGQRLRLQETSVAPFALPTVSLLPAITLGLPAPARADSDRRTHPTLGPRGPILGSPHTPLFLPHGLEPEAGGTLPSRLQPILLLDPSGSHAPLLTVPGLGPLPFHFAQSLMTTERLSGSGLHWPLSRTRSEPLPPSATAPPPPGPMQPRLEQLKTHVQVIKRSAKPSEKPRLRQIPSAEDLETDGGGPGQVVDDGLEHRELGHGQPEARGPAPLQQHPQVLLWEQQRLAGRLPRGSTGDTVLLPLAQGGHRPLSRAQSSPAAPASLSAPEPASQARVLSSSETPARTLPFTTGLIYDSVMLKHQCSCGDNSRHPEHAGRIQSIWSRLQERGLRSQCECLRGRKASLEELQSVHSERHVLLYGTNPLSRLKLDNGKLAGLLAQRMFVMLPCGGVGVDTDTIWNELHSSNAARWAAGSVTDLAFKVASRELKNGFAVVRPPGHHADHSTAMGFCFFNSVAIACRQLQQQSKASKILIVDWDVHHGNGTQQTFYQDPSVLYISLHRHDDGNFFPGSGAVDEVGAGSGEGFNVNVAWAGGLDPPMGDPEYLAAFRIVVMPIAREFSPDLVLVSAGFDAAEGHPAPLGGYHVSAKCFGYMTQQLMNLAGGAVVLALEGGHDLTAICDASEACVAALLGNRVDPLSEEGWKQKPNLNAIRSLEAVIRVHMGALTLSQIPGHGSSQQQAGGAFSWPGHPCRAAVVMVNTGAACSAWPPVQTPGCLECQGLTKKKWRQ

SEQ ID NO: 334463 - DNA, 3016 bp, Artificial Sequence
  derived and/or modified sequence
acaccctttttcttttaataggaacaggctggacccttccgttcccctcagcaggcatgatgggacccaggtgagcccgggtgcccactactgcagccccactggcgcaggctgccccaggccctgtgcagacacaccaggccctcagccgcagcccatggacctgcgggtgggccagcggcccccagtggagcccccaccagagcccacattgctggccctgcagcgtccccagcgcctgcaccaccacctcttcctagcaggcctgcagcagcagcgctcggtggagcccatgaggctctccatggacacgccgatgcccgagttgcaggtgggaccccaggaacaagagctgcggcagcttctccacaaggacaagagcaagcgaagtgctgtagccagcagcgtggtcaagcagaagctagcggaggtgattctgaaaaaacagcaggcggccctagaaagaacagtccatcccaacagccccggcattccctacagaaccctggagcccctggagacggaaggagccacccgctccatgctcagcagctttttgcctcctgttcccagcctgcccagtgaccccccagagcacttccctctgcgcaagacagtctctgagcccaacctgaagctgcgctataagcccaagaagtccctggagcggaggaagaatccactgctccgaaaggagagtgcgccccccagcctccggcggcggcccgcagagaccctcggagactcctccccaagtagtagcagcacgcccgcatcagggtgcagctcccccaatgacagcgagcacggccccaatcccatcctgggctcggaggcgctcttgggccagcggctgcggctgcaggagacttctgtggccccgttcgccttgccgacagtgtccttgctgcccgcaatcactctggggctgcccgcccctgccagggctgacagtgaccgcaggacccatccgactctgggccctcgggggccaatcctggggagcccccacactcccctcttcctgccccatggcttggagcccgaggctgggggcaccttgccctctcgcctgcagcccattctcctcctggacccctcaggctctcatgccccgctgctgactgtgcccgggcttgggcccttgcccttccactttgcccagtccttaatgaccaccgagcggctctctgggtcaggcctccactggccactgagccggactcgctcagagcccctgccccccagtgccaccgctcccccaccgccgggccccatgcagccccgcctggagcagctcaaaactcacgtccaggtgatcaagaggtcagccaagccgagtgagaagccccggctgcggcagataccctcggctgaagacctggagacagatggcgggggaccgggccaggtggtggacgatggcctggagcacagggagctgggccatgggcagcctgaggccagaggccccgctcctctccagcagcaccctcaggtgttgctctgggaacagcagcgactggctgggcggctcccccggggcagcaccggggacactgtgctgcttcctctggcccagggtgggcaccggcctctgtcccgggctcagtcttccccagccgcacctgcctcactgtcagccccagagcctgccagccaggcccgagtcctctccagctcagagacccctgccaggaccctgcccttcaccacagggctgatctatgactcggtcatgctgaagcaccagtgctcctgcggtgacaacagcaggcacccggagcacgccggccgcatccagagcatctggtcccggctgcaggagcgggggctccggagccagtgtgagtgtctccgaggccggaaggcctccctggaagagctgcagtcggtccactctgagcggcacgtgctcctctacggcaccaacccgctcagccgcctcaaactggacaacgggaagctggcagggctcctggcacagcggatgtttgtgatgctgccctgtggtggggttggggtggacactgacaccatctggaatgagcttcattcctccaatgcagcccgctgggccgctggcagtgtcactgacctcgccttcaaagtggcttctcgtgagctaaagaatggtttcgctgtggtgcggcccccaggacaccatgcagatcattcaacagccatgggcttctgcttcttcaactcagtggccatcgcctgccggcagctgcaacagcagagcaaggccagcaagatcctcattgtagactgggacgtgcaccatggcaacggcacccagcaaaccttctaccaagaccccagtgtgctctacatctccctgcatcgccatgacgacggcaacttcttcccggggagtggggctgtggatgaggtaggggctggcagcggtgagggcttcaatgtcaatgtggcctgggctggaggtctggacccccccatgggggatcctgagtacctggctgctttcaggatagtcgtgatgcccatcgcccgagagttctctccagacctagtcctggtgtctgctggatttgatgctgctgagggtcacccggccccactgggtggctaccatgtttctgccaaatgttttggatacatgacgcagcaactgatgaacctggcaggaggcgcagtggtgctggccttggagggtggccatgacctcacagccatctgtgacgcctctgaggcctgtgtggctgctcttctgggtaacagggtggatcccctttcagaagaaggctggaaacagaaacccaacctcaatgccatccgctctctggaggccgtgatccgggtgcacagtaaatactggggctgcatgcagcgcctggcctcctgtccagactcctgggtgcctagagtgccaggggctgacaaagaagaagtggaggcagtgaccgcactggcgtccctctctgtgggcatcctggctgaagataggccctcggagcagctggtggaggaggaagaacctatgaatctctaa

SEQ ID NO: 334464 - protein, 952 aa, Artificial Sequence
  derived and/or modified sequence
MDLRVGQRPPVEPPPEPTLLALQRPQRLHHHLFLAGLQQQRSVEPMRLSMDTPMPELQVGPQEQELRQLLHKDKSKRSAVASSVVKQKLAEVILKKQQAALERTVHPNSPGIPYRTLEPLETEGATRSMLSSFLPPVPSLPSDPPEHFPLRKTVSEPNLKLRYKPKKSLERRKNPLLRKESAPPSLRRRPAETLGDSSPSSSSTPASGCSSPNDSEHGPNPILGSEALLGQRLRLQETSVAPFALPTVSLLPAITLGLPAPARADSDRRTHPTLGPRGPILGSPHTPLFLPHGLEPEAGGTLPSRLQPILLLDPSGSHAPLLTVPGLGPLPFHFAQSLMTTERLSGSGLHWPLSRTRSEPLPPSATAPPPPGPMQPRLEQLKTHVQVIKRSAKPSEKPRLRQIPSAEDLETDGGGPGQVVDDGLEHRELGHGQPEARGPAPLQQHPQVLLWEQQRLAGRLPRGSTGDTVLLPLAQGGHRPLSRAQSSPAAPASLSAPEPASQARVLSSSETPARTLPFTTGLIYDSVMLKHQCSCGDNSRHPEHAGRIQSIWSRLQERGLRSQCECLRGRKASLEELQSVHSERHVLLYGTNPLSRLKLDNGKLAGLLAQRMFVMLPCGGVGVDTDTIWNELHSSNAARWAAGSVTDLAFKVASRELKNGFAVVRPPGHHADHSTAMGFCFFNSVAIACRQLQQQSKASKILIVDWDVHHGNGTQQTFYQDPSVLYISLHRHDDGNFFPGSGAVDEVGAGSGEGFNVNVAWAGGLDPPMGDPEYLAAFRIVVMPIAREFSPDLVLVSAGFDAAEGHPAPLGGYHVSAKCFGYMTQQLMNLAGGAVVLALEGGHDLTAICDASEACVAALLGNRVDPLSEEGWKQKPNLNAIRSLEAVIRVHSKYWGCMQRLASCPDSWVPRVPGADKEEVEAVTALASLSVGILAEDRPSEQLVEEEEPMNL

SEQ ID NO: 334465 - DNA, 402 bp, Artificial Sequence
  derived and/or modified sequence
atgggacaagatgccggtcgcctgcagaggcgctctagggtggggtttggggaaaacggggcttgcagaaaagaacgacagaagttggccctggagggatctaaaaaggggccatggaagggacgctccggagatcgcaagggcaattctaagggtcaggaggagctcgggcgaggtgccagagtgaacacagaatggccgatgcctcgcatgagggactggaaagagcgcagggggccaagcagagaagaagcccataagtccctcgggagacaaggcatgggtctccagcggggtgaaggggtgcgggctgttgcggctagggtgctttgccacccatgtcctctgtcgcgtgggctgcagcataacaggggagacagatttgtgtgggggcaggtttag

SEQ ID NO: 334466 - protein, 141 aa, Artificial Sequence
  derived and/or modified sequence
MFACSKFVSTPSLVKSTSQLLSRPLSAVVLKRPEILTDESLSSLAVSCPLTSLVSSRSFQTSAISRDIDTAAKFIGAGAATVGVAGSGAGIGTVFGSLIIGYARNPSLKQQLFSYAILGFALSEAMGLFCLMVAFLILFAM

SEQ ID NO: 334467 - protein, 749 aa, Artificial Sequence
  derived and/or modified sequence
MTHEEHHAAKTLGIGKAIAVLTSGGDAQGMNAAVRAVVRVGIFTGARVFFVHEGYQGLVDGGDHIKEATWESVSMMLQLGGTVIGSARCKDFREREGRLRAAYNLVKRGITNLCVIGGDGSLTGADTFRSEWSDLLSDLQKAGKITDEEATKSSYLNIVGLVGSIDNDFCGTDMTIGTDSALHRIMEIVDAITTTAQSHQRTFVLEVMGRHCGYLALVTSLSCGADWVFIPECPPDDDWEEHLCRRLSETRTRGSRLNIIIVAEGAIDKNGKPITSEDIKNGSRMGVEAVMALLEGTPDTPACVVSLSGNQAVRLPLMECVQVTKDVTKAMDEKKFDEALKLRGRSFMNNWEVYKLLAHVRPPVSKSGSHTVAVMNVGAPAAGMNAAVRSTVRIGLIQGNRVLVVHDGFEGLAKGQIEEAGWSYVGGWTGQGGSKLGTKRTLPKKSFEQISANITKFNIQGLVIIGGFEAYTGGLELMEGRKQFDELCIPFVVIPATVSNNVPGSDFSVGADTALNTICTTCDRIKQSAAGTKRRVFIIETMGGYCGYLATMAGLAAGADAAYIFEEPFTIRDLQANVEHLVQKMKTTVKRGLVLRNEKCNENYTTDFIFNLYSEEGKGIFDSRKNVLGHMQQGGSPTPFDRNFATKMGAKAMNWMSGKIKESYRNGRIFANTPDSGCVLGMRKRALVFQPVAELKDQTDFEHRIPKEQWWLKLRPILKILAKYEIDLDTSDHAHLEHITRKRSGEAAV

SEQ ID NO: 334468 - protein, 117 aa, Artificial Sequence
  derived and/or modified sequence
MTHEEHHAAKTLGIGKAIAVLTSGGDAQGMNAAVRAVVRVGIFTGARVFFVHEGYQGLVDGGDHIKEATWESVSMMLQLGGTVIGSARCKDFREREGRLRAAYNLVKRGITNLCVIG

SEQ ID NO: 334469 - protein, 161 aa, Artificial Sequence
  derived and/or modified sequence
MTHEEHHAAKTLGIGKAIAVLTSGGDAQGMNAAVRAVVRVGIFTGARVFFVHEGYQGLVDGGDHIKEATWESVSMMLQLGGTVIGSARCKDFREREGRLRAAYNLVKRGITNLCVIGGDGSLTGADTFRSEWSDLLSDLQKAGKITDEEATKSSYLNIVGL

SEQ ID NO: 334470 - protein, 157 aa, Artificial Sequence
  derived and/or modified sequence
MTHEEHHAAKTLGIGKAIAVLTSGGDAQGMNAAVRAVVRVGIFTGARVFFVHEGYQGLVDGGDHIKEATWESVSMMLQLGGTVIGSARCKDFREREGRLRAAYNLVKRGITNLCVIGGDGSLTGADTFRSEWSDLLSDLQKAGKITDEEATKSSYLN

SEQ ID NO: 334471 - protein, 85 aa, Artificial Sequence
  derived and/or modified sequence
MTHEEHHAAKTLGIGKAIAVLTSGGDAQGMNAAVRAVVRVGIFTGARVFFVHEGYQGLVDGGDHIKEATWESVSMMLQLGGTVIG

SEQ ID NO: 334472 - protein, 139 aa, Artificial Sequence
  derived and/or modified sequence
MTHEEHHAAKTLGIGKAIAVLTSGGDAQGMNAAVRAVVRVGIFTGARVFFVHEGYQGLVDGGDHIKEATWESVSMMLQLGGTVIGSARCKDFREREGRLRAAYNLVKRGITNLCVIGGDGSLTGADTFRSEWSDLLSDL

SEQ ID NO: 334473 - DNA, 2250 bp, Artificial Sequence
  derived and/or modified sequence
atgacccacgaagaacaccacgcagcaaaaacactgggaataggaaaggccatcgcagtgctcaccagtggtggcgatgcacagggaatgaatgcagccgtccgggcagtggtacgagttgggattttcactggcgcgcgagtgttttttgtgcatgagggatatcagggcttggttgatggcggtgaccacattaaggaagcaacctgggaatctgtcagcatgatgctccagcttggaggaactgtaatcggtagcgcacggtgtaaggacttccgcgaacgggaaggccggttacgcgcagcctataacctcgtgaagcgcggcattacgaatttgtgcgtcatcgggggtgacggcagcctgactggcgctgacacatttagatcggagtggtccgatctgttgagcgacctgcagaaggctggtaagatcaccgatgaggaggctacgaagagcagctacctgaatatagtggggttagtgggttcaatagacaacgatttttgcggtaccgacatgactattggaacagacagtgctctgcatagaatcatggaaatcgtcgatgcgattactaccactgcccaatcgcatcagcgcacattcgtgctggaggtaatgggtaggcactgtgggtatctcgccctcgtcacgtccctgagctgcggtgcagattgggtgttcatcccagagtgccctccagatgatgactgggaggagcatctgtgtcggagactgtccgaaacacgcactcgagggtctcgactcaatatcattatcgtcgcagagggagctatcgataaaaatgggaagcccatcacttctgaagatatcaaaaacgggagtagaatgggggtggaggctgtgatggccctccttgagggaaccccggatacccctgcctgtgttgtgtccctatctggtaaccaggcagtacggctgcctttaatggaatgtgtccaggtgactaaggacgtaaccaaagcgatggatgagaagaaattcgatgaggcacttaaactgagagggcggagttttatgaacaactgggaggtgtacaaactgttggcccacgtaagacccccagttagcaagtccgggagccacaccgtagctgtgatgaacgttggggcaccagcggcaggcatgaatgcagccgtcaggagcactgtgagaatcggcctgattcagggcaaccgcgtcttagttgtccacgatgggttcgaaggcctggccaagggtcaaattgaggaggcgggatggtcctacgtggggggctggactgggcagggcggctccaagctaggtaccaaacgcaccctccctaaaaaaagctttgagcagatttctgcgaacataacaaagtttaacatacaggggttggtgattatcggaggcttcgaagcctacactggaggcttggaactgatggaggggaggaagcagttcgacgaactttgcattccgtttgtggtgatcccagcaacggtctccaataatgtgccaggttcagattttagtgtgggtgcagacaccgcattgaacaccatctgcaccacatgtgatcgaattaagcagagcgctgccggaacaaagagacgagtcttcattattgaaacaatgggtggctactgcggttacctggccacgatggccggacttgccgcaggagccgatgctgcttacatcttcgaggagccatttacaattagggatctgcaggcaaatgtagaacatcttgtgcagaagatgaagaccaccgtgaagaggggtctcgtactgcggaatgagaaatgcaatgagaattacacaactgactttattttcaatttatacagcgaggagggaaaaggcattttcgatagtcgcaagaatgtcctgggccatatgcagcagggcggatctccgacaccttttgaccgaaactttgccacaaaaatgggcgcgaaagctatgaactggatgtccggcaagattaaagagtcttatcgcaacggaaggatcttcgccaacacgccagactccggctgcgtgctcggcatgcgcaagagagcacttgtattccaaccggttgccgaactgaaggaccagacagacttcgagcaccgaatccctaaagagcagtggtggctgaaactccgacccattctaaaaatactggccaagtacgagatcgacttagacactagcgaccacgcacaccttgagcacattacgcgtaagcggagtggcgaagctgccgtgtag

SEQ ID NO: 334474 - DNA, 2250 bp, Artificial Sequence
  derived and/or modified sequence
atgactcacgaagaacaccacgccgccaagacgctggggatcgggaaggcaatagctgtcctcacttctggcggcgacgcccaggggatgaatgccgccgtgcgagcggtcgtaagggtgggcatattcactggcgctagagtcttctttgtgcacgaaggatatcaaggcctggttgatggaggagatcacatcaaggaagcaacatgggagtccgtcagcatgatgctgcaactgggtggtaccgtcatcggcagtgcacggtgtaaggatttccgggaaagggagggccgcctcagagcggcttacaacctggtaaaaaggggcattactaacctctgcgtgattggaggcgacggatcactgaccggagcagacacatttagatcagagtggtcagatcttctctcggacctgcaaaaggctgggaagataacagatgaggaggctacaaagtccagctatctgaacatagtcgggctcgtcgggtcgatcgataatgatttttgcggaaccgacatgacaataggcacagatagcgctctgcatcgcatcatggaaatcgttgatgccatcacaacaaccgcacaaagtcaccagaggactttcgtgctggaggtgatgggacggcactgtgggtacctggcattggtgacaagcctgtcttgcggcgccgactgggtgttcatacctgagtgcccccccgatgatgactgggaagagcacctgtgtcgccgtctgagcgagacacgcacaagaggttccaggctgaatatcattatcgtcgcagaaggcgcaattgataagaacggaaaacccattacctctgaggatatcaaaaatggatcccggatgggcgtagaagcggtcatggccttgctcgaaggaaccccggatacacctgcttgtgtggtcagtctgtccggcaatcaggctgttcgactcccccttatggaatgcgtccaggtgacaaaagatgtgactaaggctatggacgaaaaaaagtttgacgaggcccttaagctcagaggaaggtccttcatgaacaattgggaagtttacaaactcctggcacacgtgcggcccccagtgtcaaaatccggctctcacacagtggctgtcatgaacgtcggtgctcctgcggcagggatgaacgccgcagtgaggtctaccgtgcgcatcggcctgatccagggaaatcgggtccttgtggtgcacgatggctttgagggactggctaagggacagatcgaggaagccgggtggagttacgtcgggggttggacaggtcaaggaggctcgaaacttggaacaaagcggacactccccaagaagtccttcgagcaaatcagcgcaaatattactaagttcaatatccagggactggtaattatcggtgggttcgaagcctacaccggggggcttgagctgatggaaggccgtaaacaatttgacgagctctgcatcccattcgtggtcattcctgccactgtcagtaataacgttcctggcagcgatttctctgtgggcgctgacaccgccctgaatactatatgtaccacctgtgataggatcaagcaaagcgcagccggtactaagagacgagtgtttattatcgaaaccatgggaggctactgcgggtaccttgccaccatggcgggcctcgccgccggggcagacgccgcatacatctttgaggagcccttcacgataagagacctccaggctaacgtggaacacctcgtccaaaagatgaagacaactgttaagcggggcctggtgttgagaaacgagaaatgtaatgaaaactataccaccgattttattttcaatttatatagcgaagaaggaaaggggatctttgactcccggaagaatgtgctcggtcatatgcagcagggcggctcccccactccgttcgacaggaactttgcaacgaagatgggagcgaaggcaatgaattggatgtcgggaaagattaaagagagctacaggaacggcaggatcttcgctaacaccccagactcaggctgtgtgctgggcatgaggaagcgcgctctcgtattccagcctgttgccgagttgaaggaccaaactgacttcgagcacaggatcccgaaggagcagtggtggctcaagcttagaccaatcctgaaaattctggccaaatacgagatagacctcgacacttccgaccatgctcacctcgaacatatcacgcgcaaaaggagcggcgaagcagccgtgtag

SEQ ID NO: 334475 - DNA, 2250 bp, Artificial Sequence
  derived and/or modified sequence
atgacccatgaggagcaccacgccgccaagaccctgggcatcggcaaggccatcgctgtgctgaccagcggaggagatgcccagggcatgaatgctgctgtgcgggctgtggtgcgggtgggcatcttcaccggggcccgggtcttctttgtgcatgagggctaccagggcctggtggatggaggagaccacatcaaggaggccacctgggagagcgtgtccatgatgctgcagctgggcggcaccgtcatcggcagcgcccgctgcaaggacttccgggagcgggagggccgcctgcgggccgcctacaacctggtgaagaggggcatcaccaacctgtgtgtgattggaggagatggcagcctgactggagctgacaccttccgctctgagtggagcgacctgctgagtgacctgcagaaggccggcaagatcacagatgaggaggccaccaagagcagctacctgaacatcgtgggcctggtgggcagcattgacaatgacttctgtggcacagacatgaccatcggcacagacagcgccctgcaccgcatcatggagatcgtggatgccatcaccaccacagcccagagccaccagaggacctttgtgctggaggtgatgggccgccactgcggctacctggccctggtgaccagcctgagctgtggggctgactgggtgttcatccctgagtgccccccagatgatgactgggaggagcacctgtgccggcggctgtctgagaccaggacccggggcagccggctgaacatcatcatcgtggccgagggcgccatcgacaagaatggcaagcccatcaccagcgaggacatcaagaatggcagcaggatgggcgtggaggccgtgatggccctgctggagggcaccccagacaccccagcctgtgtggtgtccctgagcggcaaccaggccgtgcggctgcccctgatggagtgtgtgcaggtgaccaaggatgtgaccaaggccatggatgagaagaagtttgatgaggccctgaagctgcggggccgctccttcatgaacaactgggaggtgtacaagctgctggcccacgtgcggccccctgtgtccaagagcggcagccacacagtggccgtgatgaatgtgggcgccccagctgctggcatgaatgctgctgtgcgcagcacagtgcgcatcggcctcatccagggcaacagagtgctggtggtgcatgatggctttgagggcctggccaagggccagatcgaggaggccggctggagctatgtgggcggctggacaggccagggcggcagcaagctgggcaccaagaggaccctgcccaagaagagctttgagcagatcagcgccaacatcaccaagttcaacatccagggcctggtgatcattggaggctttgaggcctacacaggaggcctggagctgatggagggcaggaagcagtttgatgagctgtgcatcccctttgtggtgatcccagccaccgtgagcaacaacgtgcccggcagtgacttctctgtgggcgctgacacagccctgaacaccatctgcaccacctgtgaccgcatcaagcagagcgctgctggcaccaagagaagagtcttcatcatcgagaccatgggcggctactgcggctacctggccaccatggccggcctggccgccggggctgatgctgcctacatctttgaggagcccttcaccatccgggacctgcaggccaacgtggagcacctggtgcagaagatgaagaccaccgtgaagaggggcctggtgctgagaaatgaaaaatgtaatgaaaactacaccacagacttcatcttcaacctgtacagcgaggagggcaagggcatctttgacagcaggaagaatgtgctgggccacatgcagcagggcggcagccccaccccatttgacaggaactttgccaccaagatgggcgccaaggccatgaactggatgtctgggaagatcaaggagagctacagaaatggccgcatctttgccaacaccccagacagcggctgtgtgctgggcatgaggaagagggccctggtgttccagcctgtggccgagctgaaggaccagacagactttgagcaccgcatccccaaggagcagtggtggctgaagctgcggcccatcctgaagatcctggccaagtatgaaattgacctggacaccagtgaccacgcccacctggagcacatcaccaggaagaggtctggagaggccgctgtgtag

SEQ ID NO: 334476 - DNA, 2250 bp, Artificial Sequence
  derived and/or modified sequence
atgacccacgaggagcaccacgccgccaagaccctgggcatcggcaaggctattgcagtcctgacttcaggaggcgacgcacaaggaatgaatgccgccgttcgagccgtggttcgggttggaatcttcacaggcgctcgcgtgttttttgttcacgagggctaccaggggctagtggatggtggagaccatatcaaggaggccacctgggaaagtgtgtcgatgatgctccagctggggggcaccgttataggaagcgctcgttgcaaagattttcgcgaacgagagggtcgattgagggctgcttataacttagtaaagagaggaataacaaatctgtgcgttattggtggtgatggctctcttacaggcgcagacacttttcgcagtgagtggtcagacctactgtcggatttgcaaaaggccggcaagataacagacgaggaagccacgaaatcttcttacttgaacatagtgggactcgtcggttccattgacaatgacttttgcggaactgatatgaccataggaactgacagtgccctgcatcggattatggaaattgtggatgctattactaccacagcacaatctcaccaacggacctttgtactcgaagtgatggggagacactgcgggtatctcgcacttgtgacttctcttagctgtggggccgattgggtctttatccccgagtgtccccctgacgacgactgggaggagcatctgtgtcgcagactaagcgagacgaggactcgtgggtccagactaaatatcattattgtggccgaaggcgctatagataagaacggtaaacccatcacttctgaagacataaaaaatggatctagaatgggagtcgaagctgtcatggctctgcttgagggaacacctgatacacccgcctgcgtagtcagtctttctggtaatcaggccgtgcgcctgcctctgatggagtgcgtgcaggtcactaaggacgtgactaaggcaatggacgagaagaaattcgacgaggcactgaaactgagagggcggtcgttcatgaataactgggaggtctataaactgcttgctcatgtgcggccaccagtgtccaaaagcggtagccatactgtagccgttatgaacgtaggcgccccggcagcaggtatgaatgccgctgtgcgttctacagtcagaattggcctgatccagggaaaccgtgtgcttgtggtgcacgacggctttgagggccttgctaagggccagatcgaagaggccgggtggagctacgtaggtggctggaccggccagggggggagtaagctgggcacaaaaaggacattgccgaaaaaatcttttgagcagatctccgccaacatcacgaagttcaatattcaaggcctagtcataattggggggtttgaagcctataccggcggcttagagctcatggaaggaagaaagcagttcgacgagctgtgcatcccctttgtggttatccctgccactgtgtcaaacaacgtgccaggaagcgacttctcggtaggcgccgacaccgcactcaacaccatctgcaccacatgcgacaggatcaagcagagcgccgccggaacgaagcgccgcgtgttcataattgagaccatgggaggctactgcggttatctcgccaccatggccggactggctgctggggcagacgctgcatacatctttgaggagcccttcactatccgggatctgcaagctaacgttgagcacctggtgcagaagatgaaaactaccgttaaaagaggtctcgttctgcgaaacgagaagtgcaacgagaattacaccacggatttcatttttaatctttattccgaggagggcaagggtatcttcgactctcggaaaaacgtcctgggccacatgcagcagggaggatcccctacaccttttgacaggaatttcgctaccaaaatgggggccaaggctatgaactggatgtctggtaaaattaaggaatcctacagaaatggccggatcttcgctaacactcccgattccggttgcgtgctcggaatgcgcaagcgggccttagttttccaacccgtcgcagagcttaaagatcagacagacttcgagcacagaatcccaaaggagcaatggtggttaaaactccggccgatcctgaagattctcgccaaatatgaaatcgacctggacacgagtgatcatgcccatctggaacacattacgcgcaaacgatccggagaagccgcagtctag

SEQ ID NO: 334477 - DNA, 2250 bp, Artificial Sequence
  derived and/or modified sequence
atgacccacgaggagcaccacgccgccaagaccctgggcatcggcaaagcaattgcggtccttacaagcggaggagacgcccaaggaatgaacgcggccgtcagagctgtggtccgggttggaatctttactggggcccgcgtgttctttgtgcatgaaggctaccagggcctcgtcgatggaggggatcacatcaaggaagccacctgggagagtgtgtcaatgatgctgcagctgggggggactgtgatcgggtctgccagatgtaaagatttccgcgagcgagaaggtaggttaagagctgcgtataacctagtcaagcggggtataactaacctctgtgttattgggggggacggttcccttactggggccgatacgttccgctccgagtggagcgacttactgtcagacttacagaaggctggtaagataactgatgaagaagccaccaaaagctcctatctcaacatcgtggggctcgtcggttctattgacaacgatttctgcggaacagacatgaccatcggaaccgactcggccctacatagaattatggagattgttgacgcaataactactaccgcacagtcacaccagcggacattcgttcttgaagtgatgggccgccattgcggatatctggctctggtgacaagtctcagctgcggtgccgactgggtgtttattcctgagtgtccaccggatgacgattgggaagaacatttgtgtcggagattgtccgagacaagaaccagagggtcacgcctgaatatcatcatcgttgctgaaggagcaattgacaagaatggaaaaccaattactagtgaggacatcaaaaacggtagtcggatgggagtggaggcagtaatggccctgctggagggcacccctgatactcctgcctgcgtggtatccctctccgggaaccaggcagtccggcttcccttaatggagtgtgtgcaggtgacaaaggacgttacaaaagcaatggacgaaaagaagtttgacgaagccctgaagctccgcggtcggagttttatgaacaattgggaggtgtacaagctcttagcccacgtcagaccaccagtgtccaagtccggatctcatacagtggctgtaatgaacgtgggcgcccctgctgcgggcatgaatgctgccgtgaggtccacggtgaggattgggctcatacagggtaacagggtattggtggtccatgacggtttcgaggggctggccaagggtcagatagaagaagcaggttggagctacgtgggaggctggacgggccagggcgggagcaaactgggaaccaaaaggacacttcctaagaaatcatttgagcagattagcgccaatatcactaagtttaacatccagggtctcgttatcatcggtgggttcgaggcctacacgggcggattggagctgatggagggcaggaaacagtttgatgaactgtgcatccccttcgtcgtcattcccgcaactgtcagcaacaacgtccccggatcagacttttctgttggggctgatacggccctgaatactatctgcacaacatgcgacaggattaagcagtccgccgcaggcaccaagaggagggtttttataatagaaactatgggcggatattgtgggtacttagcaactatggctggattggctgcaggagctgatgcagcttacattttcgaggaaccgttcacaatccgagatctgcaggctaacgtggaacacctcgtgcagaagatgaaaacaacagtcaaaagagggctagtactgaggaacgagaagtgtaacgaaaactacactacagatttcatttttaatctctattcagaggaggggaagggcattttcgacagtcggaaaaacgttttaggccatatgcagcagggtggaagccctacgcccttcgaccggaactttgctaccaaaatgggcgccaaagccatgaattggatgtccgggaaaatcaaggagtcttatcggaatggacggattttcgcaaacacgcctgactctgggtgcgtcctgggtatgagaaagcgggcactcgttttccagcccgtggccgaactgaaagatcagaccgatttcgagcatagaatcccgaaagagcagtggtggcttaaactgagaccaatcttgaaaattctggcaaaatacgagatcgacttggatacttccgatcacgcccaccttgagcatattacaagaaagagaagtggggaggcagctgtctag

SEQ ID NO: 334478 - DNA, 2683 bp, Artificial Sequence
  derived and/or modified sequence
cagcggcggaggagagctaagactaaaagagtggatcatgacccatgaagagcaccatgcagccaaaaccctggggattggcaaagccattgctgtcttaacctctggtggagatgcccaaggtatgaatgctgctgtcagggctgtggttcgagttggtatcttcaccggtgcccgtgtcttctttgtccatgagggttatcaaggcctggtggatggtggagatcacatcaaggaagccacctgggagagcgtttcgatgatgcttcagctgggaggcacggtgattggaagtgcccggtgcaaggactttcgggaacgagaaggacgactccgagctgcctacaacctggtgaagcgtgggatcaccaatctctgtgtcattgggggtgatggcagcctcactggggctgacaccttccgttctgagtggagtgacttgttgagtgacctccagaaagcaggtaagatcacagatgaggaggctacgaagtccagctacctgaacattgtgggcctggttgggtcaattgacaatgacttctgtggcaccgatatgaccattggcactgactctgccctgcatcggatcatggaaattgtagatgccatcactaccactgcccagagccaccagaggacatttgtgttagaagtaatgggccgccactgtggatacctggcccttgtcacctctctgtcctgtggggccgactgggtttttattcctgaatgtccaccagatgacgactgggaggaacacctttgtcgccgactcagcgagacaaggacccgtggttctcgtctcaacatcatcattgtggctgagggtgcaattgacaagaatggaaaaccaatcacctcagaagacatcaagaatggcagcaggatgggtgtggaagcagtgatggcacttttggaggggaccccagataccccagcctgtgtagtgagcctctctggtaaccaggctgtgcgcctgcccctcatggaatgtgtccaggtgaccaaagatgtgaccaaggccatggatgagaagaaatttgacgaagccctgaagctgagaggccggagcttcatgaacaactgggaggtgtacaagcttctagctcatgtcagacccccggtatctaagagtggttcgcacacagtggctgtgatgaacgtgggggctccggctgcaggcatgaatgctgctgttcgctccactgtgaggattggccttatccagggcaaccgagtgctcgttgtccatgatggtttcgagggcctggccaaggggcagatagaggaagctggctggagctatgttgggggctggactggccaaggtggctctaaacttgggactaaaaggactctacccaagaagagctttgaacagatcagtgccaatataactaagtttaacattcagggccttgtcatcattgggggctttgaggcttacacagggggcctggaactgatggagggcaggaagcagtttgatgagctctgcatcccatttgtggtcattcctgctacagtctccaacaatgtccctggctcagacttcagcgttggggctgacacagcactcaatactatctgcacaacctgtgaccgcatcaagcagtcagcagctggcaccaagcgtcgggtgtttatcattgagactatgggtggctactgtggctacctggctaccatggctggactggcagctggggccgatgctgcctacatttttgaggagcccttcaccattcgagacctgcaggcaaatgttgaacatctggtgcaaaagatgaaaacaactgtgaaaaggggcttggtgttaaggaatgaaaagtgcaatgagaactataccactgacttcattttcaacctgtactctgaggaggggaagggcatcttcgacagcaggaagaatgtgcttggtcacatgcagcagggtgggagcccaaccccatttgataggaattttgccactaagatgggcgccaaggctatgaactggatgtctgggaaaatcaaagagagttaccgtaatgggcggatctttgccaatactccagattcgggctgtgttctggggatgcgtaagagggctctggtcttccaaccagtggctgagctgaaggaccagacagattttgagcatcgaatccccaaggaacagtggtggctgaaactgaggcccatcctcaaaatcctagccaagtacgagattgacttggacacttcagaccatgcccacctggagcacatcacccggaagcggtccggggaagctgccgtctaaacctctctggagtgaggggaatagattacctgatcatggtcagctcacaccctaataagtccacatcttctcagtgttttagctgtttttttcattaggtttccttttattctgtaccttgcagccatgaccagttctggccaggagctggaggagcaggcagtgggtgggagctccttttaggtagaatttaacatgacttctgccccagctttatctgtcacacaaggctgggcacctctagtgctactgctagatatcacttactcagttagaattttcctaaaaataagctttatttatttctttgtgataacaaagagtcttggttcctctactacttttactacagtgacaaattgtaactacactaataaatgccaactggtcactgtg

SEQ ID NO: 334479 - DNA, 571 bp, Artificial Sequence
  derived and/or modified sequence
atttcagcttgtcagtctacaagggtgtggctttcctctggaagaagtccaaagctctcaggctgcaaagctcagacttgagtggatcatgacccatgaagagcaccatgcagccaaaaccctggggattggcaaagccattgctgtcttaacctctggtggagatgcccaaggtatgaatgctgctgtcagggctgtggttcgagttggtatcttcaccggtgcccgtgtcttctttgtccatgagggttatcaaggcctggtggatggtggagatcacatcaaggaagccacctgggagagcgtttcgatgatgcttcagctgggaggcacggtgattggaagtgcccggtgcaaggactttcgggaacgagaaggacgactccgagctgcctacaacctggtgaagcgtgggatcaccaatctctgtgtcattgggggtgatggcagcctcactggggctgacaccttccgttctgagtggagtgacttgttgagtgacctccagaaagcaggtaagatcacagatgaggaggctacgaagtccagctacctgaacattgtgggcctg

SEQ ID NO: 334480 - DNA, 762 bp, Artificial Sequence
  derived and/or modified sequence
ggtagtagataaaaggctttatatgaatattacaagaatcaccaccactccaaatataataagtgtaccaaatatgaagtaaaatgactttaacaaggctgacttgaaagtgataaagaagcaagttactgctaacaagatagtggaaatactgcacaggcaccgataaacagaaatcaccaagctcaaggaaagagaaacgaggcatagatccagagatcacgttagggtacaccaagaaagagacggttcaagggaattaccaggaggcgatgagccagagtggatcatgacccatgaagagcaccatgcagccaaaaccctggggattggcaaagccattgctgtcttaacctctggtggagatgcccaaggtatgaatgctgctgtcagggctgtggttcgagttggtatcttcaccggtgcccgtgtcttctttgtccatgagggttatcaaggcctggtggatggtggagatcacatcaaggaagccacctgggagagcgtttcgatgatgcttcagctgggaggcacggtgattggaagtgcccggtgcaaggactttcgggaacgagaaggacgactccgagctgcctacaacctggtgaagcgtgggatcaccaatctctgtgtcattgggggtgatggcagcctcactggggctgacaccttccgttctgagtggagtgacttgttgagtgacctccagaaagcaggtaagatcacagatgaggaggctacgaagtccagctacctgaacat

SEQ ID NO: 334481 - DNA, 452 bp, Artificial Sequence
  derived and/or modified sequence
accacagaaagccgagcttcccggtgaaaacagctctccccagagaagacccagctctggcgggaaagccccggaatcgcaaccggcctttccccaagtacggctgggcgctgggatggggcctgctgtaacggcagggagacggtctctccgcggcccaggagagagagaccagaaggaacggcctcagagtggatcatgacccatgaagagcaccatgcagccaaaaccctggggattggcaaagccattgctgtcttaacctctggtggagatgcccaaggtatgaatgctgctgtcagggctgtggttcgagttggtatcttcaccggtgcccgtgtcttctttgtccatgagggttatcaaggcctggtggatggtggagatcacatcaaggaagccacctgggagagcgtttcgatgatgcttcagctgggaggcacggtgattgg

SEQ ID NO: 334482 - DNA, 526 bp, Artificial Sequence
  derived and/or modified sequence
aatctgcaagaaagcagcggcggaggagagctaagactaaaaggcaagaggggccattgagtgaagagcaagggggagagctgggagtgaggtgggaagagtggatcatgacccatgaagagcaccatgcagccaaaaccctggggattggcaaagccattgctgtcttaacctctggtggagatgcccaaggtatgaatgctgctgtcagggctgtggttcgagttggtatcttcaccggtgcccgtgtcttctttgtccatgagggttatcaaggcctggtggatggtggagatcacatcaaggaagccacctgggagagcgtttcgatgatgcttcagctgggaggcacggtgattggaagtgcccggtgcaaggactttcgggaacgagaaggacgactccgagctgcctacaacctggtgaagcgtgggatcaccaatctctgtgtcattgggggtgatggcagcctcactggggctgacaccttccgttctgagtggagtgacttgttgagtgacctcca

SEQ ID NO: 334483 - DNA, 2797 bp, Artificial Sequence
  derived and/or modified sequence
aatatctgtctgtttttgtctacgtgcgtgtcattgtgggtctgtaagggatgcttatacatgagtctgcatgaatttctgtgtcctgtgcctctataactgtcttagagatttcaggagaagaatatgagcggtttttacagagtggatcatgacccatgaagagcaccatgcagccaaaaccctggggattggcaaagccattgctgtcttaacctctggtggagatgcccaaggtatgaatgctgctgtcagggctgtggttcgagttggtatcttcaccggtgcccgtgtcttctttgtccatgagggttatcaaggcctggtggatggtggagatcacatcaaggaagccacctgggagagcgtttcgatgatgcttcagctgggaggcacggtgattggaagtgcccggtgcaaggactttcgggaacgagaaggacgactccgagctgcctacaacctggtgaagcgtgggatcaccaatctctgtgtcattgggggtgatggcagcctcactggggctgacaccttccgttctgagtggagtgacttgttgagtgacctccagaaagcaggtaagatcacagatgaggaggctacgaagtccagctacctgaacattgtgggcctggttgggtcaattgacaatgacttctgtggcaccgatatgaccattggcactgactctgccctgcatcggatcatggaaattgtagatgccatcactaccactgcccagagccaccagaggacatttgtgttagaagtaatgggccgccactgtggatacctggcccttgtcacctctctgtcctgtggggccgactgggtttttattcctgaatgtccaccagatgacgactgggaggaacacctttgtcgccgactcagcgagacaaggacccgtggttctcgtctcaacatcatcattgtggctgagggtgcaattgacaagaatggaaaaccaatcacctcagaagacatcaagaatggcagcaggatgggtgtggaagcagtgatggcacttttggaggggaccccagataccccagcctgtgtagtgagcctctctggtaaccaggctgtgcgcctgcccctcatggaatgtgtccaggtgaccaaagatgtgaccaaggccatggatgagaagaaatttgacgaagccctgaagctgagaggccggagcttcatgaacaactgggaggtgtacaagcttctagctcatgtcagacccccggtatctaagagtggttcgcacacagtggctgtgatgaacgtgggggctccggctgcaggcatgaatgctgctgttcgctccactgtgaggattggccttatccagggcaaccgagtgctcgttgtccatgatggtttcgagggcctggccaaggggcagatagaggaagctggctggagctatgttgggggctggactggccaaggtggctctaaacttgggactaaaaggactctacccaagaagagctttgaacagatcagtgccaatataactaagtttaacattcagggccttgtcatcattgggggctttgaggcttacacagggggcctggaactgatggagggcaggaagcagtttgatgagctctgcatcccatttgtggtcattcctgctacagtctccaacaatgtccctggctcagacttcagcgttggggctgacacagcactcaatactatctgcacaacctgtgaccgcatcaagcagtcagcagctggcaccaagcgtcgggtgtttatcattgagactatgggtggctactgtggctacctggctaccatggctggactggcagctggggccgatgctgcctacatttttgaggagcccttcaccattcgagacctgcaggcaaatgttgaacatctggtgcaaaagatgaaaacaactgtgaaaaggggcttggtgttaaggaatgaaaagtgcaatgagaactataccactgacttcattttcaacctgtactctgaggaggggaagggcatcttcgacagcaggaagaatgtgcttggtcacatgcagcagggtgggagcccaaccccatttgataggaattttgccactaagatgggcgccaaggctatgaactggatgtctgggaaaatcaaagagagttaccgtaatgggcggatctttgccaatactccagattcgggctgtgttctggggatgcgtaagagggctctggtcttccaaccagtggctgagctgaaggaccagacagattttgagcatcgaatccccaaggaacagtggtggctgaaactgaggcccatcctcaaaatcctagccaagtacgagattgacttggacacttcagaccatgcccacctggagcacatcacccggaagcggtccggggaagctgccgtctaaacctctctggagtgaggggaatagattacctgatcatggtcagctcacaccctaataagtccacatcttctcagtgttttagctgtttttttcattaggtttccttttattctgtaccttgcagccatgaccagttctggccaggagctggaggagcaggcagtgggtgggagctccttttaggtagaatttaacatgacttctgccccagctttatctgtcacacaaggctgggcacctctagtgctactgctagatatcacttactcagttagaattttcctaaaaataagctttatttatttctttgtgataacaaagagtcttggttcctctactacttttactacagtgacaaattgtaactacactaataaatgccaactggtcactgtg

SEQ ID NO: 334484 - DNA, 2250 bp, Artificial Sequence
  derived and/or modified sequence
atgacccacgaggagcaccacgcagccaagactctggggattggcaaagctattgctgtgctgacatccgggggagacgcacaggggatgaacgcggcagtgcgcgctgtagttcgagtagggatcttcaccggcgctagggttttcttcgtgcacgagggttatcaggggctggtggatggtggcgaccatattaaggaagccacgtgggaaagcgttagcatgatgctccagctgggcggaaccgtcattgggtcggctcgttgcaaggatttcagggaaagggaaggccgactcagagccgcatacaaccttgtaaaacggggtattactaacctctgtgttatcggcggtgatgggtcgttaactggtgcagatacctttcgttcagagtggagcgacctgctgtccgacctgcagaaagcgggtaaaattactgatgaggaagctacaaaaagctcctacttgaacatagttggcctggtaggctccatcgacaatgacttctgtggaactgatatgaccattggcacagactcagccctgcaccgcattatggaaattgttgatgccatcaccactactgcccagagccaccagaggacttttgtcctcgaagtgatggggagacactgtggatacctagccctcgttacctccctctcatgtggggctgattgggttttcattccagaatgccctccagacgatgattgggaagagcatctgtgccggaggctgtctgaaactcggactcggggttcacggctgaatatcatcatcgtcgccgaaggtgccatcgataagaacggaaagcccatcacatccgaagatattaagaatgggagccgcatgggcgtcgaagcagtgatggcgctcctcgagggaacgcccgacaccccggcttgtgtagtgtccctaagcgggaaccaggcagttcgattaccactcatggagtgcgtccaagttacaaaagacgtcactaaagctatggacgaaaaaaagttcgatgaggccctgaagcttcgcggacgtagcttcatgaataactgggaggtttataagctgctcgcccatgtccgtccccctgtgtcgaaatctggaagtcacacggttgcggtgatgaatgttggggctcccgctgccggtatgaacgccgcagttcgctcaacagtgcggatcggcctcatacagggtaaccgagtgctcgttgtacacgatggcttcgagggattggctaagggacagattgaggaagccggatggtcctatgttgggggatggaccggccagggcggatccaagttgggcactaaaaggactctgcccaaaaaatctttcgaacaaatctctgctaacattacgaagtttaacatccagggcctggtgatcattggaggatttgaggcctatactggagggcttgagctgatggagggcaggaagcagttcgacgaattgtgcatcccatttgtggtgatcccagccactgtgagcaacaacgtcccagggtcagatttttctgtcggggctgacactgcgctaaacactatttgcactacctgtgacagaatcaaacaaagtgcggctggcaccaagcggagggtgttcatcatcgagactatgggcggttactgtggttacctcgctaccatggctggcctggccgctggagccgatgccgcatacatcttcgaggaaccattcacaatccgcgacctgcaggcaaacgtcgaacatctggtacagaaaatgaaaactacagtgaagagaggcctagttctcagaaacgagaagtgcaacgagaactacactacagattttattttcaatctttactccgaagagggcaaaggaatatttgactccagaaaaaacgtgctgggccacatgcagcagggaggctccccaacgccgttcgaccgcaattttgctacaaagatgggtgctaaggccatgaactggatgtccgggaaaatcaaggagtcttacagaaacggccgaatattcgcgaacactccggactcagggtgtgtgctgggcatgaggaagcgcgctttggtttttcaaccagtggccgagctcaaagaccaaactgatttcgaacatcgtattcccaaagagcaatggtggctaaagctgaggccgatcctcaagattctggccaagtacgaaatcgacctggacacgagcgatcacgctcacctggaacatattacaagaaaacgctcaggggaagcggcagtgtag

SEQ ID NO: 334485 - DNA, 2250 bp, Artificial Sequence
  derived and/or modified sequence
atgacccacgaggaacatcacgctgcaaaaaccttgggaattgggaaagctattgcagtgctgacatccggtggagatgcacagggcatgaacgcagccgtcagggcggtggttcgagtggggatctttaccggcgcaagagtgttttttgttcatgaaggctatcaggggctggtcgatgggggagatcacataaaggaagctacatgggaaagcgtttcaatgatgttgcaactgggcggaacagtgatcggatcggcgaggtgcaaggactttcgggagcgggagggacggctgcgcgctgcctacaacctggtgaagcgcggaatcacaaacctgtgtgtgattggaggagacgggagtctgaccggggctgacaccttccgtagtgaatggtcggatctgctttctgacctgcagaaagctggtaaaatcacagatgaggaggcaactaagtccagttacctgaatatcgtcggcctggtcgggagcatcgataacgacttctgcggaaccgatatgaccattggcaccgactccgccctacacaggatcatggagatcgttgatgctatcaccactacagctcaaagccaccagcggactttcgttctggaagtaatgggacgtcattgtggctatttggctctcgtgaccagtctttcatgtggcgctgactgggttttcatacctgagtgcccacctgatgacgactgggaggagcacttgtgccgcaggttgtccgagactcggacaagaggaagccggttgaacatcatcatcgtggctgagggagcaattgataagaatggtaagcctattacatccgaggacattaagaatggttcacgcatgggcgtcgaggccgtgatggccctgctggaaggaacacccgacaccccggcatgtgtcgtcagcctctctggtaaccaggccgtccgacttcctctcatggagtgtgtacaagtgacaaaggacgttaccaaggccatggacgagaagaagttcgacgaagccctgaaactgagaggtcggagttttatgaataattgggaagtgtataagctgctggcccatgtgcgtcctcccgtctcaaagtcagggtcccacaccgtagccgttatgaacgtcggcgcaccagcggctgggatgaacgctgccgtgcgctccaccgttaggattgggctcattcagggcaatcgcgtgctcgtagtgcatgacggattcgaaggacttgccaagggacagattgaggaagccggatggtcttatgtgggcggatggacaggacagggagggtccaagttgggcacgaagcggactctgcctaagaaaagttttgagcagataagcgccaatatcactaaatttaacatccagggacttgtgattataggcggatttgaagcttacacggggggtcttgaattgatggaaggacgaaagcagttcgacgagctttgcattcccttcgtggttattccagcaacagtgtcaaacaatgtaccgggaagtgattttagcgtgggcgcagacacggccctgaatactatttgcaccacatgcgatcgtatcaaacagagtgctgccggtaccaagaggagagtttttattatagaaactatgggagggtattgcgggtacctggctacaatggcgggtctggccgcaggggctgatgcagcatacatcttcgaagaaccatttacaatacgcgatctgcaggccaatgtagagcacttggtgcagaagatgaaaactaccgtgaagaggggattggtgctgagaaatgagaaatgcaatgaaaactacaccactgactttatctttaacctttatagtgaggaaggaaaggggatctttgactcccgcaagaacgttttggggcacatgcagcagggagggtcgccaaccccatttgatagaaactttgccaccaagatgggggcaaaagccatgaattggatgtcaggcaaaatcaaggaatcttaccggaacgggagaatctttgccaatactcccgactcaggctgtgttctaggcatgcggaagcgggctcttgtgttccagcccgtggctgagctgaaagatcagacggactttgaacaccgaatccctaaagaacagtggtggcttaaactgcgccctattctgaagatactggctaagtatgaaatcgacctggatacatccgaccacgcccatcttgaacatattacacgaaagcgaagcggggaggccgcagtgtag

SEQ ID NO: 334486 - DNA, 2250 bp, Artificial Sequence
  derived and/or modified sequence
atgacccacgaggagcaccacgccgccaagaccctgggcatcggcaaggccatcgccgtgctgaccagcggcggcgacgcccagggcatgaacgccgccgtgagagccgtggtgagagtgggcatcttcaccggcgccagagtgttcttcgtgcacgagggctaccagggcctggtggacggcggcgaccacatcaaggaggccacctgggagagcgtgagcatgatgctgcagctgggcggcaccgtgatcggcagcgccagatgcaaggacttcagagagagagagggcagactgagagccgcctacaacctggtgaagagaggcatcaccaacctgtgcgtgatcggcggcgacggcagcctgaccggcgccgacaccttcagaagcgagtggagcgacctgctgagcgacctgcagaaggccggcaagatcaccgacgaggaggccaccaagagcagctacctgaacatcgtgggcctggtgggcagcatcgacaacgacttctgcggcaccgacatgaccatcggcaccgacagcgccctgcacagaatcatggagatcgtggacgccatcaccaccaccgcccagagccaccagagaaccttcgtgctggaggtgatgggcagacactgcggctacctggccctggtgaccagcctgagctgcggcgccgactgggtgttcatccccgagtgcccccccgacgacgactgggaggagcacctgtgcagaagactgagcgagaccagaaccagaggcagcagactgaacatcatcatcgtggccgagggcgccatcgacaagaacggcaagcccatcaccagcgaggacatcaagaacggcagcagaatgggcgtggaggccgtgatggccctgctggagggcacccccgacacccccgcctgcgtggtgagcctgagcggcaaccaggccgtgagactgcccctgatggagtgcgtgcaggtgaccaaggacgtgaccaaggccatggacgagaagaagttcgacgaggccctgaagctgagaggcagaagcttcatgaacaactgggaggtgtacaagctgctggcccacgtgagaccccccgtgagcaagagcggcagccacaccgtggccgtgatgaacgtgggcgcccccgccgccggcatgaacgccgccgtgagaagcaccgtgagaatcggcctgatccagggcaacagagtgctggtggtgcacgacggcttcgagggcctggccaagggccagatcgaggaggccggctggagctacgtgggcggctggaccggccagggcggcagcaagctgggcaccaagagaaccctgcccaagaagagcttcgagcagatcagcgccaacatcaccaagttcaacatccagggcctggtgatcatcggcggcttcgaggcctacaccggcggcctggagctgatggagggcagaaagcagttcgacgagctgtgcatccccttcgtggtgatccccgccaccgtgagcaacaacgtgcccggcagcgacttcagcgtgggcgccgacaccgccctgaacaccatctgcaccacctgcgacagaatcaagcagagcgccgccggcaccaagagaagagtgttcatcatcgagaccatgggcggctactgcggctacctggccaccatggccggcctggccgccggcgccgacgccgcctacatcttcgaggagcccttcaccatcagagacctgcaggccaacgtggagcacctggtgcagaagatgaagaccaccgtgaagagaggcctggtgctgagaaacgagaagtgcaacgagaactacaccaccgacttcatcttcaacctgtacagcgaggagggcaagggcatcttcgacagcagaaagaacgtgctgggccacatgcagcagggcggcagccccacccccttcgacagaaacttcgccaccaagatgggcgccaaggccatgaactggatgagcggcaagatcaaggagagctacagaaacggcagaatcttcgccaacacccccgacagcggctgcgtgctgggcatgagaaagagagccctggtgttccagcccgtggccgagctgaaggaccagaccgacttcgagcacagaatccccaaggagcagtggtggctgaagctgagacccatcctgaagatcctggccaagtacgagatcgacctggacaccagcgaccacgcccacctggagcacatcaccagaaagagaagcggcgaggccgccgtgtag

SEQ ID NO: 334487 - protein, 498 aa, Artificial Sequence
  derived and/or modified sequence
MDVTDHYEDVRKIYDDFLKNSNMLDLIDVYQKCRALTSNCENYNTVSPSQLLDFLSGKQYAVGDETDLSIPTSPTSKYNRDNEKVQLLARKIIFSYLNLLVNSKNDLAVAYILNIPDRGLGREAFTDLKHAAREKQMSIFLVATSFIRTIELGGKGYAPPPSDPLRTHVKGLSNFINFIDKLDEILGEIPNPSIAGGQILSVIKMQLIKGQNSRDPFCKAIEEVAQDLDLRIKNIINSQEGVVALSTTDISPARPKSHAINHGTAYCGRDTVKALLVLLDEEAANAPTKNKAELLYDEENTIHHHGTSILTLFRSPTQVNNSIKPLRERICVSMQEKKIKMKQTLIRSQFACTYKDDYMISKDNWNNVNLASKPLCVLYMENDLSEGVNPSVGRSTIGTSFGNVHLDRSKNEKVSRKSTSQTGNKSSKRKQVDLDGENILCDNRNEPPQHKNAKIPKKSNDSQNRLYGKLAKVAKSNKCTAKDKLISGQAKLTQFFRL

SEQ ID NO: 334488 - protein, 579 aa, Artificial Sequence
  derived and/or modified sequence
MAVFNQKSVSDMIKEFRKNWRALCNSERTTLCGADSMLLALQLSMAENNKQHSGEFTVSLSDVLLTWKYLLHEKLNLPVENMDVTDHYEDVRKIYDDFLKNSNMLDLIDVYQKCRALTSNCENYNTVSPSQLLDFLSGKQYAVGDETDLSIPTSPTSKYNRDNEKVQLLARKIIFSYLNLLVNSKNDLAVAYILNIPDRGLGREAFTDLKHAAREKQMSIFLVATSFIRTIELGGKGYAPPPSDPLRTHVKGLSNFINFIDKLDEILGEIPNPSIAGGQILSVIKMQLIKGQNSRDPFCKAIEEVAQDLDLRIKNIINSQEGVVALSTTDISPARPKSHAINHGTAYCGRDTVKALLVLLDEEAANAPTKNKAELLYDEENTIHHHGTSILTLFRSPTQVNNSIKPLRERICVSMQEKKIKMKQTLIRSQFACTYKDDYMISKDNWNNVNLASKPLCVLYMENDLSEGVNPSVGRSTIGTSFGNVHLDRSKNEKVSRKSTSQTGNKSSKRKQVDLDGENILCDNRNEPPQHKNAKIPKKSNDSQNRLYGKLAKVAKSNKCTAKDKLISGQAKLTQFFRL

SEQ ID NO: 334489 - DNA, 1740 bp, Artificial Sequence
  derived and/or modified sequence
atggctgtgttcaatcagaaaagtgtgagtgacatgatcaaagaattccgaaagaactggcgggccctgtgcaattctgaaagaaccacgctctgtggtgctgactctatgctgctggctctgcagcttagcatggctgagaataacaagcagcacagtggcgagtttactgttagcctatccgatgtgctgctcacgtggaagtatctgctccacgaaaagctgaacctgcctgtcgagaacatggatgttactgatcattatgaagacgtgaggaaaatatatgacgatttcctcaaaaactcgaatatgttggaccttatcgacgtgtaccagaagtgccgagccctgaccagtaattgtgagaactataataccgtctcccctagccagttactggacttcctgtccggtaagcagtacgctgtaggtgatgagaccgatctatcaatccccacctctcctacctctaaatataaccgggataatgagaaggttcagctgcttgcgcggaaaatcatttttagttatctgaatttgttggtaaattcaaaaaacgacttggcagtcgcctacatccttaatattcctgatagaggcctgggacgagaggcttttactgatctcaagcatgctgctcgggaaaaacagatgtccatcttcctggttgccacttcctttatccggacgatcgagctggggggcaagggctatgccccgcctccaagtgacccactgaggacgcacgttaaaggcctcagtaacttcatcaattttattgataagctggacgaaatcttgggggagatcccaaaccctagcatcgcaggaggccagatactttcagtcatcaagatgcaactaattaaaggccagaactctcgcgacccgttttgtaaggcaattgaggaagtcgctcaggatctcgacctcaggatcaagaacataatcaacagccaggaaggtgtagtcgcgctatctactactgatatttcaccagcccggcccaagtcacacgcaatcaaccacggcacagcctattgtggccgtgatactgtcaaggctctactcgtgcttttagatgaggaggcagccaacgctcccacaaagaataaggctgaactgctgtacgacgaggagaataccattcatcatcacggaacatccatactaacactgtttaggtcaccaacccaggtgaataatagcatcaaacctctgagggagaggatatgcgtgtccatgcaggaaaagaagattaagatgaagcagaccctgatcagaagccaatttgcgtgtacctacaaggacgattacatgatttctaaggataactggaataacgttaacttagcctctaaacctctctgtgtgctgtacatggagaatgatctttctgagggagtgaacccaagcgtgggtaggtccacaatcggaacctccttcgggaacgttcatctggaccggagtaagaatgagaaggttagcaggaaatcgacttcacaaacagggaacaaatctagtaagaggaaacaagtcgacctggatggagagaatatactgtgcgacaatcggaacgaacccccacagcataagaacgccaagattccaaagaagtctaacgattcacaaaatagactgtacggtaagctggccaaggttgcaaaaagcaacaaatgcactgccaaagacaagctgatcagtggacaggccaaactgacccagttctttcgcctgtag

SEQ ID NO: 334490 - DNA, 1740 bp, Artificial Sequence
  derived and/or modified sequence
atggctgtgttcaaccagaagtctgtgtctgacatgatcaaggagttcaggaagaactggagggccctgtgcaacagcgagaggaccaccctgtgtggggctgacagcatgctgctggccctgcagctgtccatggccgagaacaacaagcagcacagcggggagttcaccgtgtccctgagtgatgtgctgctgacctggaagtacctgctgcacgagaagctgaacctgcctgtggagaacatggatgtgacagaccactatgaagatgtgaggaagatctatgatgacttcctgaagaacagcaacatgctggacctgattgatgtgtaccagaagtgccgggccctgaccagcaactgtgagaactacaacacagtgagccccagccagctgctggacttcctgagcggcaagcagtatgctgtgggagatgaaacagacctgagcatccccaccagccccaccagcaagtacaacagagacaatgagaaggtgcagctgctggccaggaagatcatcttctcctacctgaacctgctggtgaacagcaagaatgacctggccgtggcctacatcctgaacatcccagaccggggcctgggccgggaggccttcacagacctgaagcacgccgcccgggagaagcagatgagcatcttcctggtggccaccagcttcatccgcaccatcgagctgggcggcaagggctacgcccctcctccaagtgaccccctgcggacccacgtgaagggcctgagcaacttcatcaacttcatcgacaagctggatgagatcctgggggagatccccaaccccagcattgctgggggccagatcctgagcgtcatcaagatgcagctgatcaagggccagaacagccgggaccccttctgcaaggccatcgaggaggtggcccaggacctggacctgcgcatcaagaacatcatcaacagccaggagggcgtggtggccctgagcaccacagacatcagccctgcccggcccaagagccacgccatcaaccacggcacagcctactgcggccgggacacagtgaaggccctgctggtgctgctggatgaggaggccgccaatgcccccaccaagaacaaggccgagctgctgtatgatgaggagaacaccatccaccaccacggcaccagcatcctgaccctcttccgcagccccacccaggtgaacaacagcatcaagcccctgcgggagcgcatctgtgtgtccatgcaggagaagaagatcaagatgaagcagaccctcatccgcagccagtttgcctgcacctacaaggatgactacatgatcagcaaggacaactggaacaacgtgaacctggccagcaagcccctgtgtgtgctgtacatggagaatgacctgtctgagggcgtgaaccccagcgtgggccgcagcaccatcggcaccagctttggaaatgtgcacctggacaggagcaagaatgagaaggtgtccaggaagagcaccagccagacaggcaacaagagcagcaagaggaagcaggtggacctggatggagagaacatcctgtgtgacaacagaaatgagcccccccagcacaagaatgccaagatccccaagaagagcaatgacagccagaaccggctgtatggcaagctggccaaggtggccaagagcaacaagtgcacagccaaggacaagctgatcagcggccaggccaagctgacccagttcttccggctgtag

SEQ ID NO: 334491 - DNA, 1740 bp, Artificial Sequence
  derived and/or modified sequence
atggccgtgttcaaccagaagagcgtgagcgacatgatcaaggagttccgtaagaactggcgtgccctttgcaactcggagcggaccaccctctgcggagctgattctatgctgcttgccctgcaactgtcaatggctgagaataataagcagcacagtggcgagtttaccgtttcgctgtcagatgtcctgctgacgtggaagtatctgcttcacgagaagcttaatcttcctgttgaaaacatggatgtgacagaccactacgaggacgttcggaagatttatgacgacttcctgaagaatagcaatatgttggatttaattgacgtgtatcaaaaatgtcgagccttgacttcgaattgtgaaaattacaataccgtgtctccatcccagctcctggattttctgtcaggtaagcaatacgccgttggcgatgaaactgacttaagtatacctacctctccaaccagtaagtacaatagggacaatgaaaaggtgcagctcctggcacgaaaaatcatatttagttaccttaatcttctggtgaactcgaaaaacgatctcgccgtcgcctatatcttgaatatccccgataggggtttgggaagggaggcttttaccgatcttaagcacgccgcaagagagaagcagatgtcaatctttctagtcgccacatctttcattcgcacaatcgagctcggtggcaaaggatatgctccacctccatccgaccctctaagaacccacgtgaaggggctctccaattttattaatttcattgacaaactagacgagattttgggagaaatccccaatccaagcatcgctggcggccagatcctgagtgtgattaagatgcagttgatcaaggggcagaattcccgggatcctttttgcaaagcgatcgaggaagtcgcacaggacttggatttgagaataaagaacattattaactctcaggagggagtcgtggcgttgtctacaacagacatctcccctgcacgccccaaaagccacgcgattaatcacgggaccgcttattgcgggcgtgacactgtcaaagcgttgttggtgctcctggacgaggaagccgctaacgcaccaaccaagaacaaagccgagctactttatgatgaggagaacacaatccaccatcacgggacctccatcctgaccctgtttagaagccccacccaggtgaataatagtattaagcctctacgggagaggatctgcgttagcatgcaagagaaaaaaataaagatgaagcagacacttattaggagccagttcgcctgcacttacaaggatgactatatgatctctaaggataactggaacaacgtcaatctagcctccaaacctctctgcgtgctctacatggagaacgacttgagcgagggagtgaatccctctgtgggcaggtctacaatcggcacctcatttgggaacgtacatctggacaggtcaaagaatgaaaaggtgtcgagaaaatccaccagccagactggaaataagtcttctaagcgcaaacaggtggacctggatggggaaaatattttgtgcgacaacaggaatgagcccccacagcataaaaacgccaaaatccctaaaaagtctaatgactcccagaacaggctgtacggcaaactggcaaaggtcgcaaagtcgaacaagtgcactgctaaggacaaactgatcagcggccaagccaagctgactcagttttttagactgtag

SEQ ID NO: 334492 - DNA, 1740 bp, Artificial Sequence
  derived and/or modified sequence
atggccgtcttcaaccaaaagtctgtatctgacatgattaaagaattccgcaagaattggagggccctctgcaactccgaacggactacactctgcggggcagactcaatgcttttggccctccagctttccatggctgagaacaataagcagcacagtggggaattcactgtctctctgtccgatgtcctactgacatggaaatatctacttcatgagaaactaaatttgcctgttgagaatatggacgtgacagatcattatgaggatgttaggaaaatttatgacgacttcttgaagaacagcaacatgctggatctgatagacgtgtaccagaaatgccgcgctttaacgagcaactgcgagaactataacaccgtctccccctctcagctgctggacttcctgagcgggaagcagtacgcggtgggggacgaaacagatcttagcatccccacatcgccgacatcgaaatataacagggacaacgaaaaagtgcagctgctcgcgaggaaaattatattcagttacctgaacctgctcgtcaatagtaagaacgatttagccgtggcctatatccttaatataccagaccggggtctgggtcgtgaagctttcacggatcttaagcacgcggctcgggagaagcagatgtccatttttttggtggcaacttcctttatccgcactattgaactgggcggaaagggctacgcacctccccctagcgaccctcttagaacccacgtgaaaggactttcaaacttcatcaatttcatcgataaactggatgagatcctgggcgaaatccccaacccgagcatcgctggtgggcagatcttgtctgtaatcaaaatgcagctcatcaaaggccagaatagccgggaccccttttgcaaggcaatagaggaggtggctcaggacctggatctgagaattaagaacattatcaatagccaggagggcgtggtggcccttagcacaaccgacataagccctgcgagaccaaagtcccacgccattaatcacggtaccgcgtactgtggaagagacacagtcaaggccttactggtcttactggacgaggaagccgctaacgcacctaccaagaataaggctgaattgctgtacgatgaggagaacaccatccatcaccatggcacctctattctgacactcttcagatcaccaacccaggtaaataattctatcaagcctttgagggagcgcatatgcgtctcaatgcaggagaaaaagatcaaaatgaagcagacgttaattagatcacagttcgcttgtacgtataaggatgactacatgatatccaaggacaattggaataacgtgaacctggcctcaaaaccactttgcgttttgtacatggagaacgacctgtcggagggtgtcaatccgtcagtgggtagaagcacaatcggtacaagctttggcaatgtgcacctggacagaagtaagaacgagaaagtcagtcggaagagcacgagccagacgggcaacaaatcaagcaaacgtaagcaggtcgatctggatggcgaaaacattttgtgtgacaaccgcaacgagccaccccagcacaaaaacgccaaaatacccaagaagtctaacgattctcaaaatcgtctgtacgggaagctggctaaggttgctaaatcaaacaagtgtactgcaaaggacaagctgattagtggacaggccaaactgacccagttttttcgactgtag

SEQ ID NO: 334493 - DNA, 3189 bp, Artificial Sequence
  derived and/or modified sequence
gaactgtattcagcggcgacagcggcgactgcggcggccgcgggagggcatcccgttggggatccttccgcacactgaagagtacgtcttcgggtctacccctaatcacataatggctgtgtttaatcagaagtctgtctcggatatgattaaagagtttcgaaaaaattggcgtgctctttgtaactctgagagaactactctatgtggtgcagactccatgctcttggcattgcagctttctatggcggagaacaacaaacaggagagacggggtttcaccatgttagccaggatggtctcgatctcctgacttcgtgatccacccgcctcggcctcccaaagtgctaaaattacaggcgtgaaccaccaccacagtggagaatttacagtctctctcagtgatgttttattgacatggaaatacttgctccatgagaaattgaacttaccagttgaaaacatggacgtgactgaccattatgaggacgttaggaagatttatgatgatttcttgaagaacagtaatatgttagatctgattgatgtttatcaaaaatgtagggctttgacttctaattgtgaaaattataacacagtatctcctagtcaactactggattttctgtctggcaaacagtatgcagtaggtgatgaaactgatctttctataccaacatcaccaacaagtaaatacaaccgtgataatgaaaaggtgcagctgctagcaaggaaaattatcttttcatatttaaatctgctagtgaattcaaagaatgacctggctgtggcttatattctcaatattcctgatagaggactaggaagagaagccttcactgatttgaaacatgctgctcgagagaaacaaatgtctatctttttggtggccacgtcttttattagaacaatagagcttggagggaaaggatatgcaccaccaccatcagatcctttaaggacacatgtaaagggattgtctaattttattaatttcattgacaaattagatgagattcttggagaaataccaaacccaagcattgcagggggtcaaatactgtcagtgataaagatgcaactgattaaaggccaaaacagcagggatcctttttgcaaagcaatagaggaagttgctcaggatttggatttgaggattaaaaatattatcaattctcaagaaggtgttgtagctcttagcaccactgacatcagtcctgctcggccaaaatctcatgccataaaccatggtactgcatactgtggcagagatactgtgaaagccttattagttcttttggacgaagaagcagctaatgctcctaccaaaaacaaagcagagcttttatatgatgaggaaaacacaatccatcatcatggaacgtctattcttacactttttaggtctcccacacaggtgaataattcgataaaacccctaagagaacgcatctgtgtgtcaatgcaagagaaaaaaattaagatgaagcaaactttaattagatcccaatttgcttgtacttataaagatgactacatgataagcaaggataattggaataatgttaatttagcatcaaagcctttgtgtgttctttacatggaaaatgacctttctgagggtgtaaatccatctgttggaagatcaacaattggaacgagttttggaaatgttcatctggacagaagtaaaaatgaaaaagtatcaagaaaatcaaccagtcagacaggaaataaaagctcaaaaaggaaacaggtggatttggatggtgaaaatattctctgtgataatagaaatgaaccacctcaacataaaaatgctaaaatacctaagaaatcaaatgattcacagaatagattgtacggcaaactagctaaagtagcaaaaagtaataaatgtactgccaaggacaagttgatttctggccaggcaaagttaactcagttttttagactataaatttgtgtcttatatgctttaggtttatgtatctataaaccattcaccaaagacatgcttaatttttaagagatcaaggtgtaaattatgatgatttattattttggtctacagtgtatgtaaggttagtatgttaagcattgtttaaaaatactagtaagtcataattatgcagaattttcacaaagtttaatgcacagagaaagcatatcatttcagttactgatacatcttaacactactttcttttaaaacagacatttaacatacacaagttatagtagcagtatgggcttctcctcccattggcaattaaatgcttttattttcttctgaaaagatgatgtggaccaacaggtatcagacttgccaacaaggtcggtagactcttcccagcatacatctgagcactgaaggaagaagaaagtttaaattgtttaaaggactataattatcacacaaaatttattaagaaaaaaagaatggatctagtataactaattctgagtaaaccaaaatgataataattaattgttgctatttaatcccacatttttggcaggtgtaattgagccatggtcttatttgattttgttatgattgcatccaaattcactttaactcagagttctgtttaatggtggtaggatgtaagaattgaattttgaaaagactactcactgtcaaaatctctccttcctataggaaatttagctgagttttcttcatccccaatttctctcttttcttgtgttgattcagtattctgaactccattctcagctgggaaagctacagatccttttagtgcaagataaggttttatagccagattcagtggcagaccatgatttaagaaattatgtttggagcctgtgttctgtaaagagaaggttgatttggtttttagctatcgtattcggagtggaactataatacaattgtataatattcttgttgatcaattcaaagttactctgcactgtttttgactttttaaaaataccttagatgcaaatttataggagaaaaaacactttcagataagaggtgtttgctgggatggaagaactacctggcatgtaagaaatatcgtcagtcgtcctaatgcatattgtgactgtttgcatatacttctgtttataaaagtatcagttttacttttcagaggatttgtaagaatcatttaaattttcattgaaataaacgacaagtcacattgccactta

SEQ ID NO: 334494 - DNA, 2086 bp, Artificial Sequence
  derived and/or modified sequence
ccgcacactgaagagtacgtcttcgggtctacccctaatcacataatggctgtgtttaatcagaagtctgtctcggatatgattaaagagtttcgaaaaaattggcgtgctctttgtaactctgagagaactactctatgtggtgcagactccatgctcttggcattgcagctttctatggcggagaacaacaaacagcacagtggagaatttacagtctctctcagtgatgttttattgacatggaaatacttgctccatgagaaattgaacttaccagttgaaaacatggacgtgactgaccattatgaggacgttaggaagatttatgatgatttcttgaagaacagtaatatgttagatctgattgatgtttatcaaaaatgtagggctttgacttctaattgtgaaaattataacacagtatctcctagtcaactactggattttctgtctggcaaacagtatgcagtaggtgatgaaactgatctttctataccaacatcaccaacaagtaaatacaaccgtgataatgaaaaggtgcagctgctagcaaggaaaattatcttttcatatttaaatctgctagtgaattcaaagaatgacctggctgtggcttatattctcaatattcctgatagaggactaggaagagaagccttcactgatttgaaacatgctgctcgagagaaacaaatgtctatctttttggtggccacgtcttttattagaacaatagagcttggagggaaaggatatgcaccaccaccatcagatcctttaaggacacatgtaaagggattgtctaattttattaatttcattgacaaattagatgagattcttggagaaataccaaacccaagcattgcagggggtcaaatactgtcagtgataaagatgcaactgattaaaggccaaaacagcagggatcctttttgcaaagcaatagaggaagttgctcaggatttggatttgaggattaaaaatattatcaattctcaagaaggtgttgtagctcttagcaccactgacatcagtcctgctcggccaaaatctcatgccataaaccatggtactgcatactgtggcagagatactgtgaaagccttattagttcttttggacgaagaagcagctaatgctcctaccaaaaacaaagcagagcttttatatgatgaggaaaacacaatccatcatcatggaacgtctattcttacactttttaggtctcccacacaggtgaataattcgataaaacccctaagagaacgcatctgtgtgtcaatgcaagagaaaaaaattaagatgaagcaaactttaattagatcccaatttgcttgtacttataaagatgactacatgataagcaaggataattggaataatgttaatttagcatcaaagcctttgtgtgttctttacatggaaaatgacctttctgagggtgtaaatccatctgttggaagatcaacaattggaacgagttttggaaatgttcatctggacagaagtaaaaatgaaaaagtatcaagaaaatcaaccagtcagacaggaaataaaagctcaaaaaggaaacaggtggatttggatggtgaaaatattctctgtgataatagaaatgaaccacctcaacataaaaatgctaaaatacctaagaaatcaaatgattcacagaatagattgtacggcaaactagctaaagtagcaaaaagtaataaatgtactgccaaggacaagttgatttctggccaggcaaagttaactcagttttttagactataaatttgtgtcttatatgctttaggtttatgtatctataaaccattcaccaaagacatgcttaatttttaagagatcaaggtgtaaattatgatgatttattattttggtctacagtgtatgtaaggttagtatgttaagcattgtttaaaaatactagtaagtcataattatgcagaattttcacaaagtttaatgcacagagaaagcatatcatttcagttactgatacatcttaacactactttcttttaaaacagacatttaacatacacaagttatagtagcagtatgggcttctcct

SEQ ID NO: 334495 - DNA, 1916 bp, Artificial Sequence
  derived and/or modified sequence
gcacactgaagagtacgtcttcgggtctacccctaatcacataatggctgtgtttaatcagaagtctgtctcggatatgattaaagagtttcgaaaaaattggcgtgctctttgtaactctgagagaactactctatgtggtgcagactccatgctcttggcattgcagctttctatggcggagaacaacaaacagtggagaatttacagtctctctcagtgatgttttattgacatggaaatacttgctccatgagaaattgaacttaccagttgaaaacatggacgtgactgaccattatgaggacgttaggaagatttatgatgatttcttgaagaacagtaatatgttagatctgattgatgtttatcaaaaatgtagggctttgacttctaattgtgaaaattataacacagtatctcctagtcaactactggattttctgtctggcaaacagtatgcagtaggtgatgaaactgatctttctataccaacatcaccaacaagtaaatacaaccgtgataatgaaaaggtgcagctgctagcaaggaaaattatcttttcatatttaaatctgctagtgaattcaaagaatgacctggctgtggcttatattctcaatattcctgatagaggactaggaagagaagccttcactgatttgaaacatgctgctcgagagaaacaaatgtctatctttttggtggccacgtcttttattagaacaatagagcttggagggaaaggatatgcaccaccaccatcagatcctttaaggacacatgtaaagggattgtctaattttattaatttcattgacaaattagatgagattcttggagaaataccaaacccaagcattgcagggggtcaaatactgtcagtgataaagatgcaactgattaaaggccaaaacagcagggatcctttttgcaaagcaatagaggaagttgctcaggatttggatttgaggattaaaaatattatcaattctcaagaaggtgttgtagctcttagcaccactgacatcagtcctgctcggccaaaatctcatgccataaaccatggtactgcatactgtggcagagatactgtgaaagccttattagttcttttggacgaagaagcagctaatgctcctaccaaaaacaaagcagagcttttatatgatgaggaaaacacaatccatcatcatggaacgtctattcttacactttttaggtctcccacacaggtgaataattcgataaaacccctaagagaacgcatctgtgtgtcaatgcaagagaaaaaaattaagatgaagcaaactttaattagatcccaatttgcttgtacttataaagatgactacatgataagcaaggataattggaataatgttaatttagcatcaaagcctttgtgtgttctttacatggaaaatgacctttctgagggtgtaaatccatctgttggaagatcaacaattggaacgagttttggaaatgttcatctggacagaagtaaaaatgaaaaagtatcaagaaaatcaaccagtcagacaggaaataaaagctcaaaaaggaaacaggtggatttggatggtgaaaatattctctgtgataatagaaatgaaccacctcaacataaaaatgctaaaatacctaagaaatcaaatgattcacagaatagattgtacggcaaactagctaaagtagcaaaaagtaataaatgtactgccaaggacaagttgatttctggccaggcaaagttaactcagttttttagactataaatttgtgtcttatatgctttaggtttatgtatctataaaccattcaccaaagacatgcttaatttttaagagatcaaggtgtaaattatgatgatttattattttggtctacagtgtatgtaaggttagtatgttaag

SEQ ID NO: 334496 - DNA, 1740 bp, Artificial Sequence
  derived and/or modified sequence
atggccgtgttcaaccagaagagcgtgagcgacatgatcaaggagttcagaaagaactggagagccctgtgcaacagcgagagaaccaccctgtgcggcgccgacagcatgctgctggccctgcagctgagcatggccgagaacaacaagcagcacagcggcgagttcaccgtgagcctgagcgacgtgctgctgacctggaagtacctgctgcacgagaagctgaacctgcccgtggagaacatggacgtgaccgaccactacgaggacgtgagaaagatctacgacgacttcctgaagaacagcaacatgctggacctgatcgacgtgtaccagaagtgcagagccctgaccagcaactgcgagaactacaacaccgtgagccccagccagctgctggacttcctgagcggcaagcagtacgccgtgggcgacgagaccgacctgagcatccccaccagccccaccagcaagtacaacagagacaacgagaaggtgcagctgctggccagaaagatcatcttcagctacctgaacctgctggtgaacagcaagaacgacctggccgtggcctacatcctgaacatccccgacagaggcctgggcagagaggccttcaccgacctgaagcacgccgccagagagaagcagatgagcatcttcctggtggccaccagcttcatcagaaccatcgagctgggcggcaagggctacgcccccccccccagcgaccccctgagaacccacgtgaagggcctgagcaacttcatcaacttcatcgacaagctggacgagatcctgggcgagatccccaaccccagcatcgccggcggccagatcctgagcgtgatcaagatgcagctgatcaagggccagaacagcagagaccccttctgcaaggccatcgaggaggtggcccaggacctggacctgagaatcaagaacatcatcaacagccaggagggcgtggtggccctgagcaccaccgacatcagccccgccagacccaagagccacgccatcaaccacggcaccgcctactgcggcagagacaccgtgaaggccctgctggtgctgctggacgaggaggccgccaacgcccccaccaagaacaaggccgagctgctgtacgacgaggagaacaccatccaccaccacggcaccagcatcctgaccctgttcagaagccccacccaggtgaacaacagcatcaagcccctgagagagagaatctgcgtgagcatgcaggagaagaagatcaagatgaagcagaccctgatcagaagccagttcgcctgcacctacaaggacgactacatgatcagcaaggacaactggaacaacgtgaacctggccagcaagcccctgtgcgtgctgtacatggagaacgacctgagcgagggcgtgaaccccagcgtgggcagaagcaccatcggcaccagcttcggcaacgtgcacctggacagaagcaagaacgagaaggtgagcagaaagagcaccagccagaccggcaacaagagcagcaagagaaagcaggtggacctggacggcgagaacatcctgtgcgacaacagaaacgagcccccccagcacaagaacgccaagatccccaagaagagcaacgacagccagaacagactgtacggcaagctggccaaggtggccaagagcaacaagtgcaccgccaaggacaagctgatcagcggccaggccaagctgacccagttcttcagactgtag

SEQ ID NO: 334497 - DNA, 1497 bp, Artificial Sequence
  derived and/or modified sequence
atggacgtgaccgaccactacgaggatgtaaggaagatttatgacgattttttgaagaattcgaacatgctggatctcatcgatgtctaccagaagtgtagggccctcacttctaactgtgagaattacaatacggtgagcccctcacagctccttgactttctgtccggcaaacaatacgccgtgggtgacgagaccgatctgtcaattcccactagccccacatctaaatacaatcgcgacaatgagaaagttcaactgttggcgcgcaagatcatcttttcatacctaaatctcctagttaacagtaaaaacgacctcgccgtcgcttacatactgaatattcccgatcgcgggttaggccgtgaagcatttaccgatctgaagcatgccgcccgagagaagcaaatgagcattttcctggtggcgacatcctttatacggaccatcgaacttggcgggaagggctacgctcctcctcctagcgaccccctgcgtacccatgtaaaagggctgtctaacttcatcaacttcatcgataagctggacgagatcctgggagaaatcccaaacccttctatagccggagggcagattttgtcagttatcaagatgcagctgattaagggccagaattctagagatccattctgcaaggccatcgaggaagtggcacaagatctggacctgcggattaagaatataattaacagtcaggaaggggtcgtcgcactctccacaactgacatatctccagcccgcccaaaaagtcatgccattaatcatggcaccgcctactgtggaagagataccgtgaaagcactgctggtgctcctggatgaggaggcggctaacgcaccgaccaaaaacaaggccgaactcctgtatgacgaagagaacactatccaccatcatggtacatctatattgaccttgttccggagccccactcaggtcaacaactcaattaaacccctgagagagagaatctgcgtctcgatgcaggagaagaagatcaaaatgaagcaaacgctcatccgctcacaattcgcttgcacctacaaagacgactacatgattagcaaggataattggaataatgttaatctcgcgtcaaagcctctgtgcgtgctctacatggaaaatgatctgtctgagggcgtgaacccctccgtgggccggtcaaccatcggtacatcctttgggaacgtgcacctggaccgcagcaaaaacgagaaagtttcacgaaagagcacttcccagacgggtaacaaatcatctaagcgcaagcaggtggacctggatggagaaaacatactctgcgacaacaggaatgagcctcctcaacacaagaacgccaaaattccaaagaagtctaacgattcccagaatcgcttatatgggaaactggcaaaagtggccaaaagcaataagtgcactgcaaaggacaagttgatcagcggccaggcaaagctgacccagttcttccgactgtag

SEQ ID NO: 334498 - DNA, 1497 bp, Artificial Sequence
  derived and/or modified sequence
atggacgtcaccgaccactatgaagatgttaggaaaatctacgatgatttccttaaaaactctaacatgttggacctcatagacgtctatcagaagtgtagagctctgacctcaaattgcgaaaactacaatacagtgagcccaagccagctcctggacttcctatccggaaagcagtatgccgtgggcgacgaaactgacctgagtatccccacttcacccacttctaagtacaaccgcgacaacgagaaggtgcaattgctggcccggaagatcattttctcttatttaaatctacttgttaactctaagaatgacctagcagtcgcctacatcctgaacatccccgaccgaggcctaggtcgggaagcattcactgacctaaaacacgctgcacgggagaaacaaatgagtatcttcctggtcgccaccagttttatcagaactattgagctcggcgggaagggctacgcaccccctccgtcagaccccctgcgtacccacgtcaagggcctcagcaacttcatcaatttcatcgacaaactagatgagatcctgggggagattcccaacccttcaatcgcaggaggccagattctgtctgttatcaaaatgcagctcatcaagggacagaacagtcgcgacccattctgtaaggccattgaagaagtcgctcaggacctcgacctgcgcatcaaaaacattatcaacagtcaagagggcgtcgttgctttaagtaccaccgatatatctccagctaggcccaaaagccacgctataaaccatgggaccgcctactgcggtagggatactgtcaaagcactgctggttctgctggacgaggaagcagcaaatgcaccaactaaaaataaggccgagctgttgtacgatgaggagaacactatccaccaccacgggacctcaatattaactcttttcagaagcccaactcaagtcaataacagcataaaaccgctcagagaacgcatttgcgtgagcatgcaggagaagaaaattaagatgaaacaaactttgatcaggagtcagtttgcgtgtacgtataaggatgattatatgatatctaaggacaactggaacaatgtgaacctggcttctaaacctttgtgcgtcttatatatggagaacgacctgagtgagggggtcaacccaagcgtgggccgtagtacaattgggaccagctttggtaacgtgcaccttgatcgaagcaaaaacgaaaaggtctctcggaagtccacatcccagacaggcaacaaatcttctaaacgaaagcaggtcgatttagacggtgagaatatcctgtgcgataatcgaaacgagcctccccagcacaaaaatgctaaaatccctaaaaaaagcaacgatagccagaatcgtctttacggaaagttagctaaagtggccaagagcaacaagtgtactgctaaggataagcttatttccgggcaggccaagctcactcaattctttcggctttag

SEQ ID NO: 334499 - DNA, 1497 bp, Artificial Sequence
  derived and/or modified sequence
atggatgtgacagaccactatgaagatgtgaggaagatctatgatgacttcctgaagaacagcaacatgctggacctgattgatgtgtaccagaagtgccgggccctgaccagcaactgtgagaactacaacacagtgagccccagccagctgctggacttcctgagcggcaagcagtatgctgtgggagatgaaacagacctgagcatccccaccagccccaccagcaagtacaacagagacaatgagaaggtgcagctgctggccaggaagatcatcttctcctacctgaacctgctggtgaacagcaagaatgacctggccgtggcctacatcctgaacatcccagaccggggcctgggccgggaggccttcacagacctgaagcatgctgcccgggagaagcagatgagcatcttcctggtggccaccagcttcatccgcaccatcgagctgggcggcaagggctacgcccccccacccagcgaccccctgcggacccacgtgaagggcctgagcaacttcatcaacttcatcgacaagctggatgagatcctgggggagatccccaaccccagcattgctgggggccagatcctgagcgtcatcaagatgcagctgatcaagggccagaacagccgggaccccttctgcaaggccatcgaggaggtggcccaggacctggacctgcgcatcaagaacatcatcaacagccaggagggcgtggtggccctgagcaccacagacatcagccctgcccggcccaagagccacgccatcaaccacggcacagcctactgcggccgggacacagtgaaggccctgctggtgctgctggatgaggaggccgccaatgcccccaccaagaacaaggccgagctgctgtatgatgaggagaacaccatccaccaccacggcaccagcatcctgaccctcttccgcagccccacccaggtgaacaacagcatcaagcccctgcgggagcgcatctgtgtgtccatgcaggagaagaagatcaagatgaagcagaccctcatccgcagccagtttgcctgcacctacaaggatgactacatgatcagcaaggacaactggaacaacgtgaacctggccagcaagcccctgtgtgtgctgtacatggagaatgacctgtctgaaggagtgaaccccagcgtgggccgcagcaccatcggcaccagctttggaaatgtgcacctggacaggagcaagaatgagaaggtgtccaggaagagcaccagccagacaggcaacaagagcagcaagaggaagcaggtggacctggatggagagaacatcctgtgtgacaacagaaatgaaccaccccagcacaagaatgccaagatccccaagaagagcaatgacagccagaaccggctgtatggcaagctggccaaggtggccaagagcaacaagtgcacagccaaggacaagctgatcagcggccaggccaagctgacccagttcttccggctgtag

SEQ ID NO: 334500 - DNA, 1497 bp, Artificial Sequence
  derived and/or modified sequence
atggacgtgaccgaccactacgaggacgtgcggaagatctacgacgactttttaaagaatagtaatatgttagatttaatcgatgtgtaccagaagtgtagagctctcacctctaactgtgagaattataatacagtctcaccgtcacagctactggatttcctgagtggcaagcagtatgccgttggggacgagacagaccttagtattcctacatctcctacctctaagtacaaccgggacaatgaaaaggtccaactgctggcgcgcaagatcattttttcatacctcaacttactggtgaattccaaaaacgacctcgccgtcgcatatatcctgaatatacctgaccgtggactaggtagagaagctttcaccgacctcaagcacgctgctagagaaaagcagatgagcatcttcctggtggctacttcattcataaggacaattgagctcggcggcaaaggctacgctccaccacctagtgatccccttcgcactcacgtgaaaggtttgagtaacttcatcaacttcattgacaaactggatgaaattctgggtgagatacctaaccccagtatcgccgggggccagattcttagcgtgattaaaatgcagttgattaagggtcaaaactcacgggatcctttctgcaaggctattgaggaggtggcacaggatctggacctgcgcattaaaaatatcatcaactctcaagagggcgttgtggccttatcaactacagacatttcgcctgcgcgtcccaagagtcatgccataaatcatgggactgcctactgtgggcgggataccgttaaggcacttctcgtgctgctcgatgaggaagctgctaacgctcccacgaaaaataaggctgagcttttgtacgacgaggagaataccattcaccaccacggcacaagcatcctgacactatttaggtcacccacccaagttaacaactctatcaagcctctcagagaaagaatatgtgtgtctatgcaagagaaaaaaattaagatgaaacaaactctcatccgctctcagttcgcctgcacctacaaagatgactatatgataagtaaagacaactggaataatgttaacctggcatctaaacccttgtgcgtgctttacatggagaacgacttatccgagggggtcaacccttccgtaggacgatccaccatcggcacctcattcggaaacgtgcatctcgatcgatccaagaatgaaaaggtttctcggaaaagtacctcacagactggcaataagtcaagcaaaaggaaacaggtagacctggatggcgaaaacatcctgtgcgataataggaacgaacccccccagcataagaatgcaaaaattcctaagaaatcaaatgactcacagaaccgtctctacggaaagctcgcgaaggtggccaagtcaaacaagtgcacggcaaaagacaagctcatttccggacaggccaaacttactcagttcttccggctgtag

SEQ ID NO: 334501 - DNA, 1497 bp, Artificial Sequence
  derived and/or modified sequence
atggacgtgaccgaccactacgaggacgtgcggaagatctacgacgactttctgaagaactctaacatgcttgatttaatagatgtttatcagaagtgccgggccctgaccagcaattgcgaaaactataatacagtgtcaccatcccaattattggattttctttctggtaagcagtacgcggtaggcgacgaaacagacctctccattcccaccagccccacgagtaagtataatcgggataatgaaaaagtgcagctgttggcacgcaagatcattttttcctacctgaatctcctggtgaactcgaaaaatgacctagcagtagcctatattctgaacattcccgaccgcgggctggggagagaagcatttactgatttaaaacacgccgcgagagagaagcagatgtctatcttcctagtcgctactagtttcatcaggaccatcgaactcggcggtaagggatacgccccccctccatcagaccccctccgcactcatgtcaaagggctttctaactttatcaactttattgacaaactggatgagatcctcggcgagataccaaatccaagcatcgccgggggccagatcttgtccgtcattaagatgcagctcatcaaaggtcagaactctcgggatccattctgcaaggccattgaggaagtggctcaagacctggatctccggattaagaatatcattaactcacaggagggcgttgtggccctgtctactacggatatatctcccgctcgccccaagagccatgccatcaaccacggcaccgcatattgcggccgcgatacggtgaaggcgctgctggtcctcctggatgaggaggcagccaatgctccaacaaagaataaagctgagctcttgtacgacgaagaaaacaccatacaccatcacggaacctcaattcttacactattcaggagcccaactcaggtgaacaattctatcaaaccactccgggagcgaatctgcgttagcatgcaggagaagaagatcaagatgaagcagaccctgattaggtctcagtttgcttgtacgtataaggacgactatatgatctcgaaagacaattggaacaatgtaaatctcgccagtaaacctttgtgtgtgctgtacatggagaacgacctgagcgaaggggtgaacccatcggtcgggcggtccacaatagggacctcatttggcaacgtccacctagaccgttcgaagaacgaaaaagtctccagaaaaagtactagccagactgggaacaagtcaagcaagagaaagcaagtggatttagacggtgagaacatcctctgtgacaaccgaaacgagcccccccagcacaaaaacgctaagattcctaagaaaagcaacgactcccagaataggttgtacggtaagctggccaaggtggcaaaaagtaacaaatgtaccgcgaaggacaagctgatcagtgggcaagctaagctcacccaattcttccgattgtag

SEQ ID NO: 334502 - DNA, 1497 bp, Artificial Sequence
  derived and/or modified sequence
atggacgttacggatcactacgaggacgtccggaagatctacgatgactttctaaaaaatagcaatatgctcgacttaatagacgtttatcagaagtgccgggcactgactagcaactgtgagaactacaataccgtgtcccccagtcaactgctggacttcctttccggcaagcaatatgctgtcggagatgagacggacctgtctatccctaccagcccaaccagtaagtataacagggacaatgaaaaggttcagcttctcgcgcgtaagatcatctttagctacttgaacctgctggtgaactcaaagaatgacttggccgtcgcatacattctcaacatcccagatcgcggtctcggacgagaagccttcactgacctgaagcacgccgctcgagagaagcagatgtcaatcttcctggtggccaccagttttatccggaccatcgagctggggggaaaaggttacgccccacccccaagtgacccactcaggacacatgtcaaaggcttaagcaatttcatcaatttcattgacaagcttgacgagatcctcggagaaattcccaatccctctatagcagggggtcagattctcagtgtgattaagatgcagcttatcaagggacagaactcgcgagaccctttttgtaaagctatcgaggaggtggcacaggatctggaccttcgcattaaaaacataattaactcccaagaaggggtggttgcactgtctacaactgacatttcacccgcacggccaaaatcccatgccatcaaccacggcaccgcttactgcggcagagatacagtgaaggctcttctggttctcctggatgaagaagcagccaacgcacctaccaaaaacaaggccgagttactttatgatgaggagaatactatccatcatcacggaacttctattctgaccctgttccgttcccccacccaggtgaataattcaattaaaccactccgggaacgaatttgcgtgagcatgcaagaaaaaaagattaagatgaaacagacactcattcgcagccaattcgcatgtacgtataaagacgactatatgatttctaaggataattggaataatgtgaacttggcctccaaacccctgtgcgtgctgtacatggagaatgacctgagtgagggagttaaccctagcgtgggaaggagtactattgggacttctttcggaaacgtccatctggatagaagtaagaacgagaaagtgagtaggaagagtactagccaaaccggcaataaatcctctaaacggaagcaggtagacctggatggggaaaatatcctttgcgataataggaacgaaccgcctcaacacaaaaacgctaagatccccaaaaagtccaatgattcccaaaaccggttgtatggcaaactggctaaggtggctaagtccaataagtgcacagcaaaggacaagcttataagcgggcaagctaaactgacccagttctttagactctag

SEQ ID NO: 334503 - DNA, 1497 bp, Artificial Sequence
  derived and/or modified sequence
atggacgttacggaccactatgaggacgtgcgaaagatatatgatgatttcctcaaaaattccaacatgctggacttgattgacgtctaccaaaagtgccgtgctctgaccagcaattgcgaaaactataacacagtcagcccgtcacagctacttgattttctgagcggcaagcaatacgctgtcggagatgaaactgacctgagcattccgaccagtccaacttctaagtataaccgagataacgaaaaggtccagctccttgcaagaaagatcatttttagctatcttaatctactcgtaaattccaaaaatgacctcgccgtggcttatatcctaaacattcccgatcggggactgggccgagaagcatttacagaccttaagcacgccgcacgggaaaaacaaatgagtatttttctggtcgcgaccagcttcatcagaacaatagaactgggtggcaagggatacgcccctccgccaagtgatcctctgaggacccacgtgaagggcctatcgaatttcatcaatttcatagataagctggacgagatcctgggagagatccccaatccatctattgctggcggacaaattctgagcgtcatcaagatgcagttgatcaaaggacaaaactcgcgggatccattctgcaaggccatcgaggaagtggcccaggacctagacctccggataaaaaacataataaactctcaggagggtgtcgtcgccctgtctaccactgacattagcccggctaggccaaagtcacatgccattaatcatgggacagcatactgtggccgagatactgttaaggcactgctcgtgctcttagatgaagaagctgctaacgcgcctactaagaacaaggctgaactcctttacgacgaggaaaatacaatacatcatcacggtaccagcattttaactttattccgcagtcccacgcaggtcaacaactcaattaagccattgagagaaaggatttgcgttagcatgcaggagaaaaagatcaaaatgaagcagaccttgatcagaagtcagtttgcatgcacctacaaagacgactacatgatttcgaaagacaattggaataacgtaaatctggcttcaaagcctctgtgtgtgctgtacatggagaacgacttgagcgagggcgtgaacccatcagtgggtcgatcaacaattggaaccagcttcgggaatgtgcacctggaccggagtaagaatgaaaaagtatcacgtaagtccacaagtcagaccggcaacaagtcgtcaaaacggaagcaagttgacctggacggagaaaacatcttgtgcgacaatcgtaacgagccaccacagcacaaaaacgccaaaattcctaagaagtccaatgactcccagaataggctctacggaaaactggctaaagtggccaaatccaataaatgcaccgcgaaagataagctcatttcaggtcaagccaaactgacacaattcttccgactctag

SEQ ID NO: 334504 - DNA, 1497 bp, Artificial Sequence
  derived and/or modified sequence
atggacgtgaccgaccactacgaggacgtgagaaagatctacgacgacttcctgaagaacagcaacatgctggacctgatcgacgtgtaccagaagtgcagagccctgaccagcaactgcgagaactacaacaccgtgagccccagccagctgctggacttcctgagcggcaagcagtacgccgtgggcgacgagaccgacctgagcatccccaccagccccaccagcaagtacaacagagacaacgagaaggtgcagctgctggccagaaagatcatcttcagctacctgaacctgctggtgaacagcaagaacgacctggccgtggcctacatcctgaacatccccgacagaggcctgggcagagaggccttcaccgacctgaagcacgccgccagagagaagcagatgagcatcttcctggtggccaccagcttcatcagaaccatcgagctgggcggcaagggctacgcccccccccccagcgaccccctgagaacccacgtgaagggcctgagcaacttcatcaacttcatcgacaagctggacgagatcctgggcgagatccccaaccccagcatcgccggcggccagatcctgagcgtgatcaagatgcagctgatcaagggccagaacagcagagaccccttctgcaaggccatcgaggaggtggcccaggacctggacctgagaatcaagaacatcatcaacagccaggagggcgtggtggccctgagcaccaccgacatcagccccgccagacccaagagccacgccatcaaccacggcaccgcctactgcggcagagacaccgtgaaggccctgctggtgctgctggacgaggaggccgccaacgcccccaccaagaacaaggccgagctgctgtacgacgaggagaacaccatccaccaccacggcaccagcatcctgaccctgttcagaagccccacccaggtgaacaacagcatcaagcccctgagagagagaatctgcgtgagcatgcaggagaagaagatcaagatgaagcagaccctgatcagaagccagttcgcctgcacctacaaggacgactacatgatcagcaaggacaactggaacaacgtgaacctggccagcaagcccctgtgcgtgctgtacatggagaacgacctgagcgagggcgtgaaccccagcgtgggcagaagcaccatcggcaccagcttcggcaacgtgcacctggacagaagcaagaacgagaaggtgagcagaaagagcaccagccagaccggcaacaagagcagcaagagaaagcaggtggacctggacggcgagaacatcctgtgcgacaacagaaacgagcccccccagcacaagaacgccaagatccccaagaagagcaacgacagccagaacagactgtacggcaagctggccaaggtggccaagagcaacaagtgcaccgccaaggacaagctgatcagcggccaggccaagctgacccagttcttcagactgtag

SEQ ID NO: 334505 - protein, 297 aa, Artificial Sequence
  derived and/or modified sequence
MAVFNQKSVSDMIKEFRKNWRALCNSERTTLCGADSMLLALQLSMAENNKQHSGEFTVSLSDVLLTWKYLLHEKLNLPVENMDVTDHYEDVRKIYDDFLKNSNMLDLIDVYQKCRALTSNCENYNTVSPSQLLDFLSGKQYAVGDETDLSIPTSPTSKYNRDNEKVQLLARKIIFSYLNLLVNSKNDLAVAYILNIPDRGLGREAFTDLKHAAREKQMSIFLVATSFIRTIELGGKGYAPPPSDPLRTHVKGLSNFINFIDKLDEILGEIPNPRGCKSICWKINNWNEFWKCSSGQK

SEQ ID NO: 334506 - DNA, 894 bp, Artificial Sequence
  derived and/or modified sequence
atggccgtgtttaaccaaaagtccgtgtcagatatgattaaagaattccgcaagaactggcgagctctctgcaacagtgagagaactactctgtgcggtgccgactccatgctgctggccctccaactcagtatggctgagaacaataagcaacactcgggcgagttcaccgtgagcctcagtgacgtgttactcacttggaagtacctccttcacgaaaaattaaacctgcccgtggaaaatatggacgtcaccgaccactacgaggacgtgaggaagatctacgatgacttcctgaagaacagcaacatgctcgacttgattgacgtgtaccagaagtgtcgcgctttaactagtaactgcgagaattacaacacggtttcaccatcacagctgttggatttcctttccggcaagcaatacgctgtgggcgacgaaacagatttgtccattcccactagccctacctctaagtataatagggataacgaaaaggtgcaactcctggcccgcaagattatcttttcctatttgaatcttctagtgaattcaaagaatgacctagccgtggcttacatcttgaatattccagatcgtgggttagggcgtgaggcgtttaccgacctcaaacacgcagctcgcgagaaacagatgtccatctttttagtagccacgtcttttatccgcacaattgaattgggaggtaaggggtatgctcctccccctagcgatccactgaggacacatgtcaaagggctgagcaattttatcaattttatcgataaactcgacgagatactcggagaaatccctaaccctcggggatgcaagtctatctgctggaagatcaataactggaacgaattttggaagtgtagcagcggccagaagtag

SEQ ID NO: 334507 - DNA, 894 bp, Artificial Sequence
  derived and/or modified sequence
atggctgtgttcaaccagaagtctgtgtctgacatgatcaaggagttcaggaagaactggagggccctgtgcaacagcgagaggaccaccctgtgtggggctgacagcatgctgctggccctgcagctgtccatggccgagaacaacaagcagcacagcggggagttcaccgtgtccctgagtgatgtgctgctgacctggaagtacctgctgcacgagaagctgaacctgcctgtggagaacatggatgtgacagaccactatgaagatgtgaggaagatctatgatgacttcctgaagaacagcaacatgctggacctgattgatgtgtaccagaagtgccgggccctgaccagcaactgtgagaactacaacacagtgagccccagccagctgctggacttcctgagcggcaagcagtatgctgtgggagatgaaacagacctgagcatccccaccagccccaccagcaagtacaacagagacaatgagaaggtgcagctgctggccaggaagatcatcttctcctacctgaacctgctggtgaacagcaagaatgacctggccgtggcctacatcctgaacatcccagaccggggcctgggccgggaggccttcacagacctgaagcacgccgcccgggagaagcagatgagcatcttcctggtggccaccagcttcatccgcaccatcgagctgggcggcaagggctacgcccctcctccaagtgaccccctgcggacccacgtgaagggcctgagcaacttcatcaacttcatcgacaagctggatgagatcctgggggagatccccaacccccggggctgcaagagcatctgctggaagatcaacaactggaatgagttctggaagtgcagcagcggccagaagtag

SEQ ID NO: 334508 - DNA, 894 bp, Artificial Sequence
  derived and/or modified sequence
atggccgtgttcaaccagaagagcgtgagcgacatgatcaaggagtttaggaagaactggagagcactgtgtaattctgagcgtactaccttatgcggagctgatagcatgctcctcgctttgcagttgagcatggctgagaacaacaaacaacattccggggaatttactgtctcactgtcggacgtcctgcttacgtggaagtatctcctgcacgagaagttgaaccttcccgtggagaatatggatgtgaccgaccactacgaggacgtgcgcaaaatctacgatgacttcctgaagaatagtaatatgttagacctgatcgacgtgtatcagaaatgtagggcgttgacatctaattgcgaaaattacaataccgttagcccttcacagttgctggactttctgagtgggaaacagtatgctgtaggggatgagaccgacctctctatcccgacctcgcccacctctaagtataacagggacaatgagaaagtgcaactgctggccaggaaaattatcttctcctacctgaacctgctggttaattccaagaacgatctggccgtggcatatatcctgaacatccctgatcggggactcggaagagaagcctttacagacctcaagcatgctgcccgcgaaaagcagatgtcaattttcttggtggccacaagtttcattaggaccatagaattgggtgggaagggctacgccccccctccatccgatccgcttagaactcacgtgaagggtctaagtaactttattaatttcatcgataagctggatgagatcttgggagagattccaaatcctagaggatgcaaaagtatctgctggaaaatcaacaactggaacgagttctggaagtgcagctcagggcagaaatag

SEQ ID NO: 334509 - DNA, 894 bp, Artificial Sequence
  derived and/or modified sequence
atggccgtgttcaatcagaagtctgtgagcgacatgatcaaggagttcagaaaaaactggcgagctttgtgcaatagcgagcgaaccacactgtgcggtgccgacagtatgctgctagctttgcagctctcgatggcagagaacaataagcagcattccggagaatttacagtctctttgagcgatgtacttctgacctggaagtatttattacatgagaagttgaacctcccagtggaaaacatggacgtgacagatcattacgaggatgtgcggaaaatttatgatgattttctgaagaactcaaacatgctcgatctgatcgacgtttatcaaaagtgccgggctcttacttctaactgcgagaactataatacagtcagcccaagtcaactcctggattttctgagcgggaaacagtacgccgtgggcgacgaaacggatctgtctattccaactagtccaacctccaagtataatcgagacaacgaaaaggtgcagttgctagctagaaagattatcttctcgtaccttaacctgctggtgaattcgaaaaatgatctggccgtggcctacatcttgaacatccctgatagaggcctcggaagggaggcgttcaccgatttgaagcacgctgcacgggaaaagcagatgagcatcttcctcgtggcaactagttttatacgtaccatcgaactaggtggaaagggctacgccccacctccaagtgatccattgcgtacccacgtcaagggactgtccaatttcattaatttcatcgataagctggatgaaattctgggagagatcccaaacccccgtggttgtaagagtatctgttggaaaataaacaattggaatgagttctggaagtgctcatccggccagaagtag

SEQ ID NO: 334510 - DNA, 2503 bp, Artificial Sequence
  derived and/or modified sequence
gaactgtattcagcggcgacagcggcgactgcggcggccgcgggagggcatcccgttggggatccttccgcacactgaagagtacgtcttcgggtctacccctaatcacataatggctgtgtttaatcagaagtctgtctcggatatgattaaagagtttcgaaaaaattggcgtgctctttgtaactctgagagaactactctatgtggtgcagactccatgctcttggcattgcagctttctatggcggagaacaacaaacagcacagtggagaatttacagtctctctcagtgatgttttattgacatggaaatacttgctccatgagaaattgaacttaccagttgaaaacatggacgtgactgaccattatgaggacgttaggaagatttatgatgatttcttgaagaacagtaatatgttagatctgattgatgtttatcaaaaatgtagggctttgacttctaattgtgaaaattataacacagtatctcctagtcaactactggattttctgtctggcaaacagtatgcagtaggtgatgaaactgatctttctataccaacatcaccaacaagtaaatacaaccgtgataatgaaaaggtgcagctgctagcaaggaaaattatcttttcatatttaaatctgctagtgaattcaaagaatgacctggctgtggcttatattctcaatattcctgatagaggactaggaagagaagccttcactgatttgaaacatgctgctcgagagaaacaaatgtctatctttttggtggccacgtcttttattagaacaatagagcttggagggaaaggatatgcaccaccaccatcagatcctttaaggacacatgtaaagggattgtctaattttattaatttcattgacaaattagatgagattcttggagaaataccaaacccaagagggtgtaaatccatctgttggaagatcaacaattggaacgagttttggaaatgttcatctggacagaagtaaaaatgaaaaagtatcaagaaaatcaaccagtcagacaggaaataaaagctcaaaaaggaaacaggtggatttggatggtgaaaatattctctgtgataatagaaatgaaccacctcaacataaaaatgctaaaatacctaagaaatcaaatgattcacagaatagattgtacggcaaactagctaaagtagcaaaaagtaataaatgtactgccaaggacaagttgatttctggccaggcaaagttaactcagttttttagactataaatttgtgtcttatatgctttaggtttatgtatctataaaccattcaccaaagacatgcttaatttttaagagatcaaggtgtaaattatgatgatttattattttggtctacagtgtatgtaaggttagtatgttaagcattgtttaaaaatactagtaagtcataattatgcagaattttcacaaagtttaatgcacagagaaagcatatcatttcagttactgatacatcttaacactactttcttttaaaacagacatttaacatacacaagttatagtagcagtatgggcttctcctcccattggcaattaaatgcttttattttcttctgaaaagatgatgtggaccaacaggtatcagacttgccaacaaggtcggtagactcttcccagcatacatctgagcactgaaggaagaagaaagtttaaattgtttaaaggactataattatcacacaaaatttattaagaaaaaaagaatggatctagtataactaattctgagtaaaccaaaatgataataattaattgttgctatttaatcccacatttttggcaggtgtaattgagccatggtcttatttgattttgttatgattgcatccaaattcactttaactcagagttctgtttaatggtggtaggatgtaagaattgaattttgaaaagactactcactgtcaaaatctctccttcctataggaaatttagctgagttttcttcatccccaatttctctcttttcttgtgttgattcagtattctgaactccattctcagctgggaaagctacagatccttttagtgcaagataaggttttatagccagattcagtggcagaccatgatttaagaaattatgtttggagcctgtgttctgtaaagagaaggttgatttggtttttagctatcgtattcggagtggaactataatacaattgtataatattcttgttgatcaattcaaagttactctgcactgtttttgactttttaaaaataccttagatgcaaatttataggagaaaaaacactttcagataagaggtgtttgctgggatggaagaactacctggcatgtaagaaatatcgtcagtcgtcctaatgcatattgtgactgtttgcatatacttctgtttataaaagtatcagttttacttttcagaggatttgtaagaatcatttaaattttcattgaaataaacgacaagtcacattgccactta

SEQ ID NO: 334511 - DNA, 894 bp, Artificial Sequence
  derived and/or modified sequence
atggccgtgttcaaccagaagagcgtgagcgacatgatcaaggagttcagaaagaactggagagccctgtgcaacagcgagagaaccaccctgtgcggcgccgacagcatgctgctggccctgcagctgagcatggccgagaacaacaagcagcacagcggcgagttcaccgtgagcctgagcgacgtgctgctgacctggaagtacctgctgcacgagaagctgaacctgcccgtggagaacatggacgtgaccgaccactacgaggacgtgagaaagatctacgacgacttcctgaagaacagcaacatgctggacctgatcgacgtgtaccagaagtgcagagccctgaccagcaactgcgagaactacaacaccgtgagccccagccagctgctggacttcctgagcggcaagcagtacgccgtgggcgacgagaccgacctgagcatccccaccagccccaccagcaagtacaacagagacaacgagaaggtgcagctgctggccagaaagatcatcttcagctacctgaacctgctggtgaacagcaagaacgacctggccgtggcctacatcctgaacatccccgacagaggcctgggcagagaggccttcaccgacctgaagcacgccgccagagagaagcagatgagcatcttcctggtggccaccagcttcatcagaaccatcgagctgggcggcaagggctacgcccccccccccagcgaccccctgagaacccacgtgaagggcctgagcaacttcatcaacttcatcgacaagctggacgagatcctgggcgagatccccaaccccagaggctgcaagagcatctgctggaagatcaacaactggaacgagttctggaagtgcagcagcggccagaagtag

SEQ ID NO: 334512 - protein, 730 aa, Artificial Sequence
  derived and/or modified sequence
MPKNSKVVKRELDDDVTESVKDLLSNEDAADDAFKTSELIVDGQEEKDTDVEEGSEVEDERPAWNSKLQYILAQVGFSVGLGNVWRFPYLCQKNGGGAYLLPYLILLMVIGIPLFFLELSVGQRIRRGSIGVWNYISPKLGGIGFASCVVCYFVALYYNVIIGWSLFYFSQSFQQPLPWDQCPLVKNASHTFVEPECEQSSATTYYWYREALNISSSISESGGLNWKMTICLLAAWVMVCLAMIKGIQSSGKIIYFSSLFPYVVLICFLIRAFLLNGSIDGIRHMFTPKLEIMLEPKVWREAATQVFFALGLGFGGVIAFSSYNKRDNNCHFDAVLVSFINFFTSVLATLVVFAVLGFKANVINEKCITQNSETIMKFLKMGNISQDIIPHHINLSTVTAEDYHLVYDIIQKVKEEEFPALHLNSCKIEEELNKAVQGTGLAFIAFTEAMTHFPASPFWSVMFFLMLVNLGLGSMFGTIEGIVTPIVDTFKVRKEILTVICCLLAFCIGLIFVQRSGNYFVTMFDDYSATLPLLIVVILENIAVCFVYGIDKFMEDLKDMLGFAPSRYYYYMWKYISPLMLLSLLIASVVNMGLSPPGYNAWIEDKASEEFLSYPTWGLVVCVSLVVFAILPVPVVFIVRRFNLIDDSSGNLASVTYKRGRVLKEPVNLEGDDTSLIHGKIPSEMPSPNFGKNIYRKQSGSPTLDTAPNGRYGIGYLMADIMPDMPESDL

SEQ ID NO: 334513 - protein, 249 aa, Artificial Sequence
  derived and/or modified sequence
MFTPKLEIMLEPKVWREAATQVFFALGLGFGGVIAFSSYNKRDNNCHFDAVLVSFINFFTSVLATLVVFAVLGFKANVINEKCITQNSETIMKFLKMGNISQDIIPHHINLSTVTAEDYHLVYDIIQKVKEEEFPALHLNSCKIEEELNKAVQGTGLAFIAFTEAMTHFPASPFWSVMFFLMLVNLGLGSMFGTIEGIVTPIVDTFKVRKEILTVICCLLAFCIGLILCNALEITLLQCLMIILLHCLC

SEQ ID NO: 334514 - protein, 623 aa, Artificial Sequence
  derived and/or modified sequence
MVIGIPLFFLELSVGQRIRRGSIGVWNYISPKLGGIGFASCVVCYFVALYYNVIIGWSLFYFSQSFQQPLPWDQCPLVKNASHTFVEPECEQSSATTYYWYREALNISSSISESGGLNWKMTICLLAAWVMVCLAMIKGIQSSGKIIYFSSLFPYVVLICFLIRAFLLNGSIDGIRHMFTPKLEIMLEPKVWREAATQVFFALGLGFGGVIAFSSYNKRDNNCHFDAVLVSFINFFTSVLATLVVFAVLGFKANVINEKCITQNSETIMKFLKMGNISQDIIPHHINLSTVTAEDYHLVYDIIQKVKEEEFPALHLNSCKIEEELNKAVQGTGLAFIAFTEAMTHFPASPFWSVMFFLMLVNLGLGSMFGTIEGIVTPIVDTFKVRKEILTVICCLLAFCIGLIFVQRSGNYFVTMFDDYSATLPLLIVVILENIAVCFVYGIDKFMEDLKDMLGFAPSRYYYYMWKYISPLMLLSLLIASVVNMGLSPPGYNAWIEDKASEEFLSYPTWGLVVCVSLVVFAILPVPVVFIVRRFNLIDDSSGNLASVTYKRGRVLKEPVNLEGDDTSLIHGKIPSEMPSPNFGKNIYRKQSGSPTLDTAPNGRYGIGYLMADIMPDMPESDL

SEQ ID NO: 334515 - DNA, 2193 bp, Artificial Sequence
  derived and/or modified sequence
atgcccaagaacagcaaggtggtgaagagagagctggacgacgacgtgaccgagagcgtgaaggacctgctgagcaacgaggacgccgccgacgacgccttcaagaccagcgagctgatcgtggacggccaggaggagaaggacaccgacgtggaggagggcagcgaggtggaggacgagagacccgcctggaacagcaagctgcagtacatcctggcccaggtgggcttcagcgtgggcctgggcaacgtgtggagattcccctacctgtgccagaagaacggcggcggcgcctacctgctgccctacctgatcctgctgatggtgatcggcatccccctgttcttcctggagctgagcgtgggccagagaatcagaagaggcagcatcggcgtgtggaactacatcagccccaagctgggcggcatcggcttcgccagctgcgtggtgtgctacttcgtggccctgtactacaacgtgatcatcggctggagcctgttctacttcagccagagcttccagcagcccctgccctgggaccagtgccccctggtgaagaacgccagccacaccttcgtggagcccgagtgcgagcagagcagcgccaccacctactactggtacagagaggccctgaacatcagcagcagcatcagcgagagcggcggcctgaactggaagatgaccatctgcctgctggccgcctgggtgatggtgtgcctggccatgatcaagggcatccagagcagcggcaagatcatctacttcagcagcctgttcccctacgtggtgctgatctgcttcctgatcagagccttcctgctgaacggcagcatcgacggcatcagacacatgttcacccccaagctggagatcatgctggagcccaaggtgtggagagaggccgccacccaggtgttcttcgccctgggcctgggcttcggcggcgtgatcgccttcagcagctacaacaagagagacaacaactgccacttcgacgccgtgctggtgagcttcatcaacttcttcaccagcgtgctggccaccctggtggtgttcgccgtgctgggcttcaaggccaacgtgatcaacgagaagtgcatcacccagaacagcgagaccatcatgaagttcctgaagatgggcaacatcagccaggacatcatcccccaccacatcaacctgagcaccgtgaccgccgaggactaccacctggtgtacgacatcatccagaaggtgaaggaggaggagttccccgccctgcacctgaacagctgcaagatcgaggaggagctgaacaaggccgtgcagggcaccggcctggccttcatcgccttcaccgaggccatgacccacttccccgccagccccttctggagcgtgatgttcttcctgatgctggtgaacctgggcctgggcagcatgttcggcaccatcgagggcatcgtgacccccatcgtggacaccttcaaggtgagaaaggagatcctgaccgtgatctgctgcctgctggccttctgcatcggcctgatcttcgtgcagagaagcggcaactacttcgtgaccatgttcgacgactacagcgccaccctgcccctgctgatcgtggtgatcctggagaacatcgccgtgtgcttcgtgtacggcatcgacaagttcatggaggacctgaaggacatgctgggcttcgcccccagcagatactactactacatgtggaagtacatcagccccctgatgctgctgagcctgctgatcgccagcgtggtgaacatgggcctgagcccccccggctacaacgcctggatcgaggacaaggccagcgaggagttcctgagctaccccacctggggcctggtggtgtgcgtgagcctggtggtgttcgccatcctgcccgtgcccgtggtgttcatcgtgagaagattcaacctgatcgacgacagcagcggcaacctggccagcgtgacctacaagagaggcagagtgctgaaggagcccgtgaacctggagggcgacgacaccagcctgatccacggcaagatccccagcgagatgcccagccccaacttcggcaagaacatctacagaaagcagagcggcagccccaccctggacaccgcccccaacggcagatacggcatcggctacctgatggccgacatcatgcccgacatgcccgagagcgacctgtag

SEQ ID NO: 334516 - DNA, 1872 bp, Artificial Sequence
  derived and/or modified sequence
atggtgatcggcatccccctgttcttcctggagctgagcgtgggccagagaatcagaagaggcagcatcggcgtgtggaactacatcagccccaagctgggcggcatcggcttcgccagctgcgtggtgtgctacttcgtggccctgtactacaacgtgatcatcggctggagcctgttctacttcagccagagcttccagcagcccctgccctgggaccagtgccccctggtgaagaacgccagccacaccttcgtggagcccgagtgcgagcagagcagcgccaccacctactactggtacagagaggccctgaacatcagcagcagcatcagcgagagcggcggcctgaactggaagatgaccatctgcctgctggccgcctgggtgatggtgtgcctggccatgatcaagggcatccagagcagcggcaagatcatctacttcagcagcctgttcccctacgtggtgctgatctgcttcctgatcagagccttcctgctgaacggcagcatcgacggcatcagacacatgttcacccccaagctggagatcatgctggagcccaaggtgtggagagaggccgccacccaggtgttcttcgccctgggcctgggcttcggcggcgtgatcgccttcagcagctacaacaagagagacaacaactgccacttcgacgccgtgctggtgagcttcatcaacttcttcaccagcgtgctggccaccctggtggtgttcgccgtgctgggcttcaaggccaacgtgatcaacgagaagtgcatcacccagaacagcgagaccatcatgaagttcctgaagatgggcaacatcagccaggacatcatcccccaccacatcaacctgagcaccgtgaccgccgaggactaccacctggtgtacgacatcatccagaaggtgaaggaggaggagttccccgccctgcacctgaacagctgcaagatcgaggaggagctgaacaaggccgtgcagggcaccggcctggccttcatcgccttcaccgaggccatgacccacttccccgccagccccttctggagcgtgatgttcttcctgatgctggtgaacctgggcctgggcagcatgttcggcaccatcgagggcatcgtgacccccatcgtggacaccttcaaggtgagaaaggagatcctgaccgtgatctgctgcctgctggccttctgcatcggcctgatcttcgtgcagagaagcggcaactacttcgtgaccatgttcgacgactacagcgccaccctgcccctgctgatcgtggtgatcctggagaacatcgccgtgtgcttcgtgtacggcatcgacaagttcatggaggacctgaaggacatgctgggcttcgcccccagcagatactactactacatgtggaagtacatcagccccctgatgctgctgagcctgctgatcgccagcgtggtgaacatgggcctgagcccccccggctacaacgcctggatcgaggacaaggccagcgaggagttcctgagctaccccacctggggcctggtggtgtgcgtgagcctggtggtgttcgccatcctgcccgtgcccgtggtgttcatcgtgagaagattcaacctgatcgacgacagcagcggcaacctggccagcgtgacctacaagagaggcagagtgctgaaggagcccgtgaacctggagggcgacgacaccagcctgatccacggcaagatccccagcgagatgcccagccccaacttcggcaagaacatctacagaaagcagagcggcagccccaccctggacaccgcccccaacggcagatacggcatcggctacctgatggccgacatcatgcccgacatgcccgagagcgacctgtag

SEQ ID NO: 334517 - DNA, 2193 bp, Artificial Sequence
  derived and/or modified sequence
atgccaaaaaactccaaggtggttaagcgggagctggacgacgatgtgacggagtccgtcaaggacctgctgagcaatgaagatgcggccgatgatgccttcaagaccagtgagctcatcgtggacggtcaagaggagaaggatactgatgtagaggagggatcggaagtagaagatgaacgccccgcgtggaattctaaactgcagtatattcttgcccaggtgggtttctccgtggggctcgggaatgtatggcgctttccctatttatgccagaagaatgggggcggggcctatttgcttccctatctgatcctgctcatggtcatcgggataccccttttctttctcgagctttcagtggggcagcgcattcggcgcgggagtattggcgtgtggaactacatcagccccaaactgggaggcattgggttcgccagttgcgtggtgtgctatttcgtggccctttattataacgtcatcatcgggtggagcctgttttatttttcacagtcgtttcagcagccactgccttgggatcagtgcccacttgtgaaaaacgcctcccacacatttgtggaacccgagtgcgagcagtcatccgccactacctactactggtaccgcgaagcgctgaacatcagcagtagtatatcagagagcggaggactgaattggaaaatgacaatatgtctcctggctgcctgggttatggtctgcctcgcaatgatcaaggggattcagtcctccgggaagataatttacttttcctcgctgttcccgtatgtagtgctgatttgtttcttgattcgcgcctttttgctgaacgggtccattgacggtatccggcatatgttcactcctaaactagagatcatgctggagccgaaggtgtggcgcgaagctgccactcaggtgtttttcgccctcggtctcggtttcggaggcgtcatagccttttctagttataacaaaagggataataactgccacttcgatgctgtgcttgtttcttttatcaatttttttacatccgtgctagccaccctcgttgtgtttgcagtgctcggctttaaagcaaacgtcataaatgagaagtgtattacacagaattcagaaaccatcatgaagtttttgaagatgggcaacatttcacaggatataattccccaccacataaatctgtctacagtgactgctgaggattaccacctggtgtatgacatcatccaaaaagtcaaagaagaggaatttccagccctccatctgaattcctgcaaaattgaagaggaactcaacaaagccgtccaagggacaggcttagcgttcattgccttcacagaggcaatgacacattttccagcatcacccttttggtcagttatgtttttcttgatgctcgtaaatctggggttggggtccatgtttggcactattgagggaatcgtgaccccaatagttgacaccttcaaagttcgcaaggagatcctgacagtcatttgttgcctgctagccttctgcataggactaatctttgtccaacgaagcggaaactacttcgtgacaatgtttgatgattatagtgctaccctgcccctgctgattgtggtgattctagagaacatcgcagtttgttttgtatatggcattgataagttcatggaggatctgaaagatatgcttggcttcgccccttcgaggtactactactatatgtggaagtatataagcccactcatgcttctctcactgctcatcgcctcagttgtgaatatggggctgtccccccctgggtataacgcctggattgaggacaaagcttccgaggaattcctgtcctaccctacttggggcctagtggtttgcgtgtccttagtggtttttgctattctgcccgttccagttgtgttcatcgtgcgcagatttaacctgattgatgactctagcggaaatctcgcctccgtgacttataaaaggggcagagtgctgaaagagccagtgaatttggagggcgatgatacctccctgatccatggaaagataccttcagaaatgccctcccctaatttcggaaagaatatttacaggaaacagagcggaagcccgacattggatacggcccctaatgggaggtacgggatcggttacttaatggccgacattatgccagatatgcccgagtccgacctttag

SEQ ID NO: 334518 - DNA, 1872 bp, Artificial Sequence
  derived and/or modified sequence
atggtgatcggtatccccttgttttttttggagctgtccgtgggccagcggattagaagagggagcatcggggtctggaactatataagtccgaagctcggcgggattgggttcgcaagttgcgtggtgtgttactttgtcgcgttgtattacaatgtcataattggatggtctctgttttatttctcccagagctttcagcagccattaccatgggatcaatgccctctggtgaaaaatgcatctcacacttttgtagaacccgagtgtgagcagagttcagccaccacctattattggtaccgcgaggccctaaatatcagcagttcaatatccgaaagcggcggactgaattggaaaatgacaatctgcctgttggcagcttgggtgatggtctgcttagcgatgattaagggcatacagtcgagtgggaaaataatctatttctcttcactgtttccttatgtggtcctgatctgtttcctcattagagcgttcctcctgaacggtagtatcgacggcatacgtcatatgtttaccccaaaactcgagattatgctggaaccaaaggtctggagggaagccgccacccaagtcttcttcgcccttgggctagggttcggcggagtgattgcattttcctcctacaataaacgcgacaacaattgtcattttgatgccgtcctggtgagcttcatcaatttttttactagtgttctggcaacgttagtggtgttcgctgttcttggattcaaggccaacgttattaatgagaaatgtattacacagaacagcgagactattatgaagtttcttaagatgggcaatatctcgcaggacattatccctcaccacattaacctgagtacggtgacggcagaggattaccacctcgtgtacgatattatccaaaaggtgaaagaggaggagttcccagccttgcacctgaattcctgcaagatcgaggaggaactgaacaaagcggtacagggcacaggcctggcttttattgcgttcactgaggccatgacccacttccctgcctcacccttctggagcgtcatgtttttcctgatgctagtgaacctgggtctgggatccatgttcggaacaattgaagggatcgtgacgcccattgtggacacctttaaagtccggaaggaaatcttgacggtcatttgctgcctactagcgttctgcatcggcttgattttcgtgcagcgcagtggcaattacttcgtgaccatgtttgatgactattccgcaaccctgccgttgttgatcgtcgttattctagaaaatatcgcagtgtgttttgtgtacgggattgataagttcatggaagatctgaaagacatgctgggatttgctccgtctaggtattattattatatgtggaagtacatttcacccctcatgctgctcagcctgctcattgcttccgtagtcaatatgggcttgtctccccctggatacaatgcatggatcgaagacaaggccagtgaagaattcctcagctacccgacctggggcctggtggtttgcgtttccctagtggttttcgctatcttgcccgtgccagttgtctttatcgtgcgtagattcaatctaattgatgattcctctggtaacctggcctccgtcacctacaaacgcgggagggttctgaaggaacccgtcaatttggaaggagatgacactagtctgatacacggaaaaattccatctgaaatgccaagtccgaacttcgggaagaacatttaccgcaagcagtccggctcgcctaccctcgacacagctcctaatggtaggtatggaattggatacctcatggccgatatcatgcccgatatgccagaaagcgacctgtag

SEQ ID NO: 334519 - DNA, 2193 bp, Artificial Sequence
  derived and/or modified sequence
atgcccaagaacagcaaggtggtgaagcgggagctggatgatgatgtgacagaatctgtgaaggacctgctgagcaatgaagatgctgctgatgatgccttcaagaccagcgagctgattgtggatggccaggaggagaaggacacagatgtggaggagggcagcgaggtggaggatgagaggcctgcctggaacagcaagctgcagtacatcctggcccaggtgggcttctctgtgggcctgggcaatgtgtggaggttcccctacctgtgccagaagaatggaggaggagcctacctgctgccctacctgatcctgctgatggtgattggcatccccctcttcttcctggagctgtctgtgggccagaggatccggcggggcagcattggagtgtggaactacatcagccccaagctgggcggcattggatttgccagctgtgtggtgtgctactttgtggccctgtactacaacgtcatcatcggctggagcctcttctacttcagccagagcttccagcagcccctgccctgggaccagtgccccctggtgaagaatgccagccacacctttgtggagccagaatgtgagcagagcagcgccaccacctactactggtaccgggaggccctgaacatcagcagcagcatcagcgagagcggcggcctgaactggaagatgaccatctgcctgctggccgcctgggtgatggtgtgcctggccatgatcaagggcatccagagcagcggcaagatcatctacttcagcagcctcttcccctacgtggtgctgatctgcttcctgatccgggccttcctgctgaatggcagcattgatggcatccgccacatgttcacccccaagctggagatcatgctggagcccaaggtgtggagggaggccgccacccaggtgttctttgccctgggcctgggctttggaggagtcatcgccttcagcagctacaacaagagggacaacaactgccactttgatgctgtgctggtgtccttcatcaacttcttcacctctgtgctggccaccctggtggtgtttgctgtgctgggcttcaaggccaacgtcatcaatgagaagtgcatcacccagaacagcgagaccatcatgaagttcctgaagatgggcaacatcagccaggacatcatcccccaccacatcaacctgagcacagtgacagctgaggactaccacctggtgtatgacatcatccagaaggtgaaggaggaggagttccctgccctgcacctgaacagctgcaagattgaggaggagctgaacaaggctgtgcagggcaccggcctggccttcatcgccttcacagaggccatgacccacttccctgccagccccttctggagcgtgatgttcttcctgatgctggtgaacctgggcctgggctccatgtttggcaccatcgagggcatcgtgacccccatcgtggacaccttcaaggtgaggaaggagatcctgaccgtcatctgctgcctgctggccttctgcatcggcctcatctttgtgcagaggagcggcaactactttgtgaccatgtttgatgactacagcgccaccctgcccctgctgattgtggtgatcctggagaacattgctgtgtgctttgtgtatggcatcgacaagttcatggaggacctgaaggacatgctgggctttgcccccagccgctactactactacatgtggaagtacatcagccccctgatgctgctgagcctgctgattgcctctgtggtgaacatgggcctgagccccccaggctacaatgcctggattgaggacaaggccagcgaggagttcctgagctaccccacctggggcctggtggtgtgtgtgtccctggtggtgtttgccatcctgcctgtgcctgtggtgttcatcgtgcggcgcttcaacctgattgatgacagcagcggcaacctggcctctgtgacctacaagaggggccgggtgctgaaggagcctgtgaacctggagggagatgacaccagcctcatccacggcaagatccccagcgagatgcccagccccaactttgggaagaacatctacaggaagcagagcggcagccccaccctggacacagccccaaatggccgctatggcatcggctacctgatggctgacatcatgccagacatgcctgagagtgacctgtag

SEQ ID NO: 334520 - DNA, 1872 bp, Artificial Sequence
  derived and/or modified sequence
atggtgattggcatccccctcttcttcctggagctgtctgtgggccagaggatcagaagaggcagcattggagtgtggaactacatcagccccaagctgggcggcatcggctttgccagctgtgtggtgtgctactttgtggccctgtactacaacgtcatcatcggctggagcctcttctacttcagccagagcttccagcagcccctgccctgggaccagtgccccctggtgaagaatgccagccacacctttgtggagccagaatgtgagcagagcagcgccaccacctactactggtaccgggaggccctgaacatcagcagcagcatcagcgagagcggcggcctgaactggaagatgaccatctgcctgctggccgcctgggtgatggtgtgcctggccatgatcaagggcatccagagcagcggcaagatcatctacttcagcagcctcttcccctacgtggtgctgatctgcttcctgatccgggccttcctgctgaatggcagcattgatggcatccgccacatgttcacccccaagctggagatcatgctggagcccaaggtgtggagggaggccgccacccaggtgttctttgccctgggcctgggctttggaggagtgattgccttcagcagctacaacaagagggacaacaactgccactttgatgctgtgctggtgtccttcatcaacttcttcacctctgtgctggccaccctggtggtgtttgctgtgctgggcttcaaggccaacgtcatcaatgagaagtgcatcacccagaacagcgagaccatcatgaagttcctgaagatgggcaacatcagccaggacatcatcccccaccacatcaacctgagcacagtgacagctgaggactaccacctggtgtatgacatcatccagaaggtgaaggaggaggagttccctgccctgcacctgaacagctgcaagattgaggaggagctgaacaaggctgtgcagggcaccggcctggccttcatcgccttcacagaggccatgacccacttccctgccagccccttctggagcgtgatgttcttcctgatgctggtgaacctgggcctgggctccatgtttggcaccatcgagggcatcgtgacccccatcgtggacaccttcaaggtgaggaaggagatcctgaccgtcatctgctgcctgctggccttctgcatcggcctcatctttgtgcagaggagcggcaactactttgtgaccatgtttgatgactacagcgccaccctgcccctgctgattgtggtgatcctggagaacattgctgtgtgctttgtgtatggaattgacaagttcatggaggacctgaaggacatgctgggctttgcccccagccgctactactactacatgtggaagtacatcagccccctgatgctgctgagcctgctgattgcctctgtggtgaacatgggcctgagccccccaggctacaatgcctggattgaggacaaggccagcgaggagttcctgagctaccccacctggggcctggtggtgtgtgtgtccctggtggtgtttgccatcctgcctgtgcctgtggtgttcatcgtgcggcgcttcaacctgattgatgacagcagcggcaacctggcctctgtgacctacaagaggggccgggtgctgaaggagcctgtgaacctggagggagatgacaccagcctcatccacggcaagatccccagcgagatgcccagccccaactttgggaagaacatctacaggaagcagagcggcagccccaccctggacacagcccccaacggccgctatggaattggctacctgatggctgacatcatgccagacatgcctgagagtgacctgtag

SEQ ID NO: 334521 - DNA, 2193 bp, Artificial Sequence
  derived and/or modified sequence
atgcccaagaacagcaaggtggtgaagcgggagctggacgacgacgttaccgagtctgtcaaagatctgcttagcaatgaagacgcagccgacgatgctttcaagacctcagagctgatcgtcgatggacaagaggaaaaggacacggacgttgaggagggctccgaggtggaagacgagcgccctgcttggaacagtaagctgcagtacatccttgcccaggtgggctttagtgttggattaggcaacgtgtggcgcttcccatatttgtgtcagaagaacggcggcggcgcctacctgctgccgtacctcatccttctgatggtgatcggtattcccctattttttcttgaattgagcgtgggccaacggatccgaagagggtccattggcgtctggaattatatcagcccgaaactgggtggtatcggcttcgcaagttgtgtcgtttgctactttgtcgctctatactacaacgtaattatcggttggagccttttctatttctctcagtccttccagcagcctctgccatgggaccaatgcccactcgtgaaaaacgcttctcatacattcgtcgaacccgaatgtgagcagtccagcgcgaccacttattattggtatagagaagcactgaatatcagcagctcgatttctgaaagtggggggctcaattggaagatgaccatctgcttactcgccgcatgggtgatggtgtgcctcgccatgattaaaggaatccagtcatcgggaaaaataatatatttctctagtcttttcccctatgtggtgctgatatgcttcctcatcagagcttttctactgaatggctcaatcgatggaataaggcacatgtttacccctaagctggagatcatgctggagcccaaggtgtggcgtgaggctgccacacaggtgttcttcgctctgggactgggatttgggggtgtgattgctttctcttcctacaacaagagagataacaactgtcacttcgacgcagtgctggtgtccttcatcaatttcttcacgtccgtcctcgcaaccctagtggttttcgcagtgcttgggtttaaagctaacgtaattaatgagaaatgcatcacacaaaacagcgagaccatcatgaagttcttaaaaatgggcaatattagccaggacattataccccatcacatcaacctgtccacagtgacagccgaggactaccatttagtatatgacatcatccagaaagtaaaggaagaagagtttccagccttgcacctgaactcctgtaaaatagaggaagagctcaataaagccgtacaaggcacgggtctggcgttcattgcattcactgaagcaatgacgcattttcctgcgtcacccttctggtccgtcatgttcttcctgatgctggtgaacctagggctcggttctatgttcggaactattgagggtatcgtgactcctatcgtagacaccttcaaggtccggaaagaaattctgacagtgatctgctgtctgctagccttttgtatagggcttatcttcgttcaacggagcgggaactactttgtgacaatgttcgatgactatagtgccaccctgccactgctgattgtggtgatcttggaaaatattgctgtctgctttgtttacggtattgacaaatttatggaggatctcaaggacatgctggggtttgcacccagccggtactattactacatgtggaaatatatatccccattaatgctgctgtccctgcttattgcgtccgtggtgaacatgggcctgtcaccacctgggtataacgcttggatcgaggataaggcatctgaggagttcttgtcttatcctacctggggtcttgtggtgtgcgtgtcactcgtggtgtttgccatcctccctgtccctgttgtcttcattgtcagaaggtttaaccttatcgatgattcgagcggcaacctagcatccgtgacgtataagcgcggtagggttcttaaagaacccgtcaatctggaaggtgacgacactagcctcattcacgggaaaatcccctctgagatgccaagccctaattttggaaagaatatctataggaagcagtctggatccccgacgctcgatacagcacccaacggcagatacggcattggttacctgatggccgatataatgccagatatgcccgaaagcgacctatag

SEQ ID NO: 334522 - DNA, 1872 bp, Artificial Sequence
  derived and/or modified sequence
atggtgatcggcatccccctgttcttcctggagctgagcgtgggccaacgcattagacgggggagtattggagtgtggaactatatctccccaaagctcgggggcatcggatttgctagctgtgtcgtgtgttactttgtcgctctctattacaacgtgatcataggttggagtctgttctattttagccagagttttcagcagcctttaccctgggaccagtgcccgctggtgaagaatgccagccataccttcgtggagcctgagtgcgagcaaagcagtgctacgacatactactggtatagggaagctttaaacatatcaagctccatttccgagtcagggggcctaaactggaaaatgaccatatgtctgttggccgcttgggtaatggtgtgtcttgcgatgattaaaggaatccaatcctcaggtaagatcatttactttagctcacttttcccatacgtggtgctaatctgtttcctgatccgggcctttcttctgaatggtagtatagacgggatccggcacatgttcacaccaaagctggaaattatgctggagccaaaagtgtggagagaggccgccactcaggtgttcttcgccctgggtttgggctttggaggcgtaattgcattctctagctacaataaacgcgacaataactgccattttgatgcggttctggtgagttttatcaacttcttcacctctgtactggccacacttgtggttttcgccgtgctgggctttaaggctaatgtgattaatgagaagtgtattactcagaacagcgaaaccatcatgaagtttctgaagatggggaacattagccaagacatcatccctcatcatatcaatctgtcaactgtgactgccgaggattaccacctggtctacgacatcattcagaaagtcaaagaggaggaattcccagcgctgcacctgaacagttgcaagattgaggaggagttgaacaaagctgtccaggggaccggccttgcatttatcgcatttaccgaggcgatgacgcacttccccgcgtctcccttttggtcagtaatgttcttcctgatgctggttaacttgggacttgggtctatgttcggcacaattgagggtattgtgactccgatcgtggatacatttaaggtgcgaaaggagattttaaccgtgatttgctgcctcctggccttttgtattggtctgatattcgtgcaacgaagcggcaattatttcgtgacaatgtttgatgactactctgcgacacttcccctgctgatagtggtcatcctcgagaacatcgccgtgtgtttcgtatacggcatagacaagttcatggaggacctgaaggacatgctgggattcgctccgagcaggtattactactacatgtggaagtatataagtcctcttatgcttttgtcacttcttatcgcatccgtggtgaatatgggtctgtcgccacccggctataatgcttggatcgaggacaaagctagcgaagagtttctatcataccccacatggggcttggtggtgtgcgtcagccttgtggtgttcgcaattctgcccgttccagtggtgtttatcgtgagaagatttaatctcattgatgattcatcagggaatctggcgtctgtgacctacaaaagaggccgcgtgcttaaggaaccagtgaatctggagggcgacgatacctccctcatccacggtaaaattccttcagaaatgccttctcctaattttggaaagaatatttacaggaagcagagcgggtccccaacattggacactgcaccaaacggtaggtatgggattggctacctgatggcagatataatgcccgatatgccggagtccgacttgtag

SEQ ID NO: 334523 - DNA, 2193 bp, Artificial Sequence
  derived and/or modified sequence
atgcctaaaaactccaaggtggttaagcgggagctggatgatgacgtgaccgagtccgtaaaagacttactgtcaaacgaggatgccgctgacgatgcatttaagactagtgaactgattgtcgatggtcaggaagaaaaggacacagatgtagaagaaggctcggaggtcgaggatgagaggccagcctggaactccaaactgcaatacattctagcccaagtaggtttctctgtaggcctggggaatgtatggcgctttccttacctctgtcagaagaacggcggaggtgcttatctgttgccgtacttgatccttctgatggtgatcggaatcccacttttcttcttggagctttcagtggggcagagaattcggaggggaagcataggagtgtggaactacatctctccaaagctcgggggaatcggattcgcgtcttgcgtggtgtgttacttcgtggcactgtactacaacgtgatcattggctggtcactgttctacttctcgcaatcttttcagcagcccctcccctgggatcaatgtcctctagtgaaaaatgcaagccatacattcgtagagccagagtgcgagcagagttcagcaaccacctactactggtaccgagaagccctcaacattagcagctctatttctgagtctgggggactgaactggaagatgacaatctgcctcctggccgcttgggttatggtttgcctggctatgataaagggcatccagtctagcgggaagattatctacttctcaagtctattcccatatgtggtactcatctgctttcttatcagggcatttctcttgaatggctcaatcgatggtatccggcatatgtttactcctaagctggaaatcatgctggagcccaaagtgtggagggaggctgctacacaggtgttttttgccctgggcctcggattcggtggcgtgatcgctttttctagctataacaaaagagacaacaactgccatttcgacgctgtgctagtttcctttataaatttctttacttcggtcctcgccacacttgtggtgtttgccgtgctggggtttaaggccaacgtgatcaacgagaaatgtattacacagaacagtgaaacaatcatgaagttcttgaaaatgggcaatatcagccaggacattatcccccaccatatcaatttatctaccgtgacagctgaagattaccacctcgtgtatgacattattcagaaagtgaaagaagaggagttcccagcattacacttgaactcttgcaaaatagaggaagagctcaacaaggccgtccagggtactgggcttgctttcatcgctttcactgaagcaatgactcatttcccggcttcacccttctggtctgttatgttctttctcatgctggtgaacctaggtctggggtcaatgttcggaactattgagggcattgtgacgcccatcgtggatacgtttaaagtgaggaaagagatacttaccgtgatatgctgtctcctagccttctgcattggcctaatttttgtgcagaggtctggtaactactttgtaaccatgttcgatgactactccgccacactgccgcttctcattgtggtgatcctggagaacattgccgtctgcttcgtctacggtatagacaaattcatggaagacctgaaagacatgctgggattcgccccttcccgttattattactatatgtggaagtacatcagcccattaatgttgctgtctctcctgatagcctctgttgttaacatgggcctttctcctccaggttacaacgcgtggattgaagacaaggcatcagaggagttcctcagttatccaacctgggggctcgtggtctgcgttagcctggtggtctttgctatcctgcctgtgccagtggtttttattgtcaggcgttttaacctcatcgatgattcaagcggaaacttggcaagcgtcacttataagaggggcagggtgctaaaagagcctgttaacttggagggcgatgacacaagcctgattcacggcaagatcccctctgagatgccatcacccaatttcgggaagaacatttacagaaagcaatccgggagtcctacactagatacggcccctaatgggaggtatggcatcggatatctcatggcggacatcatgcctgatatgccagagagcgacttatag

SEQ ID NO: 334524 - DNA, 1872 bp, Artificial Sequence
  derived and/or modified sequence
atggttatcgggattcccctgttctttttggagttgtccgtaggccagcgtattcgcaggggctccattggagtctggaactatatcagtcctaaattaggcggaatcggtttcgcctcttgcgtggtctgttacttcgtggccctctactacaacgtgattattggctggtccctgttttacttttcacaatcttttcaacagccgctcccctgggatcagtgtcctctggtgaagaatgcctcccacacatttgttgaacctgaatgtgaacaatcgtcagccacaacctactactggtatcgggaggcactgaatataagctcctcaatttcggagtcaggtgggctgaactggaaaatgaccatctgtctccttgccgcttgggtgatggtttgcctagccatgattaaaggaatacagagttcaggtaaaattatttactttagttccctctttccttacgtggttctgatttgtttcttgattcgtgcgttcttgcttaacggcagcatcgatggcatccgccacatgtttacccccaagctagagataatgctggagcctaaagtgtggagggaggccgctacccaagtattcttcgcacttggactgggcttcggcggagtgatagccttttcgagctataataagcgagataataactgtcacttcgacgccgtgctggtctccttcattaatttcttcaccagtgtgctggccacacttgtggtctttgccgttctgggtttcaaagcaaatgttattaatgagaaatgtatcacacagaacagcgagacaatcatgaaattccttaaaatgggaaacatctcacaggatataatcccccaccacatcaacctgtcgactgtcaccgccgaggactatcatctggtgtacgatatcattcagaaggtcaaggaagaggaattcccagccctccacctgaactcctgcaagatcgaggaggaactgaacaaggctgtgcaaggtaccggcctggcatttattgcttttactgaggccatgactcacttcccagcctctccattctggtccgtgatgtttttcctgatgcttgtaaacctgggtctgggatccatgtttgggaccatcgagggtatcgtgactcccattgtcgatacttttaaggtacgtaaagaaatactgacagtcatctgttgcttactagccttctgtattggcctcattttcgtccaaaggtccggtaattatttcgtgacaatgttcgacgattattctgccacgctccctttgcttattgtggtcattctggaaaacatcgccgtgtgctttgtgtacggcatagataagttcatggaagacctcaaagacatgttgggattcgctccttctaggtactattactatatgtggaaatacatctctccgcttatgctgcttagcctcctcatagcctcggtagtgaacatgggactttcccctccagggtacaacgcgtggatcgaggataaagcctctgaggaattcctgtcctatcctacctggggactggttgtatgtgtatctctggtggtcttcgcaattttacccgtgcccgtggtgtttatcgtgcgcagatttaatctgattgatgatagttctgggaacctcgcttccgtgacctataagcgcggaagagtactgaaggagcctgtgaatctagagggggacgatacctccctgatccacggcaagattccgtcagagatgcctagtccaaatttcggtaagaacatttatcgaaagcagtcagggagcccaacccttgacaccgcacccaatggcaggtacggaatcggatacttaatggcggatattatgccagatatgcccgaatccgatctgtag

SEQ ID NO: 334525 - DNA, 4044 bp, Artificial Sequence
  derived and/or modified sequence
gtaacacgggcgggccgagcacgtgggcgcctccgtcacaccctcacacatacacacacgcgcgcgcgcacacacacatacgcatgtacacgcgcacccgcacccgcgcgcctgtatcccgtgctgtttccctggcagacacacaggcgctcacgagtctctccttgccagcctgcagggcggcgacccccaaaacccagctccgggtcccaacctaggcaagaagctgcttctctgccaacagctcctcttcggcctccgtcacagccacctggaccctaccctttcgcgactgctgctgctgctgcccggacgtggaagcagcaagaggcgcttggtcaagacacactgacggtacctacagaatactggacatacggattcagaatccataaggctttatcaccttgaatcaaggatttatttgatatcatcctcggtctttacttcctatcaagtaacattgttttgaaaaatagagttaacacatttgccataagggagtttttttttttttttttaaatacttcgcatactctccaatgcccaaaaatagcaaggtggtaaaaagagaattagatgatgatgttactgagtctgtcaaagaccttctttccaatgaagacgcagctgatgatgcttttaagacaagtgaactaattgttgatggccaggaagagaaagatacagatgttgaagaaggatctgaagtcgaagatgaaagaccagcttggaacagtaaactacaatacatcctggcccaagttggattttctgtaggtttaggaaatgtgtggcgatttccatacctatgtcagaagaatgggggcggtgcatatcttttaccatatttaatactacttatggtaataggtattcccctttttttcttggaactctctgtgggtcaaagaattcggcgaggcagcattggtgtatggaattacataagccctaaactgggcgggattggatttgcaagttgtgtagtgtgctattttgtagctctctactacaacgtcatcattggctggagtttgttttatttttctcagtcttttcagcaacccctgccttgggatcagtgtcctttggtgaaaaatgcttcacacacttttgtagaaccagaatgtgaacaaagttctgccaccacctattactggtacagggaagcactgaatatttcaagttccatttctgaaagtgggggcttaaactggaagatgaccatctgcttgttggctgcctgggtcatggtttgcttggctatgatcaaaggcattcagtcttctggaaaaatcatatattttagttctctgtttccatatgtggtacttatttgcttcctcatcagagcattccttttaaatggttcaattgatggcattcgccacatgtttacccctaagcttgaaataatgctggagcccaaggtctggagagaagctgctactcaagtgttctttgccttaggtctgggatttggtggtgtcattgccttttcaagctacaacaagagagacaacaactgccactttgatgctgtcctggtgtccttcatcaattttttcacttctgtcctggcaacattggtggtgtttgcagttctgggcttcaaagcaaatgtcataaatgagaaatgcattacacaaaattcagagacgatcatgaaatttttgaaaatggggaacattagtcaggatattattccccatcatatcaacctttcaactgttactgcagaagattatcatttagtttatgacatcattcaaaaagtgaaagaagaagagtttcctgctcttcatctcaattcctgtaaaattgaagaagagctaaataaagctgttcaggggaccggcttagcttttattgcctttacagaagcgatgacacattttcctgcatctcccttctggtcagtgatgtttttcctcatgctggtcaatctaggccttggcagtatgtttggaaccattgaagggattgtcacgcctattgtggacactttcaaagtgaggaaagaaattcttactgttatctgttgtcttctggcattttgtattggcctgatatttgtgcaacgctctggaaattactttgttacaatgtttgatgattattctgctacactgcctctgctaattgtagtcattttggagaatattgctgtatgctttgtttatggcatagataagtttatggaagacctaaaagatatgctgggctttgctcccagcagatattactactatatgtggaaatatatttctcctctaatgctattatcattgctaatagctagtgttgtgaatatgggattaagtcctcctggctataacgcatggattgaagataaggcatctgaagaatttctgagctatccaacatggggactggttgtttgtgtctctctggttgtctttgcaatactcccagtccctgtagttttcattgttcgtcgcttcaaccttatagatgatagttctggtaatttagcatctgtgacctataagagaggaagggtcctgaaagagcctgtgaacttagagggcgatgatacaagcctcattcacggaaaaataccgagcgagatgccatctccaaattttggtaaaaatatttatcgaaaacagagtggatccccaactctggatactgctcccaatggacggtatggaatagggtacttgatggcagatattatgccagatatgccagaatctgatttgtagctgggggaaaagtcagtgggttttatttggttcatttttaccaatgaacattggccctagtaggagaagcattaggcttcacttatcagagggcaatctcaggtgttccgtggctgtgatctttaatcctaacagtatatgtcagttcaacttgagcattcttttggattctttggtttacatttgtgcagaaaggattgcagacaaatcttaggagggctgaggtacatgtttgccaggatttttttttaagtacctttggtgtattttcaaatatttctatctcttaaaaaaatggtattacctcagtttctaataatttctgggtttagtagtgttgacaattaaaaatggtatacattaaaatttataagtttgccttcagggtaacttccagtgtcacaatgagcagttctgtaagtgggtgcctctcagcacatttctatgaatatattatgtagataggctgtattgattttggtagcattgacaccttcttaggcaattagttgaagaaaactgcaaaatattttcttatgtaatagctgtatagagcaatagcaatcaaagcatgagaaggcactaacgctgggatgaaagatgagattcagaggtgactgagaatcatgtgagtgatggctgtatattttgtgtaaaatatatgtgtgaaaatgaactaagagtgagttactcagcactctcaagaattatgcagattctgcatttttcttatgccgtgtgcctaaaaacctacttgatatttattgtggtttcaagattattcatagtatatttatacaatatacttgcaatgcatttaagtacttaaagtactaatttgaaaacttgaagcaagatggcattttaattaatatatttctgttttgcttctgttttatgcaaatataaatcatttttaagtgattgttaaaattgtaatgcattacattttaatctacaaataaacaaagtttaaaaatgatgtttgtttttcacattgattttctttgtatcacctgaactggattgtctttcatttcagtcagcacttagacatttcataataactaaacatcacattccaagtgggatgaattacattaattgaatagagttaccaccgcttcagagtctaaggaaaaatagagtattatggttcaatggtgttcttatgtagtcttatgattcttgaaaaagtacttacagcctcccaagaaaccatgtgtacaattgactgcttgctgattcaatattgtctgcaaagtataaaagactatgatttttaaataaaactgttgtatatatgaaa

SEQ ID NO: 334526 - DNA, 2345 bp, Artificial Sequence
  derived and/or modified sequence
tttaaatggttcaattgatggcattcgccacatgtttacccctaagcttgaaataatgctggagcccaaggtctggagagaagctgctactcaagtgttctttgccttaggtctgggatttggtggtgtcattgccttttcaagctacaacaagagagacaacaactgccactttgatgctgtcctggtgtccttcatcaattttttcacttctgtcctggcaacattggtggtgtttgcagttctgggcttcaaagcaaatgtcataaatgagaaatgcattacacaaaattcagagacgatcatgaaatttttgaaaatggggaacattagtcaggatattattccccatcatatcaacctttcaactgttactgcagaagattatcatttagtttatgacatcattcaaaaagtgaaagaagaagagtttcctgctcttcatctcaattcctgtaaaattgaagaagagctaaataaagctgttcaggggaccggcttagcttttattgcctttacagaagcgatgacacattttcctgcatctcccttctggtcagtgatgtttttcctcatgctggtcaatctaggccttggcagtatgtttggaaccattgaagggattgtcacgcctattgtggacactttcaaagtgaggaaagaaattcttactgttatctgttgtcttctggcattttgtattggcctgatattgtgcaacgctctggaaattactttgttacaatgtttgatgattattctgctacactgcctctgctaattgtagtcattttggagaatattgctgtatgctttgtttatggcatagataagtttatggaagacctaaaagatatgctgggctttgctcccagcagatattactactatatgtggaaatatatttctcctctaatgctattatcattgctaatagctagtgttgtgaatatgggattaagtcctcctggctataacgcatggattgaagataaggcatctgaagaatttctgagctatccaacatggggactggttgtttgtgtctctctggttgtctttgcaatactcccagtccctgtagttttcattgttcgtcgcttcaaccttatagatgatagttctggtaatttagcatctgtgacctataagagaggaagggtcctgaaagagcctgtgaacttagagggcgatgatacaagcctcattcacggaaaaataccgagcgagatgccatctccaaattttggtaaaaatatttatcgaaaacagagtggatccccaactctggatactgctcccaatggacggtatggaatagggtacttgatggcagatattatgccagatatgccagaatctgatttgtagctgggggaaaagtcagtgggttttatttggttcatttttaccaatgaacattggccctagtaggagaagcattaggcttcacttatcagagggcaatctcaggtgttccgtggctgtgatctttaatcctaacagtatatgtcagttcaacttgagcattcttttggattctttggtttacatttgtgcagaaaggattgcagacaaatcttaggagggctgaggtacatgtttgccaggatttttttttaagtacctttggtgtattttcaaatatttctatctcttaaaaaaatggtattacctcagtttctaataatttctgggtttagtagtgttgacaattaaaaatggtatacattaaaatttataagtttgccttcagggtaacttccagtgtcacaatgagcagttctgtaagtgggtgcctctcagcacatttctatgaatatattatgtagataggctgtattgattttggtagcattgacaccttcttaggcaattagttgaagaaaactgcaaaatattttcttatgtaatagctgtatagagcaatagcaatcaaagcatgagaaggcactaacgctgggatgaaagatgagattcagaggtgactgagaatcatgtgagtgatggctgtatattttgtgtaaaatatatgtgtgaaaatgaactaagagtgagttactcagcactctcaagaattatgcagattctgcatttttcttatgccgtgtgcctaaaaacctacttgatatttattgtggtttcaagattattcatagtatatttatacaatatacttgcaatgcatttaagtacttaaagtactaatttgaaaacttgaagcaagatggcattttaattaatatatttctgttttgcttctgttttatgcaaatataaatcatttttaagtgattgttaaaattgtaatgcattacattttaatctacaaataaacaaagttt

SEQ ID NO: 334527 - DNA, 2221 bp, Artificial Sequence
  derived and/or modified sequence
acatacgcatgtacacgcgcacccgcacccgcgcgcctgtatcccgtgctgtttccctggcagacacacaggcgctcacgagtctctccttgccagcctgcagggcggcgacccccaaaacccagctccgggtcccaacctaggcaagaagctgcttctctgccaacagctcctcttcggcctccgtcacagccacctggaccctaccctttcgcgactgctgctgctgctgcccggacgtggaagcagcaagaggcgcttggtcaagacacactgacggtgcatatcttttaccatatttaatactacttatggtaataggtattcccctttttttcttggaactctctgtgggtcaaagaattcggcgaggcagcattggtgtatggaattacataagccctaaactgggcgggattggatttgcaagttgtgtagtgtgctattttgtagctctctactacaacgtcatcattggctggagtttgttttatttttctcagtcttttcagcaacccctgccttgggatcagtgtcctttggtgaaaaatgcttcacacacttttgtagaaccagaatgtgaacaaagttctgccaccacctattactggtacagggaagcactgaatatttcaagttccatttctgaaagtgggggcttaaactggaagatgaccatctgcttgttggctgcctgggtcatggtttgcttggctatgatcaaaggcattcagtcttctggaaaaatcatatattttagttctctgtttccatatgtggtacttatttgcttcctcatcagagcattccttttaaatggttcaattgatggcattcgccacatgtttacccctaagcttgaaataatgctggagcccaaggtctggagagaagctgctactcaagtgttctttgccttaggtctgggatttggtggtgtcattgccttttcaagctacaacaagagagacaacaactgccactttgatgctgtcctggtgtccttcatcaattttttcacttctgtcctggcaacattggtggtgtttgcagttctgggcttcaaagcaaatgtcataaatgagaaatgcattacacaaaattcagagacgatcatgaaatttttgaaaatggggaacattagtcaggatattattccccatcatatcaacctttcaactgttactgcagaagattatcatttagtttatgacatcattcaaaaagtgaaagaagaagagtttcctgctcttcatctcaattcctgtaaaattgaagaagagctaaataaagctgttcaggggaccggcttagcttttattgcctttacagaagcgatgacacattttcctgcatctcccttctggtcagtgatgtttttcctcatgctggtcaatctaggccttggcagtatgtttggaaccattgaagggattgtcacgcctattgtggacactttcaaagtgaggaaagaaattcttactgttatctgttgtcttctggcattttgtattggcctgatatttgtgcaacgctctggaaattactttgttacaatgtttgatgattattctgctacactgcctctgctaattgtagtcattttggagaatattgctgtatgctttgtttatggcatagataagtttatggaagacctaaaagatatgctgggctttgctcccagcagatattactactatatgtggaaatatatttctcctctaatgctattatcattgctaatagctagtgttgtgaatatgggattaagtcctcctggctataacgcatggattgaagataaggcatctgaagaatttctgagctatccaacatggggactggttgtttgtgtctctctggttgtctttgcaatactcccagtccctgtagttttcattgttcgtcgcttcaaccttatagatgatagttctggtaatttagcatctgtgacctataagagaggaagggtcctgaaagagcctgtgaacttagagggcgatgatacaagcctcattcacggaaaaataccgagcgagatgccatctccaaattttggtaaaaatatttatcgaaaacagagtggatccccaactctggatactgctcccaatggacggtatggaatagggtacttgatggcagatattatgccagatatgccagaatctgatttgtagctgggggaaaagtcagtgggttttatttggttcatttt

SEQ ID NO: 334528 - DNA, 750 bp, Artificial Sequence
  derived and/or modified sequence
atgttcacccccaagctggagatcatgctggagcccaaggtgtggagagaggccgccacccaggtgttcttcgccctgggcctgggcttcggcggcgtgatcgccttcagcagctacaacaagagagacaacaactgccacttcgacgccgtgctggtgagcttcatcaacttcttcaccagcgtgctggccaccctggtggtgttcgccgtgctgggcttcaaggccaacgtgatcaacgagaagtgcatcacccagaacagcgagaccatcatgaagttcctgaagatgggcaacatcagccaggacatcatcccccaccacatcaacctgagcaccgtgaccgccgaggactaccacctggtgtacgacatcatccagaaggtgaaggaggaggagttccccgccctgcacctgaacagctgcaagatcgaggaggagctgaacaaggccgtgcagggcaccggcctggccttcatcgccttcaccgaggccatgacccacttccccgccagccccttctggagcgtgatgttcttcctgatgctggtgaacctgggcctgggcagcatgttcggcaccatcgagggcatcgtgacccccatcgtggacaccttcaaggtgagaaaggagatcctgaccgtgatctgctgcctgctggccttctgcatcggcctgatcctgtgcaacgccctggagatcaccctgctgcagtgcctgatgatcatcctgctgcactgcctgtgctag

SEQ ID NO: 334529 - DNA, 750 bp, Artificial Sequence
  derived and/or modified sequence
atgttcactcccaagctggaaatcatgctcgagccaaaggtctggcgcgaggccgcaacacaggtgttctttgcactcggtctcgggtttgggggtgtcatagctttcagctcttataacaagcgagacaataactgtcacttcgacgccgtactagtgtccttcattaacttcttcacctccgtcctggcaacccttgttgtgttcgcagttttgggcttcaaagccaatgtcatcaacgagaaatgcatcacacagaattccgagaccatcatgaaatttctgaaaatggggaacataagccaggatattatccctcaccatattaacctgtcaaccgtaactgctgaggattatcacctcgtttacgacatcattcaaaaagtcaaagaggaggaatttccagctctccatctgaacagttgcaagatcgaggaggagctcaataaggcagtccagggcacgggtctggctttcatcgccttcaccgaagcaatgacccacttccccgccagccccttctggtccgtcatgtttttcctcatgctagttaaccttgggctgggctctatgttcggaactatcgagggaatcgtcacaccgatcgtggatacatttaaggtccgtaaggagattttgactgtgatttgttgtctgctcgccttttgtatcggtctgatcctgtgtaacgccctcgagatcacgctcttacagtgtttgatgattatcctcctgcactgtctgtgttag

SEQ ID NO: 334530 - DNA, 750 bp, Artificial Sequence
  derived and/or modified sequence
atgttcacccccaagctggagatcatgctggagcccaaggtgtggagggaggccgccacccaggtgttctttgccctgggcctgggctttggaggagtcatcgccttcagcagctacaacaagagggacaacaactgccactttgatgctgtgctggtgtccttcatcaacttcttcacctctgtgctggccaccctggtggtgtttgctgtgctgggcttcaaggccaacgtcatcaatgagaagtgcatcacccagaacagcgagaccatcatgaagttcctgaagatgggcaacatcagccaggacatcatcccccaccacatcaacctgagcacagtgacagctgaggactaccacctggtgtatgacatcatccagaaggtgaaggaggaggagttccctgccctgcacctgaacagctgcaagattgaggaggagctgaacaaggctgtgcagggcaccggcctggccttcatcgccttcacagaggccatgacccacttccctgccagccccttctggagcgtgatgttcttcctgatgctggtgaacctgggcctgggctccatgtttggcaccatcgagggcatcgtgacccccatcgtggacaccttcaaggtgaggaaggagatcctgaccgtcatctgctgcctgctggccttctgcatcggcctcatcctgtgcaatgccctggagatcaccctgctgcagtgcctgatgatcatcctgctgcactgcctgtgctag

SEQ ID NO: 334531 - DNA, 750 bp, Artificial Sequence
  derived and/or modified sequence
atgttcacccccaagctggagatcatgctggagcccaaggtgtggcgggaggccgcaactcaggtgttctttgcattggggttaggcttcgggggcgtcattgcctttagctcgtacaataagagagataataactgccatttcgatgctgtgctggtcagtttcatcaatttctttacgagtgtgctcgctacactggttgtgttcgccgtcttaggatttaaggcaaacgtgattaatgagaagtgcatcacacagaattcagagacaattatgaaatttctcaaaatgggaaacataagccaggatattattccccaccatatcaacctctctacagtgactgctgaggactaccacctggtgtatgatataatacagaaggtaaaggaagaggagttcccagcgctccatcttaactcatgtaagattgaggaggaacttaataaagccgttcaaggcacggggctcgcgttcatagcttttacggaggctatgactcatttcccggcttctcctttttggagtgtgatgtttttcctcatgctcgtgaatcttggcttgggaagtatgttcgggactatcgaggggatagttacccccatcgtcgatacgttcaaagtgcggaaggaaatcctaacagtgatctgttgcctcctggccttttgcattggattaattctctgtaacgctttagaaataaccctgcttcaatgcctaatgattattctgctccactgtctttgttag

SEQ ID NO: 334532 - DNA, 750 bp, Artificial Sequence
  derived and/or modified sequence
atgttcaccccaaaattggaaatcatgctcgaaccgaaggtgtggcgggaagccgcaacccaggtgttttttgccttggggcttggatttgggggagtcatcgccttttcctcttacaataaacgagataataattgccactttgatgcagtcctggtctcatttatcaatttcttcacatccgtgttagcaactctcgtcgtgttcgctgtgctggggttcaaggctaacgtcatcaatgaaaaatgtatcactcagaactcagagactattatgaaatttcttaagatgggaaatatatctcaggatattatccctcatcacattaatctgtccacagtgaccgccgaggactatcatctggtgtacgatatcatccagaaggtgaaggaggaggaattccctgccctccatttaaattcatgcaagatagaggaggaactgaataaggccgtgcaaggcactggcctcgcctttattgcatttacagaagcgatgacacattttccagcgagcccattttggtccgtcatgttcttcctgatgctagttaatctcggacttgggtcaatgtttggaactattgaagggatcgtgacacccatcgtggacacattcaaggttcgcaaagaaattctgacagtgatctgctgcctgcttgcattctgcattgggctaatcctctgtaatgccctcgagataactctgctgcagtgtcttatgatcatcctcctgcactgcctctgttag

SEQ ID NO: 334533 - protein, 96 aa, Artificial Sequence
  derived and/or modified sequence
MPKNSKVVKRELDDDVTESVKDLLSNEDAADDAFKTSELIVDGQEEKDTDVEEGSEVEDERPAWNSKLQYILAQVGFSVGLGNVWRFPYLCQKNGG

SEQ ID NO: 334534 - protein, 1000 aa, Artificial Sequence
  derived and/or modified sequence
MGRRTLFIGCQPKCVRTVITRECCAGFFGPQCQPCPGNAQNVCFGNGICLDGVNGTGVCECGEGFSGTACETCTEGKYGIHCDQACSCVHGRCNQGPLGDGSCDCDVGWRGVHCDNATTEDNCNGTCHTSANCLTNSDGTASCKCAAGFQGNGTICTAINACEISNGGCSAKADCKRTTPGRRVCTCKAGYTGDGIVCLEINPCLENHGGCDKNAECTQTGPNQAACNCLPAYTGDGKVCTLINVCLTKNGGCSEFAICNHTGQVERTCTCKPNYIGDGFTCRGSIYQELPKNPKTSQYFFQLQEHFVKDLVGPGPFTVFAPLSAAFDEEARVKDWDKYGLMPQVLRYHVVACHQLLLENLKLISNATSLQGEPIVISVSQSTVYINNKAKIISSDIISTNGIVHIIDKLLSPKNLLITPKDNSGRILQNLTTLATNNGYIKFSNLIQDSGLLSVITDPIHTPVTLFWPTDQALHALPAEQQDFLFNQDNKDKLKEYLKFHVIRDAKVLAVDLPTSTAWKTLQGSELSVKCGAGRDIGDLFLNGQTCRIVQRELLFDLGVAYGIDCLLIDPTLGGRCDTFTTFDASGECGSCVNTPSCPRWSKPKGVKQKCLYNLPFKRNLEGCRERCSLVIQIPRCCKGYFGRDCQACPGGPDAPCNNRGVCLDQYSATGECKCNTGFNGTACEMCWPGRFGPDCLPCGCSDHGQCDDGITGSGQCLCETGWTGPSCDTQAVLPAVCTPPCSAHATCKENNTCECNLDYEGDGITCTVVDFCKQDNGGCAKVARCSQKGTKVSCSCQKGYKGDGHSCTEIDPCADGLNGGCHEHATCKMTGPGKHKCECKSHYVGDGLNCEPEQLPIDRCLQDNGQCHADAKCVDLHFQDTTVGVFHLRSPLGQYKLTFDKAREACANEAATMATYNQLSYAQKAKYHLCSAGWLETGRVAYPTAFASQNCGSGVVGIVDYGPRPNKSEMWDVFCYRMKGSAGLFQQLSSRPCISRTPD

SEQ ID NO: 334535 - DNA, 3003 bp, Artificial Sequence
  derived and/or modified sequence
atgggcagaagaaccctgttcatcggctgccagcccaagtgcgtgagaaccgtgatcaccagagagtgctgcgccggcttcttcggcccccagtgccagccctgccccggcaacgcccagaacgtgtgcttcggcaacggcatctgcctggacggcgtgaacggcaccggcgtgtgcgagtgcggcgagggcttcagcggcaccgcctgcgagacctgcaccgagggcaagtacggcatccactgcgaccaggcctgcagctgcgtgcacggcagatgcaaccagggccccctgggcgacggcagctgcgactgcgacgtgggctggagaggcgtgcactgcgacaacgccaccaccgaggacaactgcaacggcacctgccacaccagcgccaactgcctgaccaacagcgacggcaccgccagctgcaagtgcgccgccggcttccagggcaacggcaccatctgcaccgccatcaacgcctgcgagatcagcaacggcggctgcagcgccaaggccgactgcaagagaaccacccccggcagaagagtgtgcacctgcaaggccggctacaccggcgacggcatcgtgtgcctggagatcaacccctgcctggagaaccacggcggctgcgacaagaacgccgagtgcacccagaccggccccaaccaggccgcctgcaactgcctgcccgcctacaccggcgacggcaaggtgtgcaccctgatcaacgtgtgcctgaccaagaacggcggctgcagcgagttcgccatctgcaaccacaccggccaggtggagagaacctgcacctgcaagcccaactacatcggcgacggcttcacctgcagaggcagcatctaccaggagctgcccaagaaccccaagaccagccagtacttcttccagctgcaggagcacttcgtgaaggacctggtgggccccggccccttcaccgtgttcgcccccctgagcgccgccttcgacgaggaggccagagtgaaggactgggacaagtacggcctgatgccccaggtgctgagataccacgtggtggcctgccaccagctgctgctggagaacctgaagctgatcagcaacgccaccagcctgcagggcgagcccatcgtgatcagcgtgagccagagcaccgtgtacatcaacaacaaggccaagatcatcagcagcgacatcatcagcaccaacggcatcgtgcacatcatcgacaagctgctgagccccaagaacctgctgatcacccccaaggacaacagcggcagaatcctgcagaacctgaccaccctggccaccaacaacggctacatcaagttcagcaacctgatccaggacagcggcctgctgagcgtgatcaccgaccccatccacacccccgtgaccctgttctggcccaccgaccaggccctgcacgccctgcccgccgagcagcaggacttcctgttcaaccaggacaacaaggacaagctgaaggagtacctgaagttccacgtgatcagagacgccaaggtgctggccgtggacctgcccaccagcaccgcctggaagaccctgcagggcagcgagctgagcgtgaagtgcggcgccggcagagacatcggcgacctgttcctgaacggccagacctgcagaatcgtgcagagagagctgctgttcgacctgggcgtggcctacggcatcgactgcctgctgatcgaccccaccctgggcggcagatgcgacaccttcaccaccttcgacgccagcggcgagtgcggcagctgcgtgaacacccccagctgccccagatggagcaagcccaagggcgtgaagcagaagtgcctgtacaacctgcccttcaagagaaacctggagggctgcagagagagatgcagcctggtgatccagatccccagatgctgcaagggctacttcggcagagactgccaggcctgccccggcggccccgacgccccctgcaacaacagaggcgtgtgcctggaccagtacagcgccaccggcgagtgcaagtgcaacaccggcttcaacggcaccgcctgcgagatgtgctggcccggcagattcggccccgactgcctgccctgcggctgcagcgaccacggccagtgcgacgacggcatcaccggcagcggccagtgcctgtgcgagaccggctggaccggccccagctgcgacacccaggccgtgctgcccgccgtgtgcacccccccctgcagcgcccacgccacctgcaaggagaacaacacctgcgagtgcaacctggactacgagggcgacggcatcacctgcaccgtggtggacttctgcaagcaggacaacggcggctgcgccaaggtggccagatgcagccagaagggcaccaaggtgagctgcagctgccagaagggctacaagggcgacggccacagctgcaccgagatcgacccctgcgccgacggcctgaacggcggctgccacgagcacgccacctgcaagatgaccggccccggcaagcacaagtgcgagtgcaagagccactacgtgggcgacggcctgaactgcgagcccgagcagctgcccatcgacagatgcctgcaggacaacggccagtgccacgccgacgccaagtgcgtggacctgcacttccaggacaccaccgtgggcgtgttccacctgagaagccccctgggccagtacaagctgaccttcgacaaggccagagaggcctgcgccaacgaggccgccaccatggccacctacaaccagctgagctacgcccagaaggccaagtaccacctgtgcagcgccggctggctggagaccggcagagtggcctaccccaccgccttcgccagccagaactgcggcagcggcgtggtgggcatcgtggactacggccccagacccaacaagagcgagatgtgggacgtgttctgctacagaatgaagggcagcgccggcctgttccagcagctgagcagcagaccctgcatcagcagaacccccgactag

SEQ ID NO: 334536 - DNA, 3003 bp, Artificial Sequence
  derived and/or modified sequence
atggggcggagaaccttattcatcgggtgtcagcccaagtgtgtgaggacggtaatcacccgagagtgttgcgccggattctttggacctcaatgccagccttgccctgggaacgcccagaacgtctgcttcggaaatggaatctgcctggacggggtgaatggcaccggagtctgcgagtgtggagaggggtttagcggtactgcctgcgagacctgtaccgagggcaaatacggcatacattgcgaccaggcatgtagttgcgtacacgggcggtgcaaccaggggcccctcggcgatggttcctgtgactgtgacgtgggatggagaggcgtgcactgcgacaacgcaaccactgaggataattgtaacgggacctgtcacactagcgccaactgtctgactaattctgatggcaccgcatcctgtaaatgtgctgctgggtttcagggtaacgggacaatttgcactgctatcaatgcgtgcgagatttcaaatggcgggtgtagcgccaaggctgattgtaaaagaaccacccccgggcgtcgggtgtgtacctgtaaggcgggctacactggtgacggaattgtgtgtctggaaatcaacccttgtctcgagaaccatggaggatgcgacaaaaatgccgagtgcacccagaccggacccaaccaggctgcctgcaactgccttccagcctacactggagacggcaaagtgtgcaccctgattaacgtttgtttgacaaaaaatggtggatgcagtgaattcgctatctgtaaccataccggtcaggtagaacggacgtgtacatgcaaacctaattatataggagacggctttacctgcagaggctccatctaccaggagctgcccaaaaatcccaagacctctcagtattttttccagctacaggaacatttcgtgaaggatttagttgggcctgggcctttcacagtttttgcccccctcagtgctgcctttgatgaggaagcccgagttaaggattgggacaaatacggtctcatgccacaggtgcttcgctatcacgtggttgcctgccaccagcttctcctggaaaatctgaagctcatttctaacgctacttctctccaaggagagccaatcgtcatcagcgtctctcagtccacggtctacattaacaataaggcgaaaataatcagttccgatatcatctcaacaaacggcatcgttcacatcattgataaacttctttccccaaaaaatctgctgataacacctaaggataatagcggaaggattctgcagaacctgaccactctcgccacgaataatggttacattaaattcagcaatctcatccaagattcaggcctcctgtctgtaatcactgaccctatccacacacccgtcacactgttttggcccaccgatcaggccctccacgccctcccagcagaacagcaggattttctgttcaaccaagacaataaagataagctgaaggaatacctcaagtttcacgttatcagggacgcaaaggtcttggctgtcgatttgccaacttctacagcatggaagacgctgcaggggagcgaactgtcggtaaaatgcggcgcgggcagagatattggcgatttgttcttgaacgggcagacctgccgcattgtgcagagagagcttcttttcgacctgggagttgcctatggaatagattgcttgttgatcgacccaaccttaggcggaaggtgtgatacctttacgaccttcgacgcctccggagaatgcgggagctgtgtgaacaccccttcctgtccccgctggagcaaacctaagggtgttaagcagaaatgcttgtataatttaccttttaaacggaacctggaaggctgccgagaaaggtgttcactggtgattcagattccccggtgttgtaaaggctattttggcagggactgccaggcctgccccggcggtccagatgcgccgtgcaataatcgcggagtttgtttagatcagtacagtgccaccggggagtgcaaatgtaatacaggctttaacggtaccgcatgcgaaatgtgttggcctgggaggttcggcccagattgcctgccttgtggctgcagcgatcatggccagtgtgacgatggcattaccgggtcaggtcagtgcctatgtgaaaccggttggactgggcccagctgcgacacccaagctgtacttcctgccgtttgtacccctccatgttctgctcacgcaacgtgcaaagaaaataatacatgtgagtgtaacctggattacgaaggagatggcatcacatgcacagtggtcgacttttgtaagcaggataatggcgggtgcgctaaggttgcacgatgctcccagaaagggacaaaagtttcctgcagttgtcagaaaggatacaagggtgacggtcacagctgtacagaaattgacccttgtgcggacgggctgaacggaggatgtcacgaacacgcgacctgcaagatgacaggccccgggaagcacaagtgcgaatgtaagtcacactatgtgggagatggtctgaattgcgagccagagcagttgccaattgacagatgtcttcaggacaacggccaatgccatgccgacgccaagtgcgtggatctccattttcaagacacaacagtgggtgtcttccacctcaggtcgcccctaggccagtataaacttacgtttgataaggcccgggaagcctgcgccaacgaagctgcgacaatggcaacatacaatcagctcagctacgctcagaaagccaaataccacttatgctccgccgggtggcttgaaaccggacgagttgcttatccaactgccttcgcatcacaaaattgcggctctggcgtggtggggatcgtggactacgggcccaggcctaacaaatccgagatgtgggacgtgttttgttaccggatgaagggctcagccggcctctttcaacaactgtcttcacgcccatgtatatctcgcactccggactag

SEQ ID NO: 334537 - DNA, 3003 bp, Artificial Sequence
  derived and/or modified sequence
atgggccgccgcaccctcttcatcggctgccagcccaagtgtgtgaggacagtcatcacccgggagtgctgtgccggcttcttcggcccccagtgccagccctgccctggaaatgcccagaatgtgtgctttggaaatggcatctgcctggatggagtgaatggcaccggggtgtgtgaatgtggggagggcttcagcggcacagcctgtgagacctgcacagagggcaagtatggcatccactgtgaccaggcctgcagctgtgtgcacggccgctgcaaccagggccccctgggagatggcagctgtgactgtgatgtgggctggaggggcgtgcactgtgacaatgccaccacagaggacaactgcaatggcacctgccacaccagcgccaactgcctgaccaacagtgatggaacagccagctgcaagtgtgccgccggcttccagggcaatggcaccatctgcacagccatcaatgcctgtgagatcagcaatggaggctgcagcgccaaggctgactgcaagaggaccaccccaggccggcgggtgtgcacctgcaaggccggctacacaggagatggcatcgtgtgcctggagatcaacccctgcctggagaaccacggcggctgtgacaagaatgctgagtgcacccagacaggccccaaccaggccgcctgcaactgcctgcctgcctacacaggagatggcaaggtgtgcaccctcatcaacgtgtgcctgaccaagaatggaggctgcagcgagtttgccatctgcaaccacacaggccaggtggagaggacctgcacctgcaagcccaactacatcggagatggcttcacctgccggggcagcatctaccaggagctgcccaagaaccccaagaccagccagtacttcttccagctgcaggagcactttgtgaaggacctggtgggccctggccccttcaccgtgtttgcccccctgtctgctgcctttgatgaggaggcccgggtgaaggactgggacaagtatggcctgatgccccaggtgctgcgctaccacgtggtggcctgccaccagctgctgctggagaacctgaagctgatcagcaatgccaccagcctgcagggcgagcccatcgtcatctctgtgtcccagagcacagtgtacatcaacaacaaggccaagatcatcagcagtgacatcatcagcaccaatggaattgtgcacatcatcgacaagctgctgagccccaagaacctgctgatcacccccaaggacaacagcggccgcatcctgcagaacctgaccaccctggccaccaacaacggctacatcaagttcagcaacctgatccaggacagcggcctgctgagcgtcatcacagaccccatccacacccctgtgaccctcttctggcccacagaccaggccctgcacgccctgcctgctgagcagcaggacttcctgttcaaccaggacaacaaggacaagctgaaggagtacctgaagttccacgtgatcagagatgccaaggtgctggccgtggacctgcccaccagcacagcctggaagaccctgcagggcagcgagctgtctgtgaagtgtggggccggccgggacattggagacctcttcctgaatggccagacctgcagaattgtgcagcgggagctgctgtttgacctgggcgtggcctacggcatcgactgcctgctgattgaccccaccctgggcggccgctgtgacaccttcaccacctttgatgccagcggggagtgtggcagctgtgtgaacacccccagctgcccccgctggagcaagcccaagggcgtgaagcagaagtgcctgtacaacctgcccttcaagaggaacctggagggctgccgggagcgctgcagcctggtgatccagatcccccgctgctgcaagggctacttcggccgggactgccaggcctgccctgggggcccagatgccccctgcaacaacagaggagtgtgcctggaccagtacagcgccaccggggagtgcaagtgcaacacaggcttcaacggcacagcctgtgagatgtgctggccaggccgcttcggccctgactgcctgccctgtggctgcagcgaccacggccagtgtgatgatggcatcaccggcagcggccagtgcctgtgtgaaacaggctggacaggccccagctgtgacacccaggccgtgctgcctgctgtgtgcaccccaccctgcagcgcccacgccacctgcaaggagaacaacacctgtgagtgcaacctggactatgaaggagatggcatcacctgcaccgtggtggacttctgcaagcaggacaatggaggctgtgccaaggtggcccgctgcagccagaagggcaccaaggtgtcctgcagctgccagaagggctacaagggagatggccacagctgcacagaaattgacccctgtgctgatggcctgaatggaggctgccatgaacatgccacctgcaagatgactggacctgggaagcacaagtgtgagtgcaagagccactacgtgggagatggcctgaactgtgagcctgagcagctgcccatcgaccgctgcctgcaggacaatggccagtgccacgcagatgccaagtgtgtggacctgcacttccaggacaccaccgtgggcgtcttccacctgcggagccccctgggccagtacaagctgacctttgacaaggcccgggaggcctgtgccaatgaagctgccaccatggccacctacaaccagctgtcctatgcccagaaggccaagtaccacctgtgcagcgctggctggctggagaccggccgggtggcctaccccacagcctttgccagccagaactgtggcagcggcgtggtgggcatcgtggactatggcccccggcccaacaagtctgagatgtgggatgtgttctgctacaggatgaagggcagcgctggcctcttccagcagctgagcagccggccctgcatcagcaggaccccagactag

SEQ ID NO: 334538 - DNA, 3003 bp, Artificial Sequence
  derived and/or modified sequence
atgggccggcggaccctgttcatcggctgccagcccaagtgcgtgcggactgtcattacccgcgaatgttgcgcaggattctttggccctcagtgtcaaccctgcccaggtaacgcgcagaacgtgtgttttggaaatgggatctgtctggatggcgtcaacggaactggagtatgtgaatgtggtgaaggattctctggcactgcctgcgagacctgtaccgaggggaagtacggcatccactgcgatcaagcttgttcatgtgttcatgggcgctgcaaccaaggcccactgggggatggctcgtgcgactgcgacgtcggctggcgaggcgtgcactgcgacaacgccaccaccgaagataattgcaatggcacctgtcatacatccgccaattgtctgacaaacagcgacggcacagcttcttgtaagtgcgcagctggattccaaggaaacggcacaatatgtactgcaattaacgcttgcgagatctccaacggcgggtgttccgctaaggccgactgcaaacggactactcccggtcgccgcgtctgcacctgcaaggcaggctacaccggcgatgggattgtgtgtcttgaaattaacccttgtctcgaaaatcacggtgggtgtgacaagaacgcagaatgcacgcagaccgggcccaatcaagccgcgtgcaattgtctccctgcgtacacaggagacggaaaggtatgcacccttatcaatgtttgcttaaccaagaacggaggatgtagcgaattcgcaatttgcaatcacaccgggcaggtcgaacgaacatgtacctgcaaacctaactatattggcgacggatttacctgtcgcggtagcatctatcaagaactgcctaagaatcctaagaccagccagtatttttttcagctccaagaacactttgtgaaagaccttgtcggacccggtcccttcacggtattcgctcccctcagcgccgcatttgacgaagaagctcgcgtcaaagattgggataagtacggcctgatgccgcaggtcctaagataccacgtcgttgcctgccatcagttactcttggagaacctgaaactaatctccaatgcgacatcccttcaaggagagcctatcgtcattagcgtgagccaaagcaccgtctatataaataacaaggcgaagatcatttccagtgacatcatctccaccaacggtatagtccatataatcgataagctgctgtcccccaaaaatctattaataactcccaaagacaacagtggtaggattttacagaatctgacaaccctggccactaataatgggtatattaagttctccaatctcatacaggactcaggcctgctgtctgtgatcacagaccccatccatacacctgttacactgttttggcctaccgaccaggctctgcatgccctccccgccgaacagcaagattttttgttcaaccaggataataaagacaagctgaaggagtatctcaagtttcacgttattagagatgccaaggtgcttgcagtggatttacccactagcacagcttggaaaactcttcagggatccgaactgtctgtcaagtgtggcgctggcagggatattggcgacctgtttctcaatgggcagacatgtagaatcgtccagcgcgaactcctgttcgatctgggggtagcctatggaattgactgtctcctgatcgatcctacgctcggaggtaggtgcgatacctttacaacctttgatgcctctggcgagtgtggcagctgcgttaacacacctagttgtccgaggtggtctaagccaaagggcgtgaaacaaaaatgcctgtataatctacctttcaagcgcaacctggaggggtgccgagaaagatgttctcttgtgatccagatccctcggtgctgcaagggctattttgggagggactgtcaggcttgccctggtggccctgatgccccatgtaataaccgcggggtgtgtctggaccagtacagtgcaaccggcgaatgcaagtgcaatacggggtttaacggcaccgcatgtgagatgtgttggcccggcagattcggtccagattgcctgccttgcgggtgttcagatcacggccagtgtgacgatggaatcaccgggtctggccagtgcctctgcgagaccggctggacgggccctagttgcgacacccaagccgtgctgcccgccgtgtgcactccgccttgctctgctcatgcaacctgcaaagagaacaatacatgtgaatgcaacctggactatgagggcgatggcattacctgcaccgtggtcgatttctgtaaacaggacaacggtggatgcgcgaaggtggcgagatgctctcagaagggaaccaaggtgtcttgttcttgtcagaaggggtacaaaggagacgggcattcctgcacagagatagatccatgtgcagacggtctcaatggaggttgtcatgagcacgccacatgcaagatgactggccccggaaaacacaaatgcgagtgcaagagccactacgtgggcgacgggctaaactgtgaacccgagcagttaccaattgacagatgccttcaggataacggccaatgccatgcggacgccaagtgtgttgatctccacttccaggataccacagtaggtgtgtttcacttgcggtctcccttgggccagtacaagctgacctttgataaagctcgggaagcgtgtgccaatgaggctgcgacaatggccacgtataatcaactgagctacgcccagaaagcaaaataccacttgtgtagcgctgggtggctcgaaacaggtcgggtggcgtaccccacagcattcgctagccagaattgcggctctggcgtcgtgggcattgtggactacggcccacggcccaacaaatctgaaatgtgggacgtgttttgttatcgcatgaagggctccgccggcctatttcagcagttgtctagtcgaccgtgcatatccaggacgccagactag

SEQ ID NO: 334539 - DNA, 3003 bp, Artificial Sequence
  derived and/or modified sequence
atgggccgaagaaccctgtttattggatgccagccaaaatgcgtccgcaccgtaataactagggagtgctgtgcaggcttttttgggcctcagtgccaaccatgtcctgggaacgcccaaaacgtctgttttgggaatggaatctgcctcgacggcgtaaacgggaccggtgtgtgcgagtgcggagaggggttttcgggaacagcttgcgagacttgtactgagggcaagtacggcatacactgtgaccaggcttgtagctgtgtccatggcagatgcaatcagggcccattaggagatggctcatgcgattgtgacgtgggatggaggggcgtgcattgcgacaatgcgacaaccgaagacaattgtaacgggacatgtcatactagcgccaattgtctgacaaactctgacggaactgcctcttgtaagtgtgccgctggatttcaggggaatggcactatttgcactgccataaacgcctgtgagattagtaatggaggctgcagtgcaaaagctgattgcaagcgaacaactcccggacggcgagtctgcacttgtaaagctgggtataccggtgatggcatcgtttgtttggagatcaacccatgtctcgaaaaccatggaggttgcgataaaaacgccgagtgtacccagaccgggcctaaccaggcagcatgcaactgtttgcctgcttacacgggggacggaaaggtatgcaccttaattaatgtgtgtcttaccaagaacggcggttgcagtgaatttgccatttgcaaccacaccgggcaagtcgaacgtacttgcacctgcaagccgaactacattggcgatggattcacctgtcgaggaagcatctaccaagagctgcccaagaaccctaaaacctcacagtatttttttcagttacaggagcatttcgtcaaggacctcgtgggaccaggcccttttacagtattcgcccctctgtctgctgcttttgacgaagaggctagggtcaaagattgggacaaatacggcctgatgcctcaggtgcttcgctatcacgtggtcgcctgccaccagctgctgctcgaaaacctgaaactgataagcaatgccacaagcctgcagggcgagccgattgtcatctctgtgagccagagcacagtctacatcaacaataaagcaaagattattagttccgacattatttcaactaatgggatcgtgcatatcatagataaattgctctcgccaaagaacctcctaatcactcccaaggataactccggcaggatcctccagaatctcaccacactggccacaaataatggctacattaagttttccaatctgattcaggactcaggcctgctgtccgtgattactgaccctatccacacccccgtcacactcttctggccaaccgaccaggcccttcatgccctgccagccgagcagcaggactttctctttaaccaggacaacaaggacaaactcaaggagtacctaaaattccacgttattagggatgccaaggtgctggcagtggatctgcccacttcaacagcatggaaaacactccaggggtcagagctttcggtcaaatgtggcgctggcagggatattggggatctgtttctgaacggacaaacttgcaggatcgtccagcgagaactcctgtttgacttgggggtggcctacgggatcgactgtctgcttattgaccccactttgggcggacggtgtgatacctttactaccttcgacgcttctggggagtgcggcagttgtgtcaacactcccagttgtcctaggtggtcaaaaccaaagggcgtaaagcaaaagtgcctttacaacctgcccttcaagcgtaatctggagggctgccgtgagcggtgctccctcgtcattcagatcccacgctgctgtaaaggctatttcggcagagattgccaagcttgccctggcggacctgatgccccatgcaataatcggggtgtctgtctcgaccagtactctgcgaccggcgaatgtaagtgcaatacaggtttcaacggaacggcctgtgaaatgtgctggcctgggagattcgggccagattgtttaccctgcggctgttctgaccatgggcagtgcgatgatggcattacaggctccggccagtgtctctgtgagacgggttggaccgggccttcttgcgacacccaagccgtcctccctgcagtgtgtacccctccatgctctgcgcatgccacttgtaaggaaaacaacacctgcgaatgcaatctggactatgagggggatggcataacgtgtaccgtggtcgacttctgtaaacaggataatggcggatgcgcaaaggtcgctcgttgctcccagaaggggactaaggtctcctgtagctgtcagaaaggttataaaggggatggccactcctgcactgaaatcgatccatgcgccgatggccttaacggcggatgtcatgaacacgccacctgcaagatgacagggcctggcaagcataaatgtgagtgtaaatcacactacgttggggacgggctcaactgcgaacccgagcagcttccgatcgataggtgtttacaagacaacgggcagtgtcacgccgacgccaagtgtgtggacctgcacttccaggacacaacagtcggcgtgttccacctgcggagccccctggggcaatataagcttacatttgataaagctcgagaggcttgcgcgaatgaggccgcaacgatggccacttacaaccagttaagctacgcgcagaaggcaaaataccacctctgcagcgccggttggctggagactggcagagtagcatatcccacagcctttgccagccagaactgcgggtcaggcgtggttggcatcgtggattacggccctcggcctaacaagagcgaaatgtgggacgttttttgttatcgcatgaaaggctcggctggattgttccagcagctgtcttcccgcccatgcataagtcgaactcccgactag

SEQ ID NO: 334540 - DNA, 423 bp, Artificial Sequence
  derived and/or modified sequence
atgctgcaggccgccgacttcatcgagcggaccgagaccgccggcgaactgtctcgaggtctcataggtgtgttgagttctcagatctcttggtgcttgttaaatgtaaacctcagtaaactgcctacacggctgcaacgactctcttgctctgtgctgaattcaagtcccgctatgcgcggaggagcacgaggcagacctcaattaacacttgaacgcccccttcgcccaggatgccgactgcacagctgcagcgaagcagagaagggtggctttgtgcgcaggaaagaaattatcctcttcccaccatgcgaggaccccgccagggggtggctatcggctaatcctgggagagagccctctcctggcatctgttggcacctaaatctgggcttgccaagtctgcataactgtgaagaatag

SEQ ID NO: 334541 - DNA, 2196 bp, Artificial Sequence
  derived and/or modified sequence
atgctgaaggagtgggccatcaagcagggcatcctgctgaaggtggccgagaccatcaagagctggatcttcttcagccagtgcaacaagaaggacgacctgctgcacaagctggacatcggcttcagactggacagcctgcacaccatcctgcagcaggaggtgctgctgcaggaggacgtggagctgatcgagctgctggaccccagcatcctgagcgccggccagagccagcagcaggagaacggccacctgcccaccctgtgcagcctggccacccccaacatctgggacctgagcatgctgttcgccttcatcagcctgctggtgatgctgcccacctggtggatcgtgagcagctggctggtgtggggcgtgatcctgttcgtgtacctggtgatcagagccctgagactgtggagaaccgccaagctgcaggtgaccctgaagaagtacagcgtgcacctggaggacatggccaccaacagcagagccttcaccaacctggtgagaaaggccctgagactgatccaggagaccgaggtgatcagcagaggcttcaccctggtgagcgccgcctgccccttcaacaaggccggccagcaccccagccagcacctgatcggcctgagaaaggccgtgtacagaaccctgagagccaacttccaggccgccagactggccaccctgtacatgctgaagaactaccccctgaacagcgagagcgacaacgtgaccaactacatctgcgtggtgcccttcaaggagctgggcctgggcctgagcgaggagcagatcagcgaggaggaggcccacaacttcaccgacggcttcagcctgcccgccctgaaggtgctgttccagctgtgggtggcccagagcagcgagttcttcagaagactggccctgctgctgagcaccgccaacagcccccccggccccctgctgacccccgccctgctgccccacagaatcctgagcgacgtgacccagggcctgccccacgcccacagcgcctgcctggaggagctgaagagaagctacgagttctacagatacttcgagacccagcaccagagcgtgccccagtgcctgagcaagacccagcagaagagcagagagctgaacaacgtgcacaccgccgtgagaagcctgcagctgcacctgaaggccctgctgaacgaggtgatcatcctggaggacgagctggagaagctggtgtgcaccaaggagacccaggagctggtgagcgaggcctaccccatcctggagcagaagctgaagctgatccagccccacgtgcaggccagcaacaactgctgggaggaggccatcagccaggtggacaagctgctgagaagaaacaccgacaagaagggcaagcccgagatcgcctgcgagaacccccactgcaccgtggtgcccctgaagcagcccaccctgcacatcgccgacaaggaccccatccccgaggagcaggagctggaggcctacgtggacgacatcgacatcgacagcgacttcagaaaggacgacttctactacctgagccaggaggacaaggagagacagaagagagagcacgaggagagcaagagagtgctgcaggagctgaagagcgtgctgggcttcaaggccagcgaggccgagagacagaagtggaagcagctgctgttcagcgaccacgccgtgctgaagagcctgagccccgtggaccccgtggagcccatcagcaacagcgagcccagcatgaacagcgacatgggcaaggtgagcaagaacgacaccgaggaggagagcaacaagagcgccaccaccgacaacgagatcagcagaaccgagtacctgtgcgagaacagcctggagggcaagaacaaggacaacagcagcaacgaggtgttcccccagggcgccgaggagagaatgtgctaccagtgcgagagcgaggacgagccccaggccgacggcagcggcctgaccaccgccccccccacccccagagacagcctgcagcccagcatcaagcagagactggccagactgcagctgagccccgacttcaccttcaccgccggcctggccgccgaggtggccgccagaagcctgagcttcaccaccatgcaggagcagaccttcggcggcgaggaggaggagcagatcatcgaggagaacaagaacgagatcgaggagaagtag

SEQ ID NO: 334542 - DNA, 2196 bp, Artificial Sequence
  derived and/or modified sequence
atgctgaaggagtgggccatcaagcagggcatcctgttaaaagtggctgagacaatcaagtcctggattttcttttcgcaatgtaataaaaaggacgacctactgcataaactagatatcggtttcaggttagactctctgcatacaatccttcagcaagaggtgcttttgcaggaagacgtggaactgatcgagcttctggacccctcgattttgtccgccggccagagccagcaacaggagaatggacatttgcccacactgtgctctctggcgacaccgaatatatgggacctgtcgatgctgttcgccttcatctctctgctcgtgatgctacccacgtggtggattgttagctcttggctggtgtggggagtgatactattcgtgtatctcgtgattcgagcactccgactgtggagaactgctaagctacaagtgaccctgaagaagtacagtgtgcacctggaggacatggctacaaattcccgagccttcacgaatttagtgcgcaaagcgctcaggctgattcaggaaactgaagtgatcagccggggcttcacattggtgtctgccgcatgtcccttcaataaagctggccagcacccaagtcaacacctgatagggctgagaaaagcagtgtataggacactcagagcgaatttccaggctgcccgtctggccactctgtacatgcttaaaaattacccacttaacagcgagtctgataatgtcaccaactacatctgcgtggtccccttcaaggagttggggctgggcctgagtgaagaacagattagtgaggaagaggctcataactttactgacggtttctcgctgcccgcacttaaagtgttgtttcaactatgggttgcccagtcctcagaattttttcggcgactagcgctgttactctccacagccaattcgccccctgggcccttactcaccccagccctactgccacatcggattctgtctgacgttacccaggggttaccccatgcgcactcagcatgtctggaggaacttaagcggagctacgaattttataggtacttcgagacacagcaccagagcgtgccacagtgtctgtcaaagacccagcagaagtccagggaactcaacaatgtccacaccgcagtccgatcactacagctgcacctaaaggcacttctaaacgaggtgattatactggaggatgaactagagaagttggtctgcactaaggagacacaggaattggtctccgaggcatatcctatcctcgagcagaaattgaaactgattcagcctcacgtgcaggcaagcaacaactgttgggaagaggccatatctcaagtggacaaactgctgcgccggaatacagacaagaaaggaaagcctgagatagcttgcgaaaaccctcattgtacagttgtgcctctcaaacagcccactctccacatcgccgataaggacccaatccccgaggagcaggaactagaagcttatgtggacgatatcgacattgacagcgactttaggaaggacgatttctactacctgtctcaggaagataaggagcggcaaaaacgagagcacgaggagagcaaaagagttcttcaagagttgaaatctgttctggggttcaaagcctctgaggccgaacgccagaaatggaaacaactgctgtttagtgaccatgccgtgctgaagtctttatcgccagtcgatccagtcgagccgatctcgaactcagagccatcgatgaacagcgatatgggcaaagtgagtaagaacgacacggaggaagaaagcaacaagtccgccacaacggataacgagatttcacgcacagaatacctgtgcgagaactccctggaggggaaaaataaagataattcaagtaacgaagttttcccacagggcgctgaagagcgtatgtgttaccagtgtgagagtgaggatgagccgcaggctgatggcagcgggttgaccacagctcctcccacccctcgggactcactccagccttccattaaacagcgattagcccggttgcagctctctccagattttactttcactgccggcctggcagctgaagtggcggcccgatctctatctttcactacaatgcaggagcagacattcggaggcgaagaagaagaacaaataatcgaagaaaacaaaaatgagatcgaggagaaatag

SEQ ID NO: 334543 - DNA, 2196 bp, Artificial Sequence
  derived and/or modified sequence
atgctgaaggagtgggccatcaagcagggcatcctgctgaaggtggccgagaccatcaagtcctggatcttcttcagccagtgcaacaagaaggatgacctgctgcacaagctggacatcggcttccggctggacagcctgcacaccatcctgcagcaggaggtgctgctgcaggaggatgtggagctgattgagctgctggaccccagcatcctgtctgctggccagagccagcagcaggagaatggccacctgcccaccctgtgcagcctggccacccccaacatctgggacctgtccatgctgtttgccttcatcagcctgctggtgatgctgcccacctggtggatcgtgtcctcctggctggtgtggggcgtcatcctgtttgtgtacctggtgatccgggccctgcggctgtggaggacagccaagctgcaggtgaccctgaagaagtacagcgtgcacctggaggacatggccaccaacagccgggccttcaccaacctggtgaggaaggccctgcggctcatccaggagacagaggtgatcagccggggcttcaccctggtgtctgctgcctgccccttcaacaaggccggccagcaccccagccagcacctgattggcctgaggaaggctgtgtaccgcaccctgcgggccaacttccaggccgcccggctggccaccctgtacatgctgaagaactaccccctgaacagcgagagtgacaacgtgaccaactacatctgtgtggtgcccttcaaggagctgggcctgggcctgtctgaggagcagatcagcgaggaggaggcccacaacttcacagatggcttcagcctgcctgccctgaaggtgctcttccagctgtgggtggcccagagcagcgagttcttccggcggctggccctgctgctgagcacagccaacagccccccaggccccctgctgaccccagccctgctgccccaccgcatcctgagtgatgtgacccagggcctgccccacgcccacagcgcctgcctggaggagctgaagaggagctatgagttctaccgctactttgagacccagcaccagagcgtgccccagtgcctgagcaagacccagcagaagagccgggagctgaacaacgtgcacacagctgtgcgcagcctgcagctgcacctgaaggccctgctgaatgaggtgatcatcctggaggatgagctggagaagctggtgtgcaccaaggagacccaggagctggtgtctgaggcctaccccatcctggagcagaagctgaagctgatccagccccacgtgcaggccagcaacaactgctgggaggaggccatcagccaggtggacaagctgctgcggaggaacacagacaagaagggcaagccagagatcgcctgtgagaacccccactgcaccgtggtgcccctgaagcagcccaccctgcacatcgctgacaaggaccccatccctgaggagcaggagctggaggcctacgtggatgacatcgacatcgacagcgacttcaggaaggatgacttctactacctgagccaggaggacaaggagcggcagaagcgggagcacgaggagagcaagagggtgctgcaggagctgaagtctgtgctgggcttcaaggccagcgaggccgagcggcagaagtggaagcagctgctcttcagtgaccatgctgtgctgaagagcctgagccctgtggaccctgtggagcccatcagcaacagcgagcccagcatgaacagcgacatgggcaaggtgtccaagaatgacacagaggaggagagcaacaagagcgccaccacagacaatgagatcagcaggacagagtacctgtgtgagaacagcctggagggcaagaacaaggacaacagcagcaatgaggtgttcccccagggcgctgaggagaggatgtgctaccagtgtgagagtgaagatgagccccaggctgatggcagcggcctgaccacagccccacccaccccccgggacagcctgcagcccagcatcaagcagaggctggcccggctgcagctgagcccagacttcaccttcaccgctggcctggccgctgaggtggccgcccggagcctgtccttcaccaccatgcaggagcagaccttcggcggggaggaggaggagcagatcatcgaggagaacaagaatgaaattgaggagaagtag

SEQ ID NO: 334544 - DNA, 2196 bp, Artificial Sequence
  derived and/or modified sequence
atgctgaaggagtgggccatcaagcagggcatcctgctgaaggtggccgaaactattaagtcttggatcttttttagtcaatgcaataaaaaggatgacctacttcacaaactggacatcggtttcaggctggactccctgcacaccattcttcagcaggaggtgctgctgcaggaggatgtcgaactcatcgaactgctggacccctccatcctgagcgccggtcagtcgcagcagcaagaaaacggccacctacccacactgtgtagtctggcgaccccaaacatttgggatctttccatgctgtttgcgttcatctcgctattagtgatgctccccacctggtggatcgtaagtagttggctcgtctggggcgtcatcctgttcgtgtacttggtgattagagccctgaggctgtggagaactgcaaaactgcaggttaccctcaagaagtactccgttcaccttgaagatatggccactaacagccgagctttcaccaatctggttagaaaggcactgcgtcttattcaggagacggaagttatcagccgcggatttactctggtctccgcagcctgcccattcaacaaggccggccagcatcccagtcaacacctaattggcttaagaaaagctgtgtaccggacccttagagcgaatttccaggcagcacggctggcaactctgtatatgctgaagaactaccccctcaatagtgagtcggacaacgttaccaactacatttgcgtcgtccccttcaaggaacttggacttggcctgtccgaagagcagatcagtgaggaagaggcccacaacttcaccgatggctttagcttgcccgctctgaaagtattgttccaactttgggtggctcaaagtagtgagttctttcgacgcctggccctgctgttatcaaccgccaattcgcctccaggaccgcttctgacccctgccctactgcctcacagaattctctctgacgtgacacagggactgccacacgcacactctgcttgcttagaggagcttaaaagatcctacgagttctaccggtattttgagacccagcaccagtctgtcccccagtgtttatccaagacccagcagaaaagtcgggaactgaacaacgtgcataccgcagtgagaagtttacaactgcaccttaaggccttgctaaacgaagtgatcattctggaggatgaactggaaaaacttgtctgcaccaaggagactcaggagctggtgagtgaggcctaccctattcttgagcaaaagctgaagttgattcagcctcatgtgcaggcctctaacaactgctgggaggaggcgattagccaggtggataagctactgaggagaaacaccgacaagaagggtaagcctgagattgcctgcgagaatccacactgcaccgtcgtgccactgaaacagcctacccttcatatcgccgataaggatcccataccagaggagcaggaactggaggcatacgtggatgacatcgatattgacagcgatttccgaaaggatgatttttactatctatcacaagaagacaaggagagacaaaagcgcgaacacgaggagtctaaaagagtattgcaagaacttaaaagtgtgttgggtttcaaggccagcgaggccgaaaggcagaagtggaagcagctcctcttttccgaccacgctgtgttgaaatccttaagcccggtggatccagtagagccgatctcaaacagcgagccgtcgatgaattctgacatgggaaaagtttcaaaaaatgatacagaggaggagagcaataaatcagccactactgataacgaaatttctcggacagagtacctgtgtgagaactctctcgaggggaaaaataaagacaactctagcaacgaagtgtttccccagggtgccgaggagagaatgtgttaccagtgtgagtccgaggatgaaccccaggcggatggctccgggttgaccaccgctcctccaactcccagggatagtctccaaccatccatcaagcagcgcctcgctcggcttcagctgtcgccagactttacctttactgctgggctcgctgcagaagtcgcagcgcgcagtctctccttcacaaccatgcaggagcagacttttgggggggaggaagaggaacaaattatcgaggaaaacaagaatgaaatcgaggagaagtag

SEQ ID NO: 334545 - DNA, 2196 bp, Artificial Sequence
  derived and/or modified sequence
atgctgaaggagtgggccatcaagcaggggatcctgttaaaagtggctgagacaatcaaatcatggattttcttttcgcagtgtaataaaaaagatgatctgttgcacaagttggatattgggttccggttggactccctccatacaatcttacagcaggaggtcctgctgcaggaggacgtcgagctgatcgagctgctggatccatcaatcctcagcgcaggtcaaagtcaacagcaggagaatggtcacctccccactttgtgctcgctggctacccccaatatatgggacctgagtatgttattcgcgtttatctctcttctggtgatgctgccaacatggtggatcgtctcatcatggcttgtgtggggagtcatccttttcgtttacctggttatccgggctctgcgcctgtggcgaactgctaagctacaggttacgctcaagaagtatagcgtacacctggaggatatggcgacaaacagcagggcctttaccaacttggtgagaaaggccctgcgattaattcaggaaaccgaagtgatctcaaggggcttcacattggtgagcgctgcctgcccgtttaacaaggcaggccaacatccttcccagcatcttattggccttcgcaaggccgtttacagaacgctgagagcaaacttccaggccgcaagactggccaccttatatatgctaaaaaattatccattgaactcagagtccgataacgtaaccaactacatttgtgtggtgcctttcaaagaattaggcctcggactttcggaggagcagatcagtgaagaggaagcccacaattttacagacggttttagcctcccagccctgaaagtgttatttcagctgtgggtagcacagagctcagagttttttagaagactggcactgctgctatccactgcaaatagccccccaggtcccttgctcacccctgctctgttacctcacaggatcctgagcgatgtaactcaggggcttccccacgcccactcagcctgtttagaggagttaaaaaggagctatgagttttatcgctacttcgagactcagcaccagtcagtgcctcagtgtctgtctaaaacccagcagaagagccgtgaactgaataatgttcataccgctgtgagatctctgcagctgcatctgaaggctctcctgaacgaggtcatcatcttggaggacgaactcgaaaagctcgtttgcaccaaggaaacccaggagctggtttcggaggcttatcctatccttgaacagaagctcaagttgattcaaccacatgtccaagcctccaacaactgttgggaggaagctatcagccaggttgataagctgctaaggcggaatacggacaagaagggcaaaccagagatagcctgcgagaaccctcactgtactgttgtgcctctgaaacagccgaccctgcacatcgccgataaagatcccatcccagaggaacaggagctggaggcctacgtggacgatatcgatattgactctgattttaggaaggatgatttttattacctgagccaggaggacaaggagagacagaagagggagcacgaggagtctaagcgggtactgcaggaactgaaaagcgttctcggcttcaaagcaagtgaggccgaaaggcagaagtggaaacaactcttattttccgatcatgctgtactgaaaagcctttccccagttgatccagtggagccaatctcaaattcagagccttcgatgaattccgacatggggaaagtttccaaaaacgacacagaagaggagtcgaataagtccgcaacgactgacaacgagatatcccggactgaatacctgtgcgagaattcattggagggtaagaataaggataattcgagcaatgaggtctttccccaaggagctgaggagagaatgtgctaccagtgtgagagcgaggatgaaccccaagccgatgggagcggattaacaactgcccctccaacccctcgcgactcgcttcagccgtccatcaagcaaagactggcccgactgcagctatcgccagattttacctttactgcaggtctggccgctgaagtcgcagcccgtagtctgtcttttaccaccatgcaggaacagacattcgggggtgaagaggaggagcagatcatagaagaaaacaagaacgaaatcgaggaaaagtag

SEQ ID NO: 334546 - DNA, 2951 bp, Artificial Sequence
  derived and/or modified sequence
ttcatttcccatcgtgctgaggcgggtggcatggcggagaaggatgacaccggagtttgacgaagaggtggtttttgagaattctccactttaccaatacttacaggatctgggacacacagactttgaaatatgttcttctttgtcaccaaaaacagaaaaatgcacaacagagggacaacaaaagcctcctacaagagtcctaccaaaatacctgggatatagtaatcactcaatgaatataaactgcacttactggcatgctcaaggaatgggctattaagcaaggtatcctgttaaaagtggctgaaaccatcaaaagttggatttttttttctcagtgcaataagaaagatgacttacttcacaagttggatattggattccgactcgactcattacataccatcctgcaacaggaagtcctgttacaagaggatgtggagctgattgagctacttgatcccagtatcctgtctgcagggcaatctcaacaacaggaaaatggacaccttccaacactttgctccctggcaacccctaatatttgggatctctcaatgctatttgccttcattagcttgctcgttatgcttcccacttggtggattgtgtcttcctggctggtatggggagtgattctatttgtgtatctggtcataagagctttgagattatggaggacagccaaactacaagtgaccctaaaaaaatacagcgttcatttggaagatatggccacaaacagccgagcttttactaacctcgtgagaaaagctttacgtctcattcaagaaaccgaagtgatttccagaggatttacactggtcagtgctgcttgcccatttaataaagctggacagcatccaagtcagcatctcatcggtcttcggaaagctgtctaccgaactctaagagccaacttccaagcagcaaggctagctaccctatatatgctgaaaaactaccccctgaactctgagagtgacaatgtaaccaactacatctgtgtggtgccttttaaagagctgggccttggacttagtgaagagcagatttcagaagaggaagcacataactttacagatggcttcagcctgcctgcattgaaggttttgttccaactctgggtggcacagagttcagagttcttcagacggttagccctattactttctacagccaattcacctcctgggcccttacttactccagcacttctgcctcatcgtatcttatctgatgtgactcaaggtctacctcatgctcattctgcctgtttggaagagcttaagcgcagctatgagttctatcggtactttgaaactcagcaccagtcagtaccgcagtgtttatccaaaactcaacagaagtcaagagaactgaataatgttcacacagcagtgcgtagcttgcagctccatctgaaagcattactgaatgaggtaataattcttgaagatgaacttgaaaagcttgtttgtactaaagaaacacaagaactagtgtcagaggcttatcccatcctagaacagaaattaaagttgattcagccccacgttcaagcaagcaacaattgctgggaagaggccatttctcaggtcgacaaactgctacgaagaaatacagataaaaaaggcaagcctgaaatagcatgtgaaaacccacattgtacagtagtacctttgaagcagcctactctacacattgcagacaaagatccaatcccagaggagcaggaattagaagcttatgtagatgatatagatattgatagtgatttcagaaaggatgatttttattacttgtctcaagaagacaaagagagacagaagcgtgagcatgaagaatccaagagggtgctccaagaattaaaatctgtgctgggatttaaagcttcagaggcagaaaggcagaagtggaagcaacttctatttagtgatcatgccgtgttgaaatccttgtctcctgtagacccagtggaacccataagtaattcagaaccatcaatgaattcagatatgggaaaagtcagtaaaaatgatactgaagaggaaagtaataaatccgccacaacagacaatgaaataagtaggactgagtatttatgtgaaaactctctagaaggtaaaaataaagataattcttcaaatgaagtcttcccccaaggagcagaagaaagaatgtgttaccaatgtgagagtgaagatgaaccacaagcagatggaagtggtctgaccactgcccctccaactcccagggactcattacagccctccattaagcagaggctggcacggctacagctgtcaccagattttaccttcactgctggccttgctgcagaagtggctgctagatctctctcctttaccaccatgcaggaacagacttttggtggtgaggaggaagaacaaataatagaagaaaataaaaatgagatagaagaaaagtaagaaccaagattcatatgaagtgatattagattgttccttttacaaaagtgtttagcttcaagactggaaagggaatatgagtgtaagtttactatatataaagctaagatgtggatttacaggaagaaccctggtttgaataactgatctgaaattagtagttacctgtaaatggcagatcttttaggaaaataagagaaaggtaagggctcttttgaataaactgctgttttatttgtggcacaactgatcaatcttggaaattctttaagtatttttaataagaaatgaattatcatttcttgccagaatttgctaccttaaggtgattgggaaaattctgttgcaagaacattaacatttagtatgactcctttttactgtattcttgcagttaataactgcagctattatgttaataacaagttgtttgtattttatttttgtttataccagtcttaaagatccaggttctgaataaaaaaattaattgat

SEQ ID NO: 334547 - protein, 469 aa, Artificial Sequence
  derived and/or modified sequence
MKDCPMPRNAARISEKRKEYMDACGEANNQNFQQRYHAEEVEERFGRFKPGVISEELQDALGVTDKSLPPFIYRMRQLGYPPGWLKEAELENSGLALYDGKDGTDGETEVGEIQQNKSVTYDLSKLVNYPGFNISTPRGIPDEWRIFGSIPMQACQQKDVFANYLTSNFQAPGVKSGNKRSSSHSSPGSPKKQKNESNSAGSPADMELDSDMEVPHGSQSSESFQFQPPLPPDTPPLPRGTPPPVFTPPLPKGTPPLTPSDSPQTRTASGAVDEDALTLEELEEQQRRIWAALEQAESVNSDSDVPVDTPLTGNSVASSPCPNELDLPVPEGKTSEKQTLDEPEVPEIFTKKSEAGHASSPDSEVTSLCQKEKAELAPVNTEGALLDNGSVVPNCDISNGGSQKLFPADTSPSTATKIHSPIPDMSKFATGITPFEFENMAESTGMYLRIRSLLKNSPRNQQKNKKASE

SEQ ID NO: 334548 - DNA, 1410 bp, Artificial Sequence
  derived and/or modified sequence
atgaaggactgccccatgcccagaaacgccgccagaatcagcgagaagagaaaggagtacatggacgcctgcggcgaggccaacaaccagaacttccagcagagataccacgccgaggaggtggaggagagattcggcagattcaagcccggcgtgatcagcgaggagctgcaggacgccctgggcgtgaccgacaagagcctgccccccttcatctacagaatgagacagctgggctacccccccggctggctgaaggaggccgagctggagaacagcggcctggccctgtacgacggcaaggacggcaccgacggcgagaccgaggtgggcgagatccagcagaacaagagcgtgacctacgacctgagcaagctggtgaactaccccggcttcaacatcagcacccccagaggcatccccgacgagtggagaatcttcggcagcatccccatgcaggcctgccagcagaaggacgtgttcgccaactacctgaccagcaacttccaggcccccggcgtgaagagcggcaacaagagaagcagcagccacagcagccccggcagccccaagaagcagaagaacgagagcaacagcgccggcagccccgccgacatggagctggacagcgacatggaggtgccccacggcagccagagcagcgagagcttccagttccagccccccctgccccccgacaccccccccctgcccagaggcacccccccccccgtgttcaccccccccctgcccaagggcaccccccccctgacccccagcgacagcccccagaccagaaccgccagcggcgccgtggacgaggacgccctgaccctggaggagctggaggagcagcagagaagaatctgggccgccctggagcaggccgagagcgtgaacagcgacagcgacgtgcccgtggacacccccctgaccggcaacagcgtggccagcagcccctgccccaacgagctggacctgcccgtgcccgagggcaagaccagcgagaagcagaccctggacgagcccgaggtgcccgagatcttcaccaagaagagcgaggccggccacgccagcagccccgacagcgaggtgaccagcctgtgccagaaggagaaggccgagctggcccccgtgaacaccgagggcgccctgctggacaacggcagcgtggtgcccaactgcgacatcagcaacggcggcagccagaagctgttccccgccgacaccagccccagcaccgccaccaagatccacagccccatccccgacatgagcaagttcgccaccggcatcacccccttcgagttcgagaacatggccgagagcaccggcatgtacctgagaatcagaagcctgctgaagaacagccccagaaaccagcagaagaacaagaaggccagcgagtag

SEQ ID NO: 334549 - DNA, 1410 bp, Artificial Sequence
  derived and/or modified sequence
atgaaggactgcccaatgccaaggaacgccgcacgcattagcgagaagcggaaggaatacatggatgcctgtggagaggcaaataatcagaacttccagcaacggtaccatgcggaggaagtggaagagaggtttgggcgttttaagcccggtgtgattagcgaggaactgcaggacgccctgggcgtgaccgacaaatcacttcccccattcatctacaggatgcggcagctgggctatccgcccggatggctcaaggaggctgaattggaaaatagcggtctggccctctacgatgggaaagacggcaccgatggcgaaaccgaggtgggcgagattcaacagaataagagcgtaacatacgatctgtccaagttggtgaattacccaggctttaatatctcaaccccgagaggcatccccgatgagtggcgtatctttggctcaatcccaatgcaagcctgccagcagaaggacgtttttgctaattacctgaccagcaatttccaagcacctggtgtaaagtctgggaacaagagaagctcctcccattcttccccaggttcacccaaaaagcagaaaaatgagagcaacagtgccggcagcccagccgacatggagctggactccgacatggaggtgccccatggcagtcaatcctccgaaagcttccagttccagcctcccctgccaccggatacaccaccccttccaaggggtacacccccgcctgttttcacccctcccttgcccaaaggtaccccaccactcactccgagcgacagccctcagacccgcaccgcctccggagccgtggacgaagatgcactgactctggaagagctcgaggaacaacagagacggatctgggcagccctcgaacaggccgaaagtgtgaattccgacagcgatgtcccagttgacactcccctgacggggaatagcgtcgcttcctccccatgtcccaacgagctggatctgccagtgccagagggaaagacatccgaaaaacagactcttgatgaacctgaagtgcccgaaattttcactaagaaatccgaagccggccacgcctcatctccagattcagaagtgacatctctgtgccagaaggagaaggccgaactcgctcctgtgaacactgaaggagcattactggacaacggctcagtggtccctaattgtgacatttctaacggggggtctcagaaattgttcccagccgataccagcccctcgaccgctaccaagattcacagccctattcccgacatgagcaagttcgcgaccgggatcacacccttcgaattcgaaaacatggcagagtcaacgggtatgtatctgcggatccggtccctcctcaagaacagtccaagaaatcagcagaaaaacaaaaaggcctcagagtag

SEQ ID NO: 334550 - DNA, 1410 bp, Artificial Sequence
  derived and/or modified sequence
atgaaggattgccctatgcctcgcaacgctgcaaggatatctgagaagcggaaagagtacatggacgcttgcggggaggccaacaatcagaacttccaacagcgttatcacgccgaggaggtcgaggaacgctttggaaggtttaagccaggagtaatctctgaagaactacaggacgccttgggtgtcactgacaagtccttgccaccatttatctataggatgcggcagcttggctaccccccaggatggctgaaggaagccgaactggagaactcggggttagcgctgtatgatggaaaagacggaacagacggcgagactgaagtcggtgagatccagcagaataagagtgtgacgtacgacctttccaaactcgtgaattatccaggatttaatatctccactccgaggggtattcctgatgaatggaggatttttggcagcatcccaatgcaggcctgtcagcagaaagatgtgttcgctaattatttaaccagcaatttccaggccccgggcgttaagtccggaaataaaagatcctctagccattcctcacctggctctcctaaaaaacaaaagaatgaatccaattctgctggcagtcccgcagatatggaattggactccgatatggaggtgccgcacggttcccagtcttccgaatcatttcaatttcagccgcctctgcctcctgacacgcctccgctcccaagaggcactcctccccctgtgtttacgccaccattgccaaaaggcactcctcctctgacccccagcgacagcccccagacacggaccgcctctggggccgtcgatgaagacgcccttaccttggaagaactagaagaacagcagcgtcgtatctgggcggcactggagcaggcagagtctgttaactctgatagtgatgtgcccgtggacactccactcactggcaatagcgtggcttcctctccttgcccaaatgagctagatcttcccgtccccgagggaaagacaagtgaaaaacaaacgctggatgaacccgaggttcccgaaatctttactaagaagtccgaggcaggacacgcgtcttctccagactccgaggttacctcgttgtgccagaaagagaaagccgagcttgcaccggttaataccgagggggcactcctcgacaacgggtcggtggtgcccaattgcgatatctccaacggtggctcccagaagctgttcccggccgataccagtccgtccacagcgactaagattcactcgccaatccctgacatgagcaaattcgccaccggtattacaccgtttgagttcgagaatatggctgaatctacgggcatgtaccttcggatacgctctctcctaaagaacagtccacgcaatcagcagaagaataaaaaggcatccgagtag

SEQ ID NO: 334551 - DNA, 1410 bp, Artificial Sequence
  derived and/or modified sequence
atgaaggactgccccatgcccagaaatgctgcccgcatcagcgagaagaggaaggagtacatggatgcctgtggggaggccaacaaccagaacttccagcagcgctaccacgccgaggaggtggaggagagatttggccgcttcaagccaggagtcatcagcgaggagctgcaggatgccctgggcgtgacagacaagagcctgccccccttcatctacaggatgaggcagctgggctacccacctggctggctgaaggaggccgagctggagaacagcggcctggccctgtatgatggcaaggatggaacagatggagaaacagaggtgggggagatccagcagaacaagtctgtgacctatgacctgagcaagctggtgaactacccaggcttcaacatcagcaccccccggggcatcccagatgagtggaggatcttcggcagcatccccatgcaggcctgccagcagaaggatgtgtttgccaactacctgaccagcaacttccaggcccctggggtgaagagcggcaacaagaggagcagcagccacagcagccctggcagccccaagaagcagaagaatgaaagcaacagcgctggcagccctgctgacatggagctggacagcgacatggaggtgccccacggcagccagagcagcgagagcttccagttccagccccccctgcccccagacaccccacccctgccccggggcaccccacctcctgtgttcaccccacccctgcccaagggcaccccacccctgacccccagcgacagcccccagaccaggacagccagcggggctgtggatgaagatgccctgaccctggaggagctggaggagcagcagaggcgcatctgggccgccctggagcaggccgagagcgtgaacagcgacagtgatgtgcctgtggacacccccctgaccggcaacagcgtggccagcagcccctgccccaatgagctggacctgcctgtgcctgagggcaagaccagcgagaagcagaccctggatgagcctgaggtgcctgagatcttcaccaagaagtctgaggccggccacgccagcagcccagattctgaggtgaccagcctgtgccagaaggagaaggccgagctggcccctgtgaacacagaaggagccctgctggacaatggatctgtggtgcccaactgtgacatcagcaatggaggcagccagaagctgtttcctgctgacaccagccccagcacagccaccaagatccacagccccatcccagacatgagcaagtttgccaccggcatcaccccatttgaatttgagaacatggccgagagcacaggcatgtacctgcgcatccgcagcctgctgaagaacagccccaggaaccagcagaagaacaagaaggccagcgagtag

SEQ ID NO: 334552 - DNA, 1410 bp, Artificial Sequence
  derived and/or modified sequence
atgaaggactgccccatgccccggaacgccgcccggatcagcgagaagcgcaaagagtatatggacgcttgtggggaagccaataaccagaatttccaacagaggtaccatgctgaagaggtggaggaacggttcggccgcttcaaaccgggcgttattagtgaggagcttcaagacgccctcggtgtcactgataagagtcttcccccttttatataccggatgcgacagctgggctatccccctggttggctgaaggaagccgaactcgagaacagtggcctcgctctgtacgacgggaaggacgggactgatggcgagaccgaggtaggcgaaattcaacaaaataagagcgtgacctatgatctaagcaagcttgtgaactaccctggcttcaatatctccacacctcgcgggatccctgatgaatggcgtatttttggcagcatacccatgcaagcttgccagcagaaggatgtcttcgccaattacctgacatctaattttcaggctcccggcgtaaagtcggggaacaagcggtccagctctcacagctctccaggaagtcccaagaaacagaagaacgaaagcaactcagcaggatcacccgctgacatggagctagatagtgacatggaagtgcctcacggatcacagtcctctgaaagtttccaattccagccacccttgccccctgacacccctcctctgccccggggcaccccaccacccgttttcactccacctctgccgaaaggtaccccccctttgaccccatctgacagtccccagactcgcactgcttctggtgcagtggatgaggacgcactgacactggaggaactcgaagaacaacaaaggcgcatttgggcagctctcgaacaggctgaaagcgtgaatagcgattcagatgttccagtggacaccccgctgacgggcaattccgtcgctagcagtccatgtcctaatgagctcgatctgcccgtcccagaagggaagacaagcgagaaacagaccctggacgagccagaggtgcccgaaatcttcactaaaaaaagtgaagccggacacgccagctctccagactctgaagtcacctcgctgtgccagaaggagaaagcggagctagcccccgtgaacactgagggtgccctactggataatggcagtgtcgtgcccaattgtgatatatctaatgggggaagccagaagctgtttcccgccgacactagccccagcaccgccaccaaaatccacagcccaatacccgatatgagcaaatttgcaaccggaattactccctttgagttcgagaacatggccgagtcaactggcatgtacctccggatccgatctttgctaaagaatagcccaagaaaccaacagaagaacaagaaggcatccgagtag

SEQ ID NO: 334553 - DNA, 1410 bp, Artificial Sequence
  derived and/or modified sequence
atgaaggactgccccatgccccggaacgccgcccggatcagcgagaagcggaaagagtatatggatgcctgtggtgaagcaaataaccagaactttcagcagagataccatgctgaggaggttgaagagagattcggcagattcaagccgggagtcatcagtgaagagctgcaggacgcgctgggagttaccgataaaagtctccctccttttatctaccgcatgcggcagctcggatatccccccggctggcttaaggaggctgagctggagaatagcggtctcgcactgtacgacggtaaggacgggacagacggagaaaccgaggtcggtgagattcagcaaaacaagtcagtgacttacgacttaagtaagttagtcaactaccccggtttcaacatctctacaccacgaggcatccccgacgagtggcggatctttgggagcataccaatgcaggcatgccagcagaaagacgtcttcgccaactacttgacgtctaatttccaggctcctggcgttaaaagtgggaataagcgatccagctcacatagcagtccagggagccctaaaaagcagaaaaatgaaagcaactctgccggctccccagccgatatggagctcgacagcgacatggaagtgcctcacggcagtcagagcagtgaatctttccaattccagccccccctgcctcctgacacaccacctctgccccggggcactcctccacccgtgttcacacccccactgcccaaggggactcctcctctgacgcctagcgactctccacaaacaagaactgcatcaggcgccgtcgacgaggatgccttgactctcgaagagttggaagaacagcagaggaggatatgggctgctctggaacaggcagaaagcgtcaattcggattcagacgtaccagtagacacacccctcaccggtaattccgtggcttcctccccatgccccaatgaacttgacctgcccgtaccagaagggaaaacatctgagaagcaaacgctggacgaacctgaggtccctgaaatttttacaaagaagtccgaggccggacacgccagcagtcccgattcagaggtgacaagcttgtgccaaaaagaaaaagctgaactggcacccgtcaacacggaaggagccctgctcgacaacggaagcgtagtgccaaactgtgacattagtaacggaggttcccagaagctgttccctgccgacacttcccctagcactgcaactaagatacattcccctatcccggatatgtccaaattcgccacaggtattacacccttcgaatttgagaacatggccgagagcaccggcatgtatctgaggatacgctcactgcttaagaattctccccgaaaccaacagaagaacaagaaggccagtgaatag

SEQ ID NO: 334554 - DNA, 1410 bp, Artificial Sequence
  derived and/or modified sequence
atgaaagattgccctatgcctagaaacgcggcacgcattagtgagaagaggaaagagtatatggatgcatgtggggaagctaacaatcagaatttccagcagaggtaccacgccgaggaagttgaagaacggttcggacgatttaagccaggggtcatatctgaggagttgcaggatgcattgggcgtgacggataagagtctgccgccatttatatataggatgcggcagctcgggtaccctcctggttggttgaaggaggccgagctggagaactcgggcctggccctctacgacgggaaggacgggaccgatggggagaccgaggtcggagagatccaacagaacaaaagcgtaacatacgatttgagcaaactcgtgaattatccaggctttaacataagcacacccagggggattccagacgagtggagaattttcgggagcattccaatgcaagcttgtcagcagaaagacgtatttgccaattacttgacgtcaaactttcaagctccaggtgtgaagtccggaaacaaaaggagcagttcacattcctcccctgggtctcctaagaaacagaaaaacgaaagcaatagcgcgggtagtccagctgatatggaactcgattcagacatggaggtgcctcacggctcacagtcatctgaatcgtttcagttccagcccccactgccgcctgacacccctcccctgcccagaggaacacctccccctgtgttcactccacccctcccaaaaggcacacccccactgaccccttccgacagcccgcagactaggaccgcctctggagcagtcgatgaggatgctctcaccctagaggagcttgaagagcagcagcggagaatctgggcggctcttgagcaggctgagagcgttaattccgacagcgacgtgcctgttgatactccactgacaggcaacagcgtagcctcgtcaccctgccccaatgaactggacttgccagtcccagaggggaagacatctgagaagcagacactggacgagcccgaggtccctgagatcttcaccaagaagtccgaggctgggcacgcctcatcccctgacagcgaagttacttctctttgccaaaaggaaaaggctgagcttgcccctgtgaatacggaaggtgcattgctcgataacggttccgttgtccctaattgtgacatatccaacggcggaagccagaagctgtttcccgcagatacttccccgtccacagccaccaaaattcactcacccatccctgatatgtcaaagttcgccaccggcattaccccttttgagtttgagaacatggccgagtctaccggaatgtacttgagaataaggtccctcctgaagaattccccacggaatcaacagaagaataaaaaagctagcgagtag

SEQ ID NO: 334555 - DNA, 1410 bp, Artificial Sequence
  derived and/or modified sequence
atgaaagattgccccatgccgcgaaacgccgcacgaatctcagaaaaacggaaagaatatatggatgcctgtggggaagcaaacaatcagaacttccaacagaggtatcacgccgaagaagtcgaggaaagatttggacgttttaagcccggagtgataagcgaagaactgcaggatgccctgggcgtcaccgacaagtccttgccgccattcatctaccgcatgaggcagttgggatatccccctggttggctgaaggaggccgagcttgagaactcagggctcgcactgtacgatggcaaggatgggacagacggggaaaccgaagttggggagatccagcagaataaatctgttacttatgacttatccaagctggtaaattacccgggatttaacattagcacccctcggggaatacccgacgaatggcgcatcttcggctccattcccatgcaagcttgccaacagaaggacgttttcgcgaactacctgacatccaacttccaggctccaggagtcaagtccgggaacaagcggagctcttcccattcctcccctggaagtcccaagaagcagaagaacgagtccaatagtgctggcagccctgcagacatggaactagacagcgacatggaggtcccgcatggcagtcagtcttccgaatcctttcaatttcagccaccacttccccctgacacccctcctttgccccgagggacccctccaccagtattcacccccccactgccgaaagggacaccccctctgacacccagcgattcgccgcagaccagaaccgcatccggagcagtggacgaggatgctctgacactagaagagctggaagaacagcaaagaaggatttgggcagctctggaacaggctgagtcagtcaattcagatagtgatgtccctgtggatactcccctcacaggcaactctgtggcctctagcccctgtccaaatgaactggacctgcccgtgccagaaggtaagacctcagaaaaacagacattggacgagcctgaagtgcccgaaatcttcactaagaagtccgaggctggtcacgcaagctctccggatagtgaggttacttctctgtgccagaaggagaaagccgaactcgccccagttaacacggaaggggcacttctcgacaacggcagtgtggtccctaattgtgatatcagcaacggcggatctcagaagctgttcccagcggacacctctccatctactgcaaccaagattcacagtccaatccccgacatgtcaaaatttgcaacaggcataacaccgtttgagttcgaaaatatggccgagtccaccggcatgtacctgcgcattcgatctctcctgaaaaatagcccacggaaccagcagaaaaataagaaggcctctgagtag

SEQ ID NO: 334556 - DNA, 2904 bp, Artificial Sequence
  derived and/or modified sequence
ttgcactccagcctgggcgacagggtgagactgtgtctcaaaaaaaaaaaaaaaaagttgaaaggattctacagtggacatccatagatttattccaaattctaaagttgttaacagctcgttatactgcattctctttatcacatagtggttgttgaaaggtttgacaggaacactgatgcttcaataatggttttggttcagtttgttagtctgttgaacttcaggatcgtgtcttagaatatatgttcgaaaggataaaaaccgtactttaattttgggtttcaaaagcctacccctgcaacaaaatagaagctcaataagtgtgtcatcctcaaaatatccgtgggtcttttgtctttataatattctgacaccaaaagtgagagaagtagtagttgaattttatgatttgcattgttaaatgagggcttatcttccttaacaaataataacatcaagaacttaaacgaaaattgaacattctgactcgaccgagtggaatattggtgaacgatactaagttagatggacctatattacagattctattcatgaacaatgctatttcaaagcaatatcatcaagaaatagaggaatttgtatcaaatttagtaaaaagatttgaggaacagcagaaaaatgatgtggaaaagacttcctttaatcttttgccccagccatccagtattgtgctagaggaggaccacaaagtggaagagtcctgtgccattaaaaacaacaaggaagctttcagtgtaccatcaagtcttcagccacattgtttctctagaagggcaagaaatacaagtaaaggcaaaaaggccaaagcctcactgtttcaattgtggttctgaagaacaccaaatgaaagattgcccaatgcctcggaatgctgctcgaataagtgaaaagagaaaagagtatatggatgcctgtggagaagcaaacaatcagaatttccagcagcgataccacgcagaagaagtagaagaaagatttggaagattcaagccaggagttattagtgaggaacttcaagatgcactaggtgtgacagacaagagtcttccaccttttatctatcggatgcgccagctagggtacccaccagggtggctcaaagaggctgaattggagaattcggggcttgcactctatgatggaaaagatggcactgatggggaaacagaagttggagaaatacaacagaataaaagtgtcacttacgatctctcaaaattggtcaactatcctggttttaatatatctactcccagaggaattccagacgaatggaggatctttggttccataccaatgcaggcatgtcagcagaaggatgtgtttgccaattaccttacttctaacttccaagcgccaggtgtgaagtctggcaacaagaggtcttcatctcactctagcccaggtagtccaaagaagcagaagaatgaaagcaactcagcgggatctcccgccgacatggagctcgattcagatatggaggtaccacatggttctcagagcagcgaaagttttcagtttcaaccaccattacctcctgacactcctccactcccccggggaactcctccacccgtcttcacccctccactcccaaagggcaccccgccgctgactcccagtgactcaccccagaccagaacagcatctggagctgtggatgaggacgcactgactctagaagaacttgaagaacagcagaggcggatctgggcagctcttgagcaggccgagagcgtaaacagcgactccgacgttcctgtggacacacctttaactggcaattccgttgcctcatcaccttgtccaaatgagctagacctccctgtcccggagggaaaaacatctgaaaagcagacgctggatgagcctgaggtaccagagatttttacaaagaaatcagaagctggacatgcctccagtccagactctgaggtgacatcactttgtcagaaggaaaaagcagagttggctccggtaaacactgaaggtgcccttcttgataatggcagtgtcgtaccaaactgtgacatcagcaatgggggcagccagaagctctttcctgcagacaccagtccttcaacggccactaaaattcatagccctatacctgacatgagcaaatttgcaactggaatcacgccatttgaatttgagaatatggcagaatctactggaatgtacctcaggataagaagcttgttaaagaactcaccccgaaaccagcagaaaaacaaaaaggcctctgaataatggcttgacttagcactgagagctatttaataactttgttccgttaattagtactaattaagtggatagatagaatggttttcctgtttgtccctcccatgtttaaaaatctatccaaggttcatgttccaaagtcaagcctattttaaagaaagactgagctcactagttcagtatattttattctcactgacaaaacttggggggagatgtgaatatgacctggtttagagagggtttgttaaggtttatactatttttggattgtgactatccgtcgagagtgatggtttttatctgtcttttgtacattgttttccctttctacattttgctaattatcctgtatataagtttaatatatcactttttaaaagaaaaaattctaccattttaaattcatgtttcaactcctacaaccaaatgagaaaaatcagggatgagcagctttatcccatttggggtatttttgtaagtgatttacatgtgtcaattttagtaatacttttacttttttgtaacttcatccttcatatatgcttgctatacaggtatgttcatctttgtgtacagaggtttaataaattagttttcatatacataatctaagactttgaatacaaaaaa

SEQ ID NO: 334557 - protein, 89 aa, Artificial Sequence
  derived and/or modified sequence
MYMQDYWRTWLKGLRGFFFVGVLFSAVSIAAFCTFLVLAITRHQSLTDPTSYYLSSVWSFISFKWAFLLSLYAHRYRADFADISILSDF

SEQ ID NO: 334558 - protein, 36 aa, Artificial Sequence
  derived and/or modified sequence
MYMQDYWRTWLKGLRGFFFVGVLFSAVSIAAFCTFL

SEQ ID NO: 334559 - DNA, 577 bp, Artificial Sequence
  derived and/or modified sequence
cgtaggggaagggggccggcactggcaggctttggagtccgcacccgggggtaccagagtggacatccgcctgagcccagagtatccccagggggcaggagcggccccgaagtgtgtggaggaggccgcaacggccggggtgtcagggatccggcggtcatctgctgtgtccacacattaagaaacgctggtggagttttaaatgcctctccggggaaggaggaaagcctgagaatgaatctgacctcagacccaaatccattcaacggagttctggtaatttggaagaaggaagagcaacctggaaactgacaggaaaggatgacaagttgggagtcacaggtatatgatgggcctccccatgtggatccttagtgctgtggcagagcccttgttattgtgctgggattttccctccagctcccggccggaagctgggctcacgtgggagctcagtgccctcctgctacagatctgtctcttccttacaatggggtgctggcactgtgggtcctggtgacgcacgtgatgtacatgcaagattattggaggacctggctcaaggggctgcgcggct

SEQ ID NO: 334560 - DNA, 900 bp, Artificial Sequence
  derived and/or modified sequence
atgaaaagtcataggtgttatgacctgatcccaacttctagcaagctcgtcgtttttgacacaagcctacaagtcaaaaaagcgttctttgctctcgttactaatggcgtgcgtgctgcccccctgtgggattccaagaagcagagtttcgtgggcatgttaacaattactgacttcataaacatactgcacagatactacaagtccgcgctggtgcagatctacgagcttgaggagcacaaaatagaaacatggcgagaggtctatttgcaggacagctttaagcctttggtctgcatctcaccaaacgcatctctgtttgacgccgtgtcctccctgattcggaacaagattcaccggctgcccgtcattgatccggagtccggcaataccctctatattctgacacataaacgcatcctgaaatttctaaaattattcattactgagttccctaagcccgagttcatgagtaaatccctggaagaattgcagatcggtacctacgctaatatcgcaatggtgagaaccacaacacccgtatacgtggccctgggtatctttgtgcagcatcgggtgagcgcgcttcccgttgtcgatgagaaaggccgtgtcgtagatatctacagcaagttcgacgtgatcaatctggcagccgagaagacttataacaatctggacgtcagcgtcacaaaagccttgcagcaccgctcgcattactttgagggcgtgcttaagtgctacttgcatgagacactggaaacgattatcaacagactcgtcgaagccgaggtccatcgccttgtcgtggtggacgagaacgacgtagttaaaggcatagtcagtttgagcgatatcctgcaggccctcgtactcacagggggcgaaaagaaaccttag

SEQ ID NO: 334561 - DNA, 900 bp, Artificial Sequence
  derived and/or modified sequence
atgaagagccaccgctgctatgacctgatccccaccagcagcaagctggtggtgtttgacaccagcctgcaggtgaagaaggccttctttgccctggtgaccaatggagtgcgggccgcccccctgtgggacagcaagaagcagagctttgtgggcatgctgaccatcacagacttcatcaacatcctgcaccgctactacaagagcgccctggtgcagatctatgagctggaggagcacaagattgagacctggagggaggtgtacctgcaggacagcttcaagcccctggtgtgcatcagccccaatgccagcctgtttgatgctgtgagcagcctcatccggaacaagatccaccggctgcccgtcatcgaccctgagagcggcaacaccctgtacatcctgacccacaagaggatcctgaagttcctgaagctgttcatcacagagttccccaagccagagttcatgagcaagagcctggaggagctgcagatcggcacctacgccaacatcgccatggtgaggaccaccacccctgtgtatgtggccctgggcatctttgtgcagcaccgggtgtctgccctgcctgtggtggatgagaagggccgggtggtggacatctacagcaagtttgatgtgatcaacctggccgctgagaagacctacaacaacctggatgtgtctgtgaccaaggccctgcagcacaggagccactactttgaaggagtgctgaagtgctacctgcacgagaccctggagaccatcatcaaccggctggtggaggccgaggtgcaccggctggtggtggtggatgaaaatgatgtggtgaagggcatcgtgtccctgagtgacatcctgcaggccctggtgctgactggaggagagaagaagccctag

SEQ ID NO: 334562 - DNA, 900 bp, Artificial Sequence
  derived and/or modified sequence
atgaagagccaccggtgctacgacctgatccccaccagcagcaagctggttgttttcgacaccagtcttcaagtgaagaaagccttttttgccctcgtgaccaatggcgtcagagccgctcctctttgggacagcaagaaacagtcttttgtcgggatgcttacaataaccgatttcatcaatatccttcataggtactacaagagcgcattggtacagatctacgagttggaggagcataagattgagacctggagagaagtctaccttcaggattcttttaagccacttgtgtgtatctctcccaatgccagtctttttgatgccgtgagtagcctgattcgtaacaaaatccaccgtcttcctgtgatcgatcccgaatccggcaacactctatatatcctgactcacaagagaattctgaagttcctaaaactgtttatcactgagttcccgaaaccagagttcatgtccaaatctttggaggagctccagatcggtacctacgccaacattgcaatggtcagaaccacaacgcccgtttatgttgcccttggcatttttgtacagcatagggtttcagccctgcccgttgtcgacgagaaggggcgagttgtggacatatactccaagtttgatgtgatcaatcttgcagcggaaaagacatacaacaatctcgacgtgtccgtgaccaaagctctgcagcaccgctctcattacttcgagggtgtcctcaagtgttaccttcatgaaacactggagaccattatcaacagactggtggaggccgaagtgcacaggctggtggtggtcgacgagaacgacgtagttaaaggcatcgtgtcactctcagacatcttacaggctctagtcttgactggcggagaaaaaaagccatag

SEQ ID NO: 334563 - DNA, 900 bp, Artificial Sequence
  derived and/or modified sequence
atgaaatctcacagatgttacgacctgattccaacaagtagcaaactggtggtgttcgacacaagcctgcaggtgaagaaggcattttttgcccttgtgactaacggcgtgagagccgcacccctgtgggattccaaaaagcaaagcttcgtgggcatgctgaccatcactgattttatcaatatcctccaccggtactacaaatctgcacttgtccagatatatgaactggaagagcacaagatcgaaacgtggagagaagtgtatctgcaggatagttttaagccactagtgtgcatttctcctaacgcttcattattcgatgccgtgtcgtcactgatcagaaacaagatacatcggctccccgtgattgacccggagtctgggaacaccctctatatcctgacgcacaagagaatcctcaaattcctgaagttattcatcaccgagtttccgaagcctgagtttatgtccaaaagcttggaggaactgcagataggcacctacgctaatatcgcgatggtgaggacgactactccagtgtatgttgctctgggcatcttcgtgcagcatagggtgagcgccctacccgtggttgacgaaaaggggagggtcgtcgacatttatagcaaattcgatgttataaacttggctgccgaaaaaacatacaacaacctggatgtgtctgtgacgaaagcgctccagcaccgtagccactactttgagggggtactgaaatgctacctccacgagaccctggaaaccatcatcaacaggctggtggaagcagaggtccatcgcctagtggttgtggacgagaatgatgtcgtgaaaggcattgtgagtctgtcagacatcttacaggctcttgtgctgacaggcggagagaagaaaccatag

SEQ ID NO: 334564 - DNA, 900 bp, Artificial Sequence
  derived and/or modified sequence
atgaagagccacagatgctacgacctgatccccaccagcagcaagctggtggtgttcgacaccagcctgcaggtgaagaaggccttcttcgccctggtgaccaacggcgtgagagccgcccccctgtgggacagcaagaagcagagcttcgtgggcatgctgaccatcaccgacttcatcaacatcctgcacagatactacaagagcgccctggtgcagatctacgagctggaggagcacaagatcgagacctggagagaggtgtacctgcaggacagcttcaagcccctggtgtgcatcagccccaacgccagcctgttcgacgccgtgagcagcctgatcagaaacaagatccacagactgcccgtgatcgaccccgagagcggcaacaccctgtacatcctgacccacaagagaatcctgaagttcctgaagctgttcatcaccgagttccccaagcccgagttcatgagcaagagcctggaggagctgcagatcggcacctacgccaacatcgccatggtgagaaccaccacccccgtgtacgtggccctgggcatcttcgtgcagcacagagtgagcgccctgcccgtggtggacgagaagggcagagtggtggacatctacagcaagttcgacgtgatcaacctggccgccgagaagacctacaacaacctggacgtgagcgtgaccaaggccctgcagcacagaagccactacttcgagggcgtgctgaagtgctacctgcacgagaccctggagaccatcatcaacagactggtggaggccgaggtgcacagactggtggtggtggacgagaacgacgtggtgaagggcatcgtgagcctgagcgacatcctgcaggccctggtgctgaccggcggcgagaagaagccctag

SEQ ID NO: 334565 - protein, 171 aa, Artificial Sequence
  derived and/or modified sequence
MLVNFILRCGLLLVTLSLAIAKHKQSSFTKSCYPRGTLSQAVDALYIKAAWLKATIPEDRIKNIRLLKKKTKKQFMKNCQFQEQLLSFFMEDVFGQLQLQGCKKIRFVEDFHSLRQKLSHCISCASSAREMKSITRMKRIFYRIGNKGIYKAISELDILLSWIKKLLESSQ

SEQ ID NO: 334566 - DNA, 516 bp, Artificial Sequence
  derived and/or modified sequence
atgctggtgaacttcatcctgagatgcggcctgctgctggtgaccctgagcctggccatcgccaagcacaagcagagcagcttcaccaagagctgctaccccagaggcaccctgagccaggccgtggacgccctgtacatcaaggccgcctggctgaaggccaccatccccgaggacagaatcaagaacatcagactgctgaagaagaagaccaagaagcagttcatgaagaactgccagttccaggagcagctgctgagcttcttcatggaggacgtgttcggccagctgcagctgcagggctgcaagaagatcagattcgtggaggacttccacagcctgagacagaagctgagccactgcatcagctgcgccagcagcgccagagagatgaagagcatcaccagaatgaagagaatcttctacagaatcggcaacaagggcatctacaaggccatcagcgagctggacatcctgctgagctggatcaagaagctgctggagagcagccagtag

SEQ ID NO: 334567 - DNA, 516 bp, Artificial Sequence
  derived and/or modified sequence
atgctagttaattttatcttgcgatgcggcctcctattggttacgctgtccctcgcaatcgcgaaacacaagcaatcctctttcactaaaagctgttacccccgcgggaccctgtcccaagccgtcgacgcgctctatattaaagccgcctggttgaaagccactattcccgaagaccggattaagaatatcaggctcctgaagaaaaaaaccaaaaaacagttcatgaagaattgccagttccaggagcagctgctgtctttcttcatggaagatgtgttcgggcaattacagctgcagggatgcaaaaagatccgcttcgttgaagacttccactctttacggcaaaagttgtctcactgcatcagttgtgcatctagtgcacgggagatgaagtctatcacccggatgaagcgcatattctacaggattggcaacaagggcatttataaggcaatttctgagctcgacatcctcctgtcctggattaagaaactgcttgagtcatctcagtag

SEQ ID NO: 334568 - DNA, 516 bp, Artificial Sequence
  derived and/or modified sequence
atgctggtgaacttcatcctgcgctgtggcctgctgctggtgaccctgagcctggccatcgccaagcacaagcagagcagcttcaccaagagctgctacccccggggcaccctgagccaggccgtggatgccctgtacatcaaggccgcctggctgaaggccaccatccctgaggaccgcatcaagaacatccggctgctgaagaagaagaccaagaagcagttcatgaagaactgccagttccaggagcagctgctgtccttcttcatggaggatgtgtttggccagctgcagctgcagggctgcaagaagatccgctttgtggaggacttccacagcctgcggcagaagctgagccactgcatcagctgtgccagcagcgcccgggagatgaagagcatcaccaggatgaagaggatcttctaccgcatcggcaacaagggcatctacaaggccatcagcgagctggacatcctgctgtcctggatcaagaagctgctggagagcagccagtag

SEQ ID NO: 334569 - DNA, 516 bp, Artificial Sequence
  derived and/or modified sequence
atgctggtgaacttcatcctgcggtgcggcctgctgctggtgaccctatcattggctattgcaaaacataaacagagttctttcacaaagtcttgttatccccgcgggacactttcccaggctgtcgacgctctctacattaaagccgcctggctcaaggctacaattccggaggatcgaatcaaaaacattcggcttctcaagaagaaaacgaaaaagcagttcatgaagaactgccagttccaggagcagctgctgagcttcttcatggaggacgtgttcggtcagctgcagttgcaagggtgcaaaaagatcagatttgtagaggacttccacagcctgaggcagaaattgtctcactgtataagttgcgcatcctctgctcgcgagatgaagagtatcaccaggatgaaacgtattttttatcggatcggcaacaaaggaatatataaggctatttccgagctcgatatcctcctctcctggatcaaaaaactcctggagtcatctcaatag

SEQ ID NO: 334570 - DNA, 516 bp, Artificial Sequence
  derived and/or modified sequence
atgctggttaactttatcctccgatgcggcctgttgttagttacgctgtccctggcgattgccaagcacaagcaaagctcttttactaagagctgctatcctagggggaccttgtcacaagctgtggatgctttgtacattaaggccgcttggctgaaagctactatccctgaggaccgaataaagaatatacggctgctaaagaaaaagaccaaaaagcagtttatgaagaactgtcagtttcaggaacagctgctctcattttttatggaagacgtgtttggacaacttcagctgcaaggttgcaaaaagatccggtttgtggaggacttccacagcctgcggcagaagctgtcccactgcatcagttgtgctagcagcgcgagagagatgaagtccataacaaggatgaaaagaatcttttacaggatcggcaacaaaggcatttataaggccatctcagagttagacatccttctgtcttggattaaaaagttactcgagtcgtcgcagtag

SEQ ID NO: 334571 - DNA, 1075 bp, Artificial Sequence
  derived and/or modified sequence
atctaaccggcattagtatctcttgggctgctgtgagtgacacacgctgagtggggtgaagggaaatgctggtgaatttcattttgaggtgtgggttgctgttagtcactctgtctcttgccattgccaagcacaagcaatcttccttcaccaaaagttgttacccaaggggaacattgtcccaagctgttgacgctctctatatcaaagcagcatggctcaaagcaacgattccagaagaccgcataaaaaatatacgattattaaaaaagaaaacaaaaaagcagtttatgaaaaactgtcaatttcaagaacagcttctgtccttcttcatggaagacgtttttggtcaactgcaattgcaaggctgcaagaaaatacgctttgtggaggactttcatagccttaggcagaaattgagccactgtatttcctgtgcttcatcagctagagagatgaaatccattaccaggatgaaaagaatattttataggattggaaacaaaggaatctacaaagccatcagtgaactggatattcttctttcctggattaaaaaattattggaaagcagtcagtaaaccaaagccaagtacattgattttacagttattttgaaatacaataagaactgctagaaatatgtttataacagtctatttcttttaaaaactttttaacataatactgacggcatgttaggtgattcagaatagacaagaaggatttagtaaattaacgttttggatataagttgtcactaatttgcacattttctgtgttttcaaataatgtttccattctgaacatgttttgtcattcacaagtacattgtgtcaacttaatttaaagtatgtaacctgaattaactcgtgtaatatttgtgtgtggagtgggatgtggggggtggagggggaatgacagatttctggaatgcaatgtaatgttactgagacttaaatagatgttatgtatatgattgtctgtttaagtgtttgaaaattgttaattatgcccagtgtgaacttagtacttaacacattttgattttaattaaataaattgggtttccttc

SEQ ID NO: 334572 - protein, 392 aa, Artificial Sequence
  derived and/or modified sequence
MKDTLGQAQQRVAELEPLKEQLRGAQELAASSQQKATLLGEELASAAAARDRTIAELHRSRLEVAEVNGRLAELGLHLKEEKCQWSKERAGLLQSVEAEKDKILKLSAEILRLEKAVQEERTQNQVFKTELAREKDSSLVQLSESKRELTELRSALRVLQKEKEQLQEEKQELLEYMRKLEARLEKVADEKWNEDATTEDEEAAVGLSCPAALTDSEDESPEDMRLPPYGLCERGDPGSSPAGPREASPLVVISQPAPISPHLSGPAEDSSSDSEAEDEKSVLMAAVQSGGEEANLLLPELGSAFYDMASTIFCRAQIALLPLSPASTPSPTTSGFTVGTLSETSTGGPATPTWKECPICKERFPAESDKDALEDHMDGHFFFSTQDPFTFE

SEQ ID NO: 334573 - protein, 218 aa, Artificial Sequence
  derived and/or modified sequence
MDELVTLEEADGGSDILLVVPKATVLQNQLDESQQERNDLMQLKLQLEGQVTELRSRVQELERALATARQEHTELMEQYKGISRSHGEITEERDILSRQQGDHVARILELEDDIQTISEKVLTKEVELDRLRDTVKALTREQEKLLGQLKEVQADKEQSEAELQVAQQENHHLNLDLKEAKSWQEEQSAQAQRLKDKVAQMKDTLGQAQQRVRPSWSP

SEQ ID NO: 334574 - DNA, 1179 bp, Artificial Sequence
  derived and/or modified sequence
atgaaggacaccctgggccaggcccagcagagagtggccgagctggagcccctgaaggagcagctgagaggcgcccaggagctggccgccagcagccagcagaaggccaccctgctgggcgaggagctggccagcgccgccgccgccagagacagaaccatcgccgagctgcacagaagcagactggaggtggccgaggtgaacggcagactggccgagctgggcctgcacctgaaggaggagaagtgccagtggagcaaggagagagccggcctgctgcagagcgtggaggccgagaaggacaagatcctgaagctgagcgccgagatcctgagactggagaaggccgtgcaggaggagagaacccagaaccaggtgttcaagaccgagctggccagagagaaggacagcagcctggtgcagctgagcgagagcaagagagagctgaccgagctgagaagcgccctgagagtgctgcagaaggagaaggagcagctgcaggaggagaagcaggagctgctggagtacatgagaaagctggaggccagactggagaaggtggccgacgagaagtggaacgaggacgccaccaccgaggacgaggaggccgccgtgggcctgagctgccccgccgccctgaccgacagcgaggacgagagccccgaggacatgagactgcccccctacggcctgtgcgagagaggcgaccccggcagcagccccgccggccccagagaggccagccccctggtggtgatcagccagcccgcccccatcagcccccacctgagcggccccgccgaggacagcagcagcgacagcgaggccgaggacgagaagagcgtgctgatggccgccgtgcagagcggcggcgaggaggccaacctgctgctgcccgagctgggcagcgccttctacgacatggccagcaccatcttctgcagagcccagatcgccctgctgcccctgagccccgccagcacccccagccccaccaccagcggcttcaccgtgggcaccctgagcgagaccagcaccggcggccccgccacccccacctggaaggagtgccccatctgcaaggagagattccccgccgagagcgacaaggacgccctggaggaccacatggacggccacttcttcttcagcacccaggaccccttcaccttcgagtag

SEQ ID NO: 334575 - DNA, 3118 bp, Artificial Sequence
  derived and/or modified sequence
cgcagaagaaccacaaaccccagaagccctcgcgcccactcttctccctcccctccagaagtcggagtgctgtttttgttgttggtgaaaggtgaggggaacagctgatccgtctgttgggaggacagatatctcaaggccaggatggaagaatcaccactaagccgggcaccatcccgtggtggagtcaactttctcaatgtagcccggacctacatccccaacaccaaggtggaatgtcactacacccttcccccaggcaccatgcccagtgccagtgactggattggcatcttcaaggtggaggctgcctgtgttcgggattaccacacatttgtgtggtcttccgtgcctgaaagtacaactgatggttcccccattcacaccagtgtccagttccaagccagctacctgcccaaaccaggagctcagctctaccagttccgatatgtgaaccgccagggccaggtgtgtgggcagagcccccctttccagttccgagagccaaggcccatggatgaactggtgaccctggaggaggctgatgggggctctgacatcctgctggttgtccccaaggcaactgtgttacagaaccagctcgatgagagccagcaagaacggaatgacctgatgcagctgaagctacagctggagggacaggtgacagagctgaggagccgagtgcaggagctcgagagggctctggcaactgccaggcaggagcacacggagctgatggaacagtacaaggggatttcccggtcccatggggagatcacagaagagagggacatcctgagccggcaacagggagaccatgtggcacgcatcctggagctagaggatgacatccagaccatcagtgagaaagtgctgacgaaggaagtggagctggacaggcttagagacacagtgaaggccctgactcgggaacaagagaagctccttgggcaactgaaagaagtacaagcagacaaggagcaaagtgaggctgagctccaagtggcacaacaggagaaccatcacttaaatttggacctgaaggaggcgaagagctggcaagaggagcagagtgctcaggctcagcgactgaaagacaaggtggcccagatgaaggacaccctaggccaggcccagcagcgggtggccgagctggagcccttgaaggagcagcttcgaggggcccaggagcttgcagcctcaagccagcagaaagccacccttcttggggaggagttggccagtgcagcagcagccagggaccgcaccatagccgaactacaccgcagccgcctggaagtggctgaagttaacggcaggctggctgagctcggtttgcacttgaaggaagaaaaatgccaatggagcaaggagcgggcagggctgctgcagagtgtggaggcagagaaggacaagatcctgaagctgagtgcagagatacttcgattggagaaggcagttcaggaggagaggacccaaaaccaagtgttcaagactgagctggcccgggagaaggattctagcctggtacagttgtcagaaagtaagcgggagctgacagagctgcggtcagccctgcgtgtgctccagaaggaaaaggagcagttacaggaggagaaacaggaattgctagagtacatgagaaagctagaggcccgcctggagaaggtggcagatgagaagtggaatgaggatgccaccacagaggatgaggaggccgctgtggggctgagctgcccggcagctctgacagactcagaggacgagtccccagaagacatgaggctcccaccctatggcctttgtgagcgtggagacccaggctcctctcctgctgggcctcgagaggcttctccccttgttgtcatcagccagccggctcccatttctcctcacctctctgggccagctgaggacagtagctctgactcggaggctgaagatgagaagtcagtcctgatggcagctgtgcagagtgggggtgaggaggccaacttactgcttcctgaactgggcagtgccttctatgacatggccagcaccatcttctgcagagcccaaattgccctgcttcccctctctcctgcctctaccccttccccaaccaccagtggctttacagtgggtaccctgtcagaaaccagcactgggggccctgccacccccacatggaaggagtgtcctatctgtaaggagcgctttcctgctgagagtgacaaggatgccctggaggaccacatggatggacacttctttttcagcacccaggaccccttcacctttgagtgatcttactccctcgtacatgcacaaatacacactcatgcacacacacactcacacacatgcatacacttaggtttcatgcccattttctatcacactgggctccatgatattctgttccctaagaactgcttctgtgtgccctgttttcatcccaagatttctcacttcatcctctcctacctggctcttttgtcccagggaggggtcctgttcggaagcagtggctgaatttatcccctgaaagtggttttggaggaaccgggatggaggaggccttcccctgtgggaatagaatcgtccactcctagccctggttgcttctgatacacagccactgcacacacacactcacactcacactcccttgtctgatgccccaaagccaattcctggggcaccctaccctctcttatttggagtttccgttggtttacctgagttttctctggggtctgcacagaggcagcagcatggacatcatggcctctcaggtcccttttggttctcagtttcattggttcctctttctgttcccccattgacttctgtgccccaccctagccttttccataaccttaggtattcagtttggaggggttttttgtatttttgaggattcctgtattctgtatcctctcctcgcatctcctcacatggaaagaaataatgtatttgtgccttctgtgaggaatggggggaacaagtggtcccaggtatccccatttccaaggcccccctccctctccaggtccccccacagcaataaaagcttccccctgatatccatccctttgtagtttgaacaaatatatttatatgatatgta

SEQ ID NO: 334576 - DNA, 1902 bp, Artificial Sequence
  derived and/or modified sequence
atggaggagagccccctgagcagagcccccagcagaggcggcgtgaacttcctgaacgtggccagaacctacatccccaacaccaaggtggagtgccactacaccctgccccccggcaccatgcccagcgccagcgactggatcggcatcttcaaggtggaggccgcctgcgtgagagactaccacaccttcgtgtggagcagcgtgcccgagagcaccaccgacggcagccccatccacaccagcgtgcagttccaggccagctacctgcccaagcccggcgcccagctgtaccagttcagatacgtgaacagacagggccaggtgtgcggccagagcccccccttccagttcagagagcccagacccatggacgagctggtgaccctggaggaggccgacggcggcagcgacatcctgctggtggtgcccaaggccaccgtgctgcagaaccagctggacgagagccagcaggagagaaacgacctgatgcagctgaagctgcagctggagggccaggtgaccgagctgagaagcagagtgcaggagctggagagagccctggccaccgccagacaggagcacaccgagctgatggagcagtacaagggcatcagcagaagccacggcgagatcaccgaggagagagacatcctgagcagacagcagggcgaccacgtggccagaatcctggagctggaggacgacatccagaccatcagcgagaaggtgctgaccaaggaggtggagctggacagactgagagacaccgtgaaggccctgaccagagagcaggagaagctgctgggccagctgaaggaggtgcaggccgacaaggagcagagcgaggccgagctgcaggtggcccagcaggagaaccaccacctgaacctggacctgaaggaggccaagagctggcaggaggagcagagcgcccaggcccagagactgaaggacaaggtggcccagatgaaggacaccctgggccaggcccagcagagagtggccgagctggagcccctgaaggagcagctgagaggcgcccaggagctggccgccagcagccagcagaaggccaccctgctgggcgaggagctggccagcgccgccgccgccagagacagaaccatcgccgagctgcacagaagcagactggaggtggccgaggtgaacggcagactggccgagctgggcctgcacctgaaggaggagaagtgccagtggagcaaggagagagccggcctgctgcagagcgtggaggccgagaaggacaagatcctgaagctgagcgccgagatcctgagactggagaaggccgtgcaggaggagagaacccagaaccaggtgttcaagaccgagctggccagagagaaggacagcagcctggtgcagctgagcgagagcaagagagagctgaccgagctgagaagcgccctgagagtgctgcagaaggagaaggagcagctgcaggaggagaagcaggagctgctggagtacatgagaaagctggaggccagactggagaaggtggccgacgagaagtggaacgaggacgccaccaccgaggacgaggaggccgccgtgggcctgagctgccccgccgccctgaccgacagcgaggacgagagccccgaggacatgagactgcccccctacggcctgtgcgagagaggcgaccccggcagcagccccgccggccccagagaggccagccccctggtggtgatcagccagcccgcccccatcagcccccacctgagcggccccgccgaggacagcagcagcgacagcgaggccgaggacgagaagagcgtgctgatggccgccgtgcagagcggcggcgaggaggccaacctgctgctgcccgagctgggcagcgccttctacgacatggccagatag

SEQ ID NO: 334577 - DNA, 1179 bp, Artificial Sequence
  derived and/or modified sequence
atgaaggacaccctagggcaggcccagcagcgtgtagcagaactggagcctttgaaggaacaactgcgcggagctcaggaacttgctgcatcatctcagcagaaggctacactgctgggggaggagctagcctccgcagcggcagctcgcgatagaacaattgctgagctgcaccggagcagactggaggtggcagaagtaaatggtcggctcgcagagttagggctgcacctgaaagaagagaagtgccagtggagcaaggagcgagccggcttgttgcaatccgtggaagccgagaaggacaagattcttaagctgagtgccgaaattctcaggctcgaaaaagcagtccaggaagagaggacacagaatcaagtgttcaaaacagagttggcacgagagaaggattcatctttagtgcagttaagcgagagtaaaagggagttgacagaactgcgctccgcactgagggtgctacaaaaggagaaagagcagcttcaggaggaaaagcaggaactgctcgaatatatgaggaagctggaggcacgcctggaaaaagtggccgacgagaaatggaatgaggacgcaaccaccgaggatgaagaggctgcagtgggcctctcctgtcccgcagccttaaccgacagcgaggacgaatcacccgaagacatgaggttacctccatacggcctctgcgaacgtggcgacccaggttcctccccagcagggccacgtgaggccagccccttagtggtgatttcacagcctgctcctatttctccacacctgagcggccctgctgaagattcttcatctgatagcgaggccgaggacgaaaagtccgtattaatggccgccgtccagtctggaggtgaggaggcgaatctactgttgccggagcttggatccgccttctatgacatggctagtactatattctgccgggcccaaattgctctgctacccctttcccccgccagcacaccatcccccacgacatctgggttcacagtgggcaccctgagcgagaccagcaccggcggtcccgccacccccacttggaaagaatgtcctatatgcaaagaacgtttccctgccgaatctgataaggacgctttagaagaccacatggacggccacttcttttttagcactcaggatcctttcacatttgagtag

SEQ ID NO: 334578 - DNA, 1902 bp, Artificial Sequence
  derived and/or modified sequence
atggaggaaagccctctgtcacgcgccccaagccgggggggagtaaattttctgaacgtggcacggacttacataccgaatacaaaggtggagtgccattacaccctccccccaggaactatgccatccgcaagcgactggatcgggatcttcaaggtcgaggccgcgtgcgtccgcgactaccatacatttgtatggtcctccgtgccagagagcacaacggacggtagccccatccacacttcggtgcagtttcaggcatcctacctgccaaaacccggagcccaactgtaccaatttaggtatgtgaatcggcaggggcaggtctgcggacagtccccaccctttcagttccgggaaccacgaccaatggatgaattggtcactttagaagaggccgacggaggttccgatatcctcctagtcgtcccaaaggcaaccgtgcttcagaatcaactggacgagtcacagcaggagaggaacgacctcatgcagcttaagttgcagctcgaggggcaagttactgaactacgctcgcgggttcaagaacttgagcgagctctggcaacagcacgccaggaacacaccgagctcatggagcaatacaaaggaatttcacggagccatggcgagatcaccgaagagcgggacattctgtcgagacagcagggtgaccatgttgcccgcatccttgagctcgaggacgatattcagaccatcagtgaaaaggttctgaccaaagaagtggagctggatcgtcttagggacacggtcaaagcgctgacacgcgagcaagagaagctgctgggacaactgaaagaggtccaggccgataaagagcaaagcgaagctgagctgcaagtcgcccagcaggaaaaccatcacctcaatctggatctcaaggaagcgaagagctggcaggaagagcagtccgcccaggcccagcggcttaaggacaaagttgcgcagatgaaggacacgttgggccaagcccaacagagagtggccgaactagagcccctgaaggagcagctgagaggcgctcaagaattggccgccagcagtcaacagaaggccacacttcttggcgaggagctggcttctgccgccgcagcacgcgaccgcacgattgcggagcttcatcgatcacgcctggaagtcgctgaggtaaatggtaggctcgctgaactgggcctgcatttgaaggaagaaaagtgtcagtggagtaaggagcgagccgggctactgcagagcgtagaggccgagaaagacaagatcctgaaactgagcgcagaaattctgagactggagaaagcagtgcaggaggaaaggacccagaatcaggtatttaagaccgagctggccagagaaaaagactcttccttagtgcagctttccgagagcaaacgtgagctgaccgagctccgctccgcgttgagagtcctgcagaaggaaaaggaacagctgcaggaggaaaagcaagagctccttgaatatatgaggaaactagaggccagactggagaaagtcgcagacgagaagtggaatgaggacgccaccaccgaggatgaggaagccgccgtggggctcagttgtcccgcagccttgaccgatagcgaagatgagagtcctgaggacatgaggctacccccttatggattatgcgaacgcggcgacccaggaagctctcctgctggacctagagaagcctcccccttagtagtgattagccagcctgcccccataagcccacacctttctgggcccgcagaggacagtagcagtgatagtgaagctgaagacgaaaagagtgtcctgatggccgccgtgcaatccggcggagaggaggccaatctgttgcttcctgagctgggatccgcgttttacgacatggctaggtag

SEQ ID NO: 334579 - DNA, 1179 bp, Artificial Sequence
  derived and/or modified sequence
atgaaggacaccctgggccaggcccagcagagggtggccgagctggagcccctgaaggagcagctgcggggggcccaggagctggccgccagcagccagcagaaggccaccctgctgggggaggagctggccagcgctgctgctgcccgggacaggaccatcgccgagctgcacaggagccggctggaggtggccgaggtgaatggccgcctggccgagctgggcctgcacctgaaggaggagaagtgccagtggagcaaggagcgggccggcctgctgcagagcgtggaggccgagaaggacaagatcctgaagctgtctgctgagatcctgcggctggagaaggctgtgcaggaggagaggacccagaaccaggtgttcaagacagagctggcccgggagaaggacagcagcctggtgcagctgtctgagagcaagcgggagctgacagagctgcggagcgccctgcgggtgctgcagaaggagaaggagcagctgcaggaggagaagcaggagctgctggagtacatgaggaagctggaggcccggctggagaaggtggctgatgagaagtggaatgaagatgccaccacagaagatgaggaggccgctgtgggcctgagctgcccagctgccctgacagacagtgaagatgagagccctgaggacatgaggctgcccccctacggcctgtgtgagcggggggaccccggcagcagccctgctggcccccgggaggccagccccctggtggtgatcagccagcctgcccccatcagcccccacctgagcggccctgctgaggacagcagcagtgacagcgaggctgaagatgagaagtctgtgctgatggctgctgtgcagagcggcggggaggaggccaacctgctgctgcctgagctgggcagcgccttctatgacatggccagcaccatcttctgccgggcccagatcgccctgctgcccctgagccctgccagcacccccagccccaccaccagcggcttcaccgtgggcaccctgtctgagaccagcactggaggccctgccacccccacctggaaggagtgccccatctgcaaggagcgcttccctgctgagagtgacaaggatgccctggaggaccacatggatggccacttcttcttcagcacccaggaccccttcacctttgaatag

SEQ ID NO: 334580 - DNA, 1902 bp, Artificial Sequence
  derived and/or modified sequence
atggaggagagccccctgagccgggcccccagcagaggaggagtgaacttcctgaatgtggcccggacctacatccccaacaccaaggtggagtgccactacaccctgcccccaggcaccatgcccagcgccagtgactggattggcatcttcaaggtggaggccgcctgtgtgcgggactaccacacctttgtgtggagctctgtgcctgagagcaccacagatggcagccccatccacacctctgtgcagttccaggccagctacctgcccaagccaggggcccagctgtaccagttccgctacgtgaaccggcagggccaggtgtgtggccagagcccccccttccagttccgggagccccggcccatggatgagctggtgaccctggaggaggctgatggcggcagtgacatcctgctggtggtgcccaaggccaccgtgctgcagaaccagctggatgagagccagcaggagagaaatgacctgatgcagctgaagctgcagctggagggccaggtgacagagctgcggagccgggtgcaggagctggagcgggccctggccacagcccggcaggagcacacagagctgatggagcagtacaagggcatcagccgcagccatggagagatcacagaggagcgggacatcctgagccggcagcagggcgaccacgtggcccgcatcctggagctggaggatgacatccagaccatcagcgagaaggtgctgaccaaggaggtggagctggaccggctgcgggacacagtgaaggccctgacccgggagcaggagaagctgctgggccagctgaaggaggtgcaggccgacaaggagcagagcgaggccgagctgcaggtggcccagcaggagaaccaccacctgaacctggacctgaaggaggccaagtcctggcaggaggagcagagcgcccaggcccagaggctgaaggacaaggtggcccagatgaaggacaccctgggccaggcccagcagagggtggccgagctggagcccctgaaggagcagctgcggggggcccaggagctggccgccagcagccagcagaaggccaccctgctgggggaggagctggccagcgctgctgctgcccgggacaggaccatcgccgagctgcacaggagccggctggaggtggccgaggtgaatggccgcctggccgagctgggcctgcacctgaaggaggagaagtgccagtggagcaaggagagagctggcctgctgcagagcgtggaggccgagaaggacaagatcctgaagctgtctgctgagatcctgcggctggagaaggctgtgcaggaggagaggacccagaaccaggtgttcaagacagagctggcccgggagaaggacagcagcctggtgcagctgtctgagagcaagcgggagctgacagagctgcggagcgccctgcgggtgctgcagaaggagaaggagcagctgcaggaggagaagcaggagctgctggagtacatgaggaagctggaggcccggctggagaaggtggctgatgagaagtggaatgaagatgccaccacagaagatgaggaggccgctgtgggcctgagctgcccagctgccctgacagattctgaagatgagagccctgaggacatgaggctgcccccctacggcctgtgtgagcggggggaccccggcagcagccctgctggcccccgggaggccagccccctggtggtgatcagccagcctgcccccatcagcccccacctgagcggccctgctgaggacagcagcagtgacagcgaggccgaggatgagaagtctgtgctgatggctgctgtgcagagcggcggggaggaggccaacctgctgctgcctgagctgggcagcgccttctatgacatggccaggtag

SEQ ID NO: 334581 - DNA, 1179 bp, Artificial Sequence
  derived and/or modified sequence
atgaaggacaccctgggccaggcccagcagcgggtggccgagctggagcccctcaaggaacaactgagaggggcccaagagctggccgcctcatcccaacagaaagcaaccttgctaggggaagaactggctagcgcggccgccgcccgcgaccgtacaatagccgagttacacaggagtaggttagaagtggcagaagtcaacggaagactggccgagttaggattacacttgaaggaggagaagtgtcaatggtctaaggagcgtgccgggcttctgcagagcgtagaggcggagaaggataagatcctcaagctttctgccgaaatacttcgtctggaaaaagcagtgcaggaagaacgcacccaaaaccaggtttttaagactgaattagctcgtgaaaaggattctagcttggttcagctgagcgaaagtaagagagagctcacagaattaaggagcgcacttagggtgctccagaaggaaaaggagcagctacaggaagagaaacaggaattgttggagtacatgaggaagctggaagcccgcctggagaaagtggccgacgagaagtggaacgaagatgccacaactgaagacgaggaggccgcagtgggactctcatgccccgcagctcttacagactcagaagatgagagcccagaggatatgcgccttcctccctacggcctttgtgagagaggagatccaggaagctctcccgcaggcccccgcgaggcaagcccacttgtggtaatctcacagcctgcaccaatttccccacatctcagtggtcctgccgaggactctagctccgacagcgaagcagaggatgaaaagtccgtgctgatggcggccgtccaatccggcggcgaggaagctaacttgctcctgccagagctcggatccgccttttacgacatggcttcaacgatcttctgcagagcacaaattgctcttttacctttatctccagcttccactcccagccctacaacttcgggattcacagtcggaacactcagtgagacaagcactggagggcccgccacccctacttggaaagaatgtcccatttgcaaagagcgatttcccgccgagtcggataaagacgccctcgaggatcacatggacgggcattttttcttctccactcaagatccttttacgttcgaatag

SEQ ID NO: 334582 - DNA, 1902 bp, Artificial Sequence
  derived and/or modified sequence
atggaggagagccccctgagccgggcccccagccggggcggcgtgaactttctcaatgtcgcacgcacctatatccctaatactaaggttgaatgtcactacacactcccacctggaactatgcccagtgcctccgactggattgggattttcaaagtggaggcagcgtgtgtacgggattatcacacatttgtttggagctcggtgccggaatccacgaccgatgggtctccaatccatactagcgttcaattccaggcttcctacctgccgaaaccaggagctcagttgtatcagtttagatatgttaaccgacagggccaggtgtgtgggcagtccccacccttccagttccgggagcctcggcctatggacgagttagtaaccctcgaggaggcagatgggggctcagatatcctgctggtggtgccaaaagccacggttctccagaatcagctggacgagtctcaacaagagagaaatgacctcatgcaattgaaactgcagcttgagggtcaggtaacagaactgagaagtagggtgcaggagctggaacgggccctcgccactgccagacaggagcacaccgagttgatggagcagtacaaaggaatcagccgaagtcatggcgaaataacagaagaacgggatatcctttccagacaacagggagaccacgtcgccagaatcttggaattagaggacgacatccagacaatcagcgagaaggttttgactaaggaggtcgagctggataggcttagagacaccgtgaaagcactcacacgtgaacaggagaagctgctcggccagttaaaagaagtccaggccgataaggagcagtctgaagccgaactccaagtagctcaacaggaaaatcatcatctgaacctggacctgaaggaggccaaatcttggcaggaagagcagtccgcccaagcccagcgcctcaaagacaaagttgcccagatgaaagatacactggggcaagctcagcagcgggtggctgagctggaaccgttgaaagaacagctccgtggggcccaggaactagcagcaagctctcagcagaaagccacactgctcggtgaagagctggcctctgctgccgctgccagggataggaccattgcggaactgcacaggagccgtttggaagtggctgaagtcaatggtcgtcttgcagagctgggtctgcacttgaaagaggagaagtgtcagtggtccaaggagcgcgccggactgctgcaaagcgtggaagcagaaaaggataaaattctgaagttgtccgcagagatactgcgcttggaaaaggccgttcaggaggagcgcacccaaaatcaggtctttaaaaccgagctggctagagaaaaggattcatccctggtccaattgtccgagagcaagcgtgaactcactgagctgcgctctgcgcttagggttctgcaaaaggaaaaagagcagttacaggaagagaagcaggagttgctggaatacatgcggaaactggaggccagattggaaaaggtagctgacgaaaaatggaatgaggacgcaactacagaggatgaggaggccgcagttggcttgtcttgcccggcggccctaactgatagcgaagacgagtcaccagaagatatgagattgcccccgtatggactgtgcgaaagaggagatccaggctctagcccagcagggccccgcgaggcaagcccgctcgtcgtgattagccaacctgcaccaatatccccgcacttgtcaggccccgctgaggactccagctccgacagcgaagccgaagacgaaaagtccgtgttgatggccgcagtccaatctggaggtgaagaggctaatttgctcttgcccgaactcggatctgccttttacgacatggccagatag

SEQ ID NO: 334583 - DNA, 1179 bp, Artificial Sequence
  derived and/or modified sequence
atgaaagatacactcgggcaggcccagcaaagggtcgccgagttggagcctctcaaagagcaactccgtggcgcacaggagctggccgcttctagtcaacagaaggctaccctgctgggggaggaattggcgtcagcagcagcggcacgtgatcgcactatcgcagagttgcatcgttctagactcgaggtcgctgaagtcaacgggcgtctggccgagctgggattacatctgaaagaagagaagtgccagtggagcaaggagcgggctgggcttctgcagtcagtggaggcggagaaggacaaaatattgaagctgagtgccgaaattctgcgtctcgagaaggccgtgcaagaggaacggacccaaaaccaggtgtttaaaaccgagctggctagagaaaaggacagttccctggtgcagctctccgaatcaaagcgcgagctgaccgaactaaggtcagcattgagggtcctccagaaggagaaggagcagctgcaagaagaaaagcaagagctgctcgagtatatgaggaaacttgaggctagattggagaaagtggccgacgagaagtggaacgaggatgccacgactgaggatgaagaggcggcagtgggtttatcttgccctgctgcactgacagactcagaagatgagagtccagaggacatgagactgccaccttacggcctctgtgaaaggggcgatcctggatcatcccccgctgggcctcgcgaggcaagccctcttgtggttatctcccagccggcaccaatcagccctcacttgagtggaccagcggaagacagctccagtgatagcgaagcggaagatgagaaatccgtgctgatggccgcagtgcaaagcggaggcgaggaggcaaatctgctgttgccagaattgggaagcgccttctacgacatggcttcgaccatcttttgccgggctcagattgcccttttgcctctgtcgcctgctagcaccccatctccgactaccagcggcttcaccgtgggcaccctgagcgagacgtcaaccggcggtcccgctactcctacttggaaagagtgccccatttgcaaggaacggtttcctgcagagtctgataaggatgccctggaagaccatatggatggccatttcttcttttctactcaggatccatttacctttgagtag

SEQ ID NO: 334584 - DNA, 1902 bp, Artificial Sequence
  derived and/or modified sequence
atggaggagtctccattgtctcgagcaccctcccgcggaggggtgaatttcctgaacgtcgcaagaacgtatatccccaacaccaaggttgagtgtcactatacactgccgcctggcaccatgcctagtgcatctgattggattggtattttcaaggtggaggccgcttgcgttcgggattaccacactttcgtttggtcaagcgttcccgaatcaactactgacggatcaccaatccataccagcgtgcagttccaggcttcttatctgcccaaacccggtgcacagctgtaccaatttagatatgtgaacagacaaggacaagtatgcggccagtcacctccctttcagttccgggagccccgtcccatggacgaactggtgacactggaggaagccgacggcggatccgacatcctgctggtggtccccaaggcgacggtgttgcagaaccagttggacgaatcacaacaagaacgcaacgacctcatgcagctgaagctgcaactcgaaggacaggtaacagagctccggtcccgggtgcaagagctggagcgagcactcgcaacagcacggcaggaacacaccgagctgatggaacagtataaaggaataagcaggtcccacggtgagatcaccgaggagagagacattctgagcagacaacagggggatcacgttgctcgcatcctggaattagaagacgacatccagactatcagtgagaaggttcttactaaagaggtagagcttgacaggttgagggatactgtcaaggcccttaccagagaacaagagaaattgttgggacagttgaaggaagttcaggccgataaagaacagagcgaggctgagctccaagtagcgcagcaagagaaccatcacttaaacctggatctgaaggaggctaaaagctggcaagaagaacagagtgctcaggcacagcgtctaaaggataaggttgctcaaatgaaagatactcttggacaggcacaacagagagtcgccgagttggagcctttgaaggaacaacttagaggagcacaggaactggctgcatcgtcccagcaaaaggcaactttgcttggcgaggaactcgcctctgccgctgccgcacgcgatagaacaattgcagaactccatagaagcagactggaagtagctgaggtcaatgggagattagccgagttgggcctgcatttgaaagaagaaaagtgtcaatggagtaaggagcgtgccggtctcttgcagtcagtggaggcagaaaaggacaagatcttgaaacttagcgcggagatcctgagactggaaaaggccgtgcaggaggagaggacccaaaatcaggtgttcaagaccgagctggcaagggaaaaggatagttctctggtacaactgtcggaatcaaagcgggagctgaccgagctaagatctgccctgcgggtgttgcaaaaggaaaaggagcagctccaggaggaaaagcaagagctgctagaatacatgcgaaaactggaggctcgccttgagaaagttgcagacgaaaagtggaatgaagacgcaaccactgaggatgaggaggcggctgtgggcctgagctgtcccgcagctttaactgactcggaggacgagtctcccgaggatatgagattacctccctacgggctgtgtgaacggggtgatccgggttccagtcctgccggtccgagagaagcttcccccttggtggtcattagccagccggcacctatctccccccatttgagtgggcctgcagaagattcctctagtgacagcgaggctgaagatgaaaagtcggtccttatggcggcagtgcaaagtggaggcgaggaggccaatctgttattgcccgaactgggatctgccttctatgacatggcccgttag

SEQ ID NO: 334585 - DNA, 3888 bp, Artificial Sequence
  derived and/or modified sequence
ggggaacagctgatccgtctgttgggaggacagatatctcaaggccaggatggaagaatcaccactaagccgggcaccatcccgtggtggagtcaactttctcaatgtagcccggacctacatccccaacaccaaggtggaatgtcactacacccttcccccaggcaccatgcccagtgccagtgactggattggcatcttcaaggtggaggctgcctgtgttcgggattaccacacatttgtgtggtcttccgtgcctgaaagtacaactgatggttcccccattcacaccagtgtccagttccaagccagctacctgcccaaaccaggagctcagctctaccagttccgatatgtgaaccgccagggccaggtgtgtgggcagagcccccctttccagttccgagagccaaggcccatggatgaactggtgaccctggaggaggctgatgggggctctgacatcctgctggttgtccccaaggcaactgtgttacagaaccagctcgatgagagccagcaagaacggaatgacctgatgcagctgaagctacagctggagggacaggtgacagagctgaggagccgagtgcaggagctcgagagggctctggcaactgccaggcaggagcacacggagctgatggaacagtacaaggggatttcccggtcccatggggagatcacagaagagagggacatcctgagccggcaacagggagaccatgtggcacgcatcctggagctagaggatgacatccagaccatcagtgagaaagtgctgacgaaggaagtggagctggacaggcttagagacacagtgaaggccctgactcgggaacaagagaagctccttgggcaactgaaagaagtacaagcagacaaggagcaaagtgaggctgagctccaagtggcacaacaggagaaccatcacttaaatttggacctgaaggaggcgaagagctggcaagaggagcagagtgctcaggctcagcgactgaaagacaaggtggcccagatgaaggacaccctaggccaggcccagcagcgggtggccgagctggagcccttgaaggagcagcttcgaggggcccaggagcttgcagcctcaagccagcagaaagccacccttcttggggaggagttggccagtgcagcagcagccagggaccgcaccatagccgaactacaccgcagccgcctggaagtggctgaagttaacggcaggctggctgagctcggtttgcacttgaaggaagaaaaatgccaatggagcaaggagcgggcagggctgctgcagagtgtggaggcagagaaggacaagatcctgaagctgagtgcagagatacttcgattggagaaggcagttcaggaggagaggacccaaaaccaagtgttcaagactgagctggcccgggagaaggattctagcctggtacagttgtcagaaagtaagcgggagctgacagagctgcggtcagccctgcgtgtgctccagaaggaaaaggagcagttacaggaggagaaacaggaattgctagagtacatgagaaagctagaggcccgcctggagaaggtggcagatgagaagtggaatgaggatgccaccacagaggatgaggaggccgctgtggggctgagctgcccggcagctctgacagactcagaggacgagtccccagaagacatgaggctcccaccctatggcctttgtgagcgtggagacccaggctcctctcctgctgggcctcgagaggcttctccccttgttgtcatcagccagccggctcccatttctcctcacctctctgggccagctgaggacagtagctctgactcggaggctgaagatgagaagtcagtcctgatggcagctgtgcagagtgggggtgaggaggccaacttactgcttcctgaactgggcagtgccttctatgacatggccaggtgagttcaaccagcaaggccaggagggaggtgggaggaggtcagagggaaagggcatctgtgtggacagtcaccaggccctgctcccaacccctgcccttcttggcctcagccaagaaaaggagatacaggtatggttaacaaggaaaatgactcactgctccaaatcccagatgccttcaggtaatccctacccctatcttatcaatgcactcagaggtcctgcctttaactggcttctatgttgttctagcaccatcttctgcagagcccaaattgccctgcttcccctctctcctgcctctaccccttccccaaccaccaggtaggtacctagggtcctccggggaggaagggaggtgaccatggcccccagggataggagcagagagaagactgggatccagcatccatctggctacaactgaaatgctttccctcttccctgacttccctgggtaacccttagggaagggaacctatagaggtgggggtttcaggtatcagattgtccccttctgccttcccttttattcccaggttcaagggggcaggcacagggaagagagatttgatcatctagtcccggttttgcctggatgtgagatgggctcagggcagggagggggtgatgctgtcatccttctcggctggagcaggaagatgaaggacgatgtcagactcattttcagcctcattaggcagcagacggagatggagggaggagagcaggaggctgggggatgggctctgcactgcagagaccagcagggactaaagaagagaggacatggggaactggaaaaataagccttccaggattgtggggagaaagacgctgtgggagaggccaggatgctgcattaggcacaggataacctgggaacccaggcacatgggtcctgctctccgaagtctgcaagtcaagaagggaacagagcacgccgaccctctccctttcccctctgtctctcttagtggctttacagtgggtaccctgtcagaaaccagcactgggggccctgccacccccacatggaaggagtgtcctatctgtaaggagcgctttcctgctgagagtgacaaggatgccctggaggaccacatggatggacacttctttttcagcacccaggaccccttcacctttgagtgatcttactccctcgtacatgcacaaatacacactcatgcacacacacactcacacacatgcatacacttaggtttcatgcccattttctatcacactgggctccatgatattctgttccctaagaactgcttctgtgtgccctgttttcatcccaagatttctcacttcatcctctcctacctggctcttttgtcccagggaggggtcctgttcggaagcagtggctgaatttatcccctgaaagtggttttggaggaaccgggatggaggaggccttcccctgtgggaatagaatcgtccactcctagccctggttgcttctgatacacagccactgcacacacacactcacactcacactcccttgtctgatgccccaaagccaattcctggggcaccctaccctctcttatttggagtttccgttggtttacctgagttttctctggggtctgcacagaggcagcagcatggacatcatggcctctcaggtcccttttggttctcagtttcattggttcctctttctgttcccccattgacttctgtgccccaccctagccttttccataaccttaggtattcagtttggaggggttttttgtatttttgaggattcctgtattctgtatcctctcctcgcatctcctcacatggaaagaaataatgtatttgtgccttctgtgaggaatggggggaacaagtggtcccaggtatccccatttccaaggcccccctccctctccaggtccccccacagcaataaaagcttccccctgatatcc

SEQ ID NO: 334586 - protein, 919 aa, Artificial Sequence
  derived and/or modified sequence
MEAEFYMVILTCLIFRNSEGFQIVHVQKQQCLFKNEKVVVGSCNRTIQNQQWMWTEDEKLLHVKSALCLAISNSSRGPSRSAILDRCSQAPRWTCYDQEGFLEVENASLFLQKQGSRVVVKKARKYLHSWMKIDVNKEGKLVNESLCLQKAGLGAEVSVRSTRNTAPPQILTTFNAVPDGLVFLIRNTTEAFIRNAAENYSQNSSERQHPNLHMTGITDTSWVLSTTQPFSSTTEETGLAEPERCNFTLAESKASSHSVSIQWRILGSPCNFSLIYSSDTLGAALCPTFRIDNTTYGCNLQDLQAGTIYNFRIISLDEERTVVLQTDPLPPARFGVSKEKTTSTSLHVWWTPSSGKVTSYEVQLFDENNQKIQGVQIQESTSWNEYTFFNLTAGSKYNIAITAVSGGKRSFSVYTNGSTVPSPVKDIGISTKANSLLISWSHGSGNVERYRLMLMDKGILVHGGVVDKHATSYAFHGLTPGYLYNLTVMTEAAGLQNYRWKLVRTAPMEVSNLKVTNDGSLTSLKVKWQRPPGNVDSYNITLSHKGTIKESRVLAPWITETHFKELVPGRLYQVTVSCVSGELSAQKMAVGRTFPDKVANLEANNNGRMRSLVVSWSPPAGDWEQYRILLFNDSVVLLNITVGKEETQYVMDDTGLVPGRQYEVEVIVESGNLKNSERCQGRTVPLAVLQLRVKHANETSLSIMWQTPVAEWEKYIISLADRDLLLIHKSLSKDAKEFTFTDLVPGRKYMATVTSISGDLKNSSSVKGRTVPAQVTDLHVANQGMTSSLFTNWTQAQGDVEFYQVLLIHENVVIKNESISSETSRYSFHSLKSGSLYSVVVTTVSGGISSRQVVVEGRTVPDKVQGVSVSNSARSDYLRVSWVHATGDFDHYEVTIKNKNNFIQTKAFPSQKTNVYLFS

SEQ ID NO: 334587 - DNA, 2760 bp, Artificial Sequence
  derived and/or modified sequence
atggaggccgaattctatatggtcatcttaacctgtcttatttttcggaactcggaaggcttccagatagtccacgtccaaaagcagcaatgtttgttcaaaaatgagaaagtggttgtaggttcttgcaacagaactatccagaatcagcagtggatgtggacggaagatgagaagctgctccatgttaaatctgccctgtgtctggcgatttctaattccagcagaggcccatcccgaagcgcgatcctggaccgttgctcccaggccccacgctggacctgttacgaccaagaaggatttcttgaggtcgagaatgcctcgctgttcctgcaaaagcaggggtctcgcgtcgtcgtaaaaaaagcgcggaagtatctgcacagctggatgaagatcgatgtgaataaagaagggaagctggttaatgaatcactgtgtctgcaaaaagctggactcggtgccgaggtgtcagtgcggtcgacaagaaacaccgccccgccccagatcctgactacctttaatgcagtgccggatggcctggtctttctgatcagaaatactacagaggctttcatccgcaatgccgccgagaattacagtcagaactcttctgagcgacaacacccaaacctgcacatgaccgggattactgatacctcctgggtcctgagcacaacccaacctttcagcagcactaccgaggagactgggctggccgagcccgagagatgcaactttactctcgccgaatccaaagcatcatcccattctgtttcaatccagtggaggattcttggttccccttgcaacttttcgctcatttattccagtgacacactgggtgctgccctctgcccgaccttcaggatcgacaatactacatacggatgtaacctgcaagatttacaagcaggtacgatatataacttcaggatcattagtttggacgaagagcgaactgtagttctccagaccgatcccctgccccctgcccggttcggtgtctctaaggagaagacaacttcaacttctctgcatgtgtggtggacaccatcctcagggaaagttacatcttatgaagtgcagctcttcgatgagaataaccagaaaatccaaggggtacagatccaggaatctacatcatggaatgagtatacttttttcaacctgacagcgggtagcaagtataacatcgccataaccgcggtgagtggcggtaaacggtcattctcggtctatacaaatggctccactgtcccttccccggtgaaggacatcggcatatcgacaaaggcaaatagcttattgatatcatggagccatggctccggaaacgtcgaacggtatcggctcatgctgatggataagggtattttagtccacggcggcgtggtagataaacatgccacaagctatgcatttcacggattgaccccagggtatttgtacaacctcaccgttatgacagaagcagcaggactccagaactatcgctggaagctggtgcggacagcgccaatggaggtgagtaatctgaaggtgactaatgacggaagccttacaagcttgaaagtgaagtggcagcgccctccgggaaacgtggattcctacaacataactcttagccacaaaggaacaatcaaagaaagcagggtccttgctccctggatcacagaaacccatttcaaagagctggtgccaggaaggctataccaggttaccgtctcctgcgtctcgggcgagctatccgcgcaaaagatggccgtcggcaggaccttccctgacaaagtggcgaatctggaggccaacaataacggcagaatgaggagcttggtcgtgtcgtggagccccccagccggggattgggaacagtatcgtatactgctgtttaatgattcggtcgttctgctgaacatcacagtgggtaaggaagaaacacagtacgtgatggacgacactggtctggtgccaggccgtcagtatgaagtggaggtgatcgtggaatccggaaatctcaagaacagtgagcgctgccagggccggaccgttcctctggcagtactacagttgcgggtgaagcatgccaacgagacaagcctctccataatgtggcagactcccgtcgccgaatgggagaaatatatcatcagtctcgctgaccgggatttgttgttgatccacaaaagcctgtctaaggacgccaaagaattcacctttacggacctagtgcctggaaggaaatacatggcaacagtcacctccatttcaggagatttaaaaaactcctccagcgtgaaagggcggacggtgcccgcacaagtaaccgacttgcacgtagccaaccagggcatgacttcgagcctttttaccaactggacccaggcccagggagatgttgagttctaccaggtccttctgatccatgagaatgtggtgatcaaaaacgaatcgattagctccgaaacctcacgctactctttccattcattaaagagcggatctctttacagtgtggtggttaccaccgttagtggcggcatctcctcacggcaagtggtggtagaggggcgtacggtcccagacaaagttcagggtgtctcggttagcaacagtgccaggtccgactacctgagggtgtcttgggttcacgctaccggcgatttcgatcactatgaagttaccattaagaataagaacaatttcatccagaccaaagctttcccatcacagaagactaacgtgtaccttttctcctag

SEQ ID NO: 334588 - DNA, 2760 bp, Artificial Sequence
  derived and/or modified sequence
atggaggccgagttctacatggtgatcctgacctgcctgatcttcaggaacagcgagggcttccagatcgtgcacgtgcagaagcagcagtgcctcttcaagaatgagaaggtggtggtgggcagctgcaacagaaccatccagaaccagcagtggatgtggacagaagatgagaagctgctgcacgtgaagagcgccctgtgcctggccatcagcaacagcagccggggccccagccgcagcgccatcctggaccgctgcagccaggccccccgctggacctgctatgaccaggagggcttcctggaggtggagaatgccagcctcttcctgcagaagcagggcagccgggtggtggtgaagaaggccaggaagtacctgcacagctggatgaagattgatgtgaacaaggagggcaagctggtgaatgaaagcctgtgcctgcagaaggccggcctgggcgctgaggtgtctgtgcgcagcaccaggaacacagccccaccccagatcctgaccaccttcaatgctgtgcctgatggcctggtgttcctgatccggaacaccacagaggccttcatcagaaatgctgctgagaactacagccagaacagcagcgagcggcagcaccccaacctgcacatgacaggcatcacagacacctcctgggtgctgagcaccacccagcccttcagcagcaccacagaggagaccggcctggccgagcctgagcgctgcaacttcaccctggccgagagcaaggccagcagccacagcgtgtccatccagtggaggatcctgggcagcccctgcaacttcagcctcatctacagcagtgacaccctgggcgccgccctgtgccccaccttcagaattgacaacaccacctacggctgcaacctgcaggacctgcaggccggcaccatctacaacttccgcatcatcagcctggatgaggagaggacagtggtgctgcagacagaccccctgcccccagcccgcttcggcgtgtccaaggagaagaccaccagcaccagcctgcacgtgtggtggacccccagcagcggcaaggtgaccagctatgaggtgcagctgtttgatgagaacaaccagaagatccagggcgtgcagatccaggagagcacctcctggaatgagtacaccttcttcaacctgacagctggcagcaagtacaacatcgccatcacagctgtgtctgggggcaagaggagcttctctgtgtacaccaacggcagcacagtgcccagccctgtgaaggacatcggcatcagcaccaaggccaacagcctgctgatctcctggagccacggcagcggaaatgtggagcgctaccgcctgatgctgatggacaagggcatcctggtgcacggcggcgtggtggacaagcacgccaccagctatgccttccacggcctgaccccaggctacctgtacaacctgactgtgatgacagaggccgccggcctgcagaactaccgctggaagctggtgaggacagcccccatggaggtgagcaacctgaaggtgaccaatgatggcagcctgaccagcctgaaggtgaagtggcagaggcctcctggaaatgtggacagctacaacatcaccctgagccacaagggcaccatcaaggagagccgggtgctggccccctggatcacagagacccacttcaaggagctggtgcccggccgcctgtaccaggtgacagtgtcctgtgtgtctggagagctgagcgcccagaagatggctgtgggccgcaccttcccagacaaggtggccaacctggaggccaacaacaacggccgcatgaggagcctggtggtgtcctggagccccccagctggggactgggagcagtaccgcatcctgctcttcaatgacagcgtggtgctgctgaacatcaccgtgggcaaggaggagacccagtatgtgatggatgacaccggcctggtgcccggccggcagtatgaggtggaggtgattgtggagagcggcaacctgaagaacagcgagcgctgccagggccgcacagtgcccctggccgtgctgcagctgcgggtgaagcacgccaatgagaccagcctgagcatcatgtggcagacccctgtggccgagtgggagaagtacatcatcagcctggccgaccgggacctgctgctgatccacaagagcctgagcaaggatgccaaggagttcaccttcacagacctggtgcccggcaggaagtacatggccaccgtgaccagcatcagcggggacctgaagaacagcagctctgtgaagggccgcacagtgcctgcccaggtgacagacctgcacgtggccaaccagggcatgaccagcagcctcttcaccaactggacccaggcccagggagatgtggagttctaccaggtgctgctgattcatgaaaatgtggtgatcaagaatgaaagcatcagcagcgagaccagccgctacagcttccacagcctgaagagcggcagcctgtacagcgtggtggtgaccaccgtgtctgggggcatcagcagccggcaggtggtggtggagggccgcacagtgcctgacaaggtgcagggcgtgtctgtgagcaacagcgcccggagtgactacctgcgggtgtcctgggtgcacgccaccggggactttgaccactatgaggtgaccatcaagaacaagaacaacttcatccagaccaaggccttccccagccagaagaccaacgtgtacctgttctcctag

SEQ ID NO: 334589 - DNA, 2760 bp, Artificial Sequence
  derived and/or modified sequence
atggaggccgagttctacatggtgatcctgacctgcctgatcttccgcaacagcgagggatttcaaattgtgcacgtgcaaaaacaacagtgcctgtttaagaatgagaaggtcgttgtgggcagctgcaacagaacaatccagaaccagcaatggatgtggacagaggatgagaagttgctgcacgtgaaatccgcactatgtttagcgatttcgaatagtagcagaggccccagccgcagcgcgattttggataggtgcagccaggcgcctcggtggacctgttatgatcaggagggattcctcgaagttgagaatgccagcttgtttctccagaagcaggggtctcgcgtggtggtcaaaaaagctcggaaatacctgcattcttggatgaagattgatgttaacaaagagggcaaactggtgaacgagagtctgtgtttgcagaaagccggactgggggcggaggtgtccgtgcgctcaacccgcaataccgcgccaccgcagatcctcacaacttttaatgctgtacctgacggcctggtattcctgatacgcaacaccactgaggcttttattcggaacgccgccgagaactactcccagaatagttctgagcggcagcaccctaatctgcacatgaccggaattaccgatacatcttgggtgctgtcaactacacaacccttcagttcaacaacagaggaaaccggcctggccgaaccggaaagatgcaacttcacgctggccgaatctaaagcctccagccactcagtctctatacaatggcgcatcttgggatccccatgcaatttctccttaatttatagtagcgatacattgggagcggctctatgtcctacttttcgaattgacaatactacctacggatgcaaccttcaagacttgcaggctggcacaatttacaattttagaattatcagtctcgatgaagagcgcactgtagtgctgcagaccgatccattgccccccgcacgattcggcgtctccaaagagaaaaccacttccacatccctgcacgtgtggtggacccccagctcaggcaaagtgacctcgtacgaagtacagttgtttgatgagaataatcagaagattcagggggtccagatccaggaatcaaccagctggaacgaatataccttcttcaatttgacagcaggttcgaaatataatatagcgataacggctgtttctggagggaagagatccttttctgtctataccaacggcagcacggtcccctctcccgtgaaagacatcggcatcagtaccaaggctaactcacttctcatttcctggtcccacggaagcgggaatgtggaacgctataggctcatgttaatggataaaggaatcttggttcacggtggcgtggtggacaaacatgcaacctcctatgctttccatgggctgaccccaggctacctctataatctaaccgtgatgacagaagccgctgggctgcaaaattaccgatggaaattggtgcggacggcgcccatggaggtctcaaacctgaaggtcactaatgatggttcacttacaagcctgaaggtcaagtggcagcgacctcccggaaacgttgattcctacaatatcactctcagtcacaaagggaccattaaggagagcagagtactcgccccttggattaccgaaacacacttcaaagagctcgtgcccggccgcctctaccaggtcaccgtgagttgcgtgtccggagagttgtcagcccaaaaaatggcggtagggcgtaccttccctgacaaggtcgctaacctcgaggcaaataacaacggacggatgaggtccctggttgtttcctggtccccgccagctggcgactgggaacagtacaggatcctcctattcaacgactcagtggtgctgctcaacatcacagtgggaaaagaagaaactcaatacgttatggacgataccggactagtgcccggcagacaatatgaagtggaggtgatcgtcgaatcaggcaatctcaagaattccgaaagatgtcagggtcgtaccgtgccgctggcagttctccagctgagggtgaaacacgccaacgaaactagcttgagcattatgtggcagacgcccgtggctgaatgggaaaaatatatcattagcttagcagatcgtgacctgctccttatccataagagtttgtccaaggacgccaaagaatttacatttaccgatctggtaccaggaagaaagtacatggccactgtcacttcaatttccggcgacttaaagaatagctcaagcgtaaaaggacggacggtacccgcacaggtaacagatctgcatgtagcaaaccaagggatgacctccagtctttttacgaactggacccaggcccagggagatgtggagttttatcaggttctgcttatacacgaaaatgtggtgattaagaacgagtcaatctcatcagaaacatccagatactcatttcactccttaaaatcaggttcactgtattctgtggttgtcaccacagtatccggaggcatttcctccagacaagtggtcgtggagggaaggaccgttcccgacaaggtacaaggggtgagcgtttctaactccgcgagaagcgattacttacgggtgtcctgggttcatgccactggcgacttcgatcactatgaagtgacaattaagaataaaaacaatttcatccagactaaagctttccccagccagaaaactaatgtctatctgtttagctag

SEQ ID NO: 334590 - DNA, 2760 bp, Artificial Sequence
  derived and/or modified sequence
atggaggccgaattttacatggtgattctgacctgcctgatttttcgaaattctgaggggttccagatcgtgcacgtccagaaacagcagtgcctgtttaagaacgagaaggtggttgtgggatcttgcaaccgcactatccagaatcagcagtggatgtggacggaagacgaaaaactgctgcacgtcaagtccgccctctgcctggccatctccaacagctcacggggaccttcgcgctctgccattcttgacaggtgttcccaagctcctagatggacctgctacgaccaggagggatttttagaagttgagaacgcatcgttgttcctgcagaaacagggatcccgcgttgtggtgaagaaagccagaaaatacttgcatagctggatgaaaatcgacgtgaacaaggagggcaaactggtgaacgaaagcttgtgtctccaaaaggctggacttggagcagaggtgagtgtgcggtcaacgagaaatactgccccacctcagattttgacaacctttaatgcagtacctgatgggctggtcttcctgattcgcaacactaccgaagcttttataaggaacgcagcagagaattacagccagaacagcagcgagcgccaacacccgaatttgcacatgactgggattactgacacaagctgggtactgagtaccactcagccattctcttcgacaacagaagagactgggctggctgagccagagcgttgtaactttacactcgctgagtctaaggcgtcttcccatagcgtctctatccaatggagaatattggggtcaccctgtaacttttcactgatatactcgagcgacactttgggagctgcgctgtgtcccactttccgcatcgataatactacctacggatgcaacctgcaggatctccaggctggaaccatctacaatttccggatcatatccttagatgaggagcggacagtggtgttacaaacagacccgctgccccctgcccgattcggcgtctctaaagagaagacaacatctacatcgttacatgtgtggtggactccatctagtggcaaagtcacatcatacgaagtccagctatttgacgagaataaccagaagattcagggcgtgcaaattcaggagtctacaagctggaatgaatacaccttttttaacctcactgccggaagtaaatataatatagcaatcacagccgtctccggaggcaagaggagttttagtgtatacacaaatggctcaaccgtgcccagcccagtgaaagacatcgggataagcaccaaagcaaactctttgttgatatcttggtcacatgggagtggtaatgtggagcggtacagactgatgcttatggataagggaatcctggtccatggcggtgtggtcgataagcacgcaacttcttacgcctttcatgggcttaccccagggtacctttacaatctgactgtgatgacagaagcagcgggattgcagaactaccggtggaagctggtgagaacagctccaatggaagtatcgaacctaaaggtgaccaatgatggaagcctgacctctctcaaagtgaagtggcagcgacccccaggcaacgtagattcttacaacatcaccttatctcataagggcaccataaaggagtcccgcgtcctcgccccttggattaccgagactcactttaaagagctagtcccaggtcggctctatcaggtcacagttagctgcgtaagcggtgaactctctgctcagaagatggccgttggacgaacattccctgataaggtggcaaatttagaggcgaacaacaacggtcgaatgcgttctttggtggtatcatggtctccccctgccggtgactgggaacagtataggattcttctcttcaacgattccgtcgttttgctgaatattaccgtgggcaaagaagaaacacaatacgtcatggatgatacgggactcgtgcctgggaggcaatacgaagttgaggtgattgttgaatccggcaatctgaagaattccgagcgttgccagggaagaacggtgcccctggctgtcttacaattacgggtcaagcatgctaacgaaacctctctgtcgatcatgtggcagacacctgtggctgagtgggagaagtacattatcagcctggcagatagagacctccttttaattcataaatcactaagtaaggacgccaaggaatttaccttcacagatcttgttcctggaaggaagtacatggcgaccgttaccagcattagtggagacctcaaaaatagtagctccgttaagggcaggactgtgccggctcaggtaaccgatttacacgtggcaaaccaggggatgacatcttcgctgtttactaactggacccaggcccagggcgatgtggagttttatcaggtgttgctgatccacgaaaacgttgtaataaagaacgaaagtatcagttctgagactagcaggtactcgttccactctctcaagtccggaagcctgtacagcgtagtggtgactacagtgagtggcggtataagtagccgacaggtcgtggtggagggcagaactgtgccggacaaagttcagggtgtgagtgtctctaattccgcaagaagtgattacctgagggtctcttgggtgcacgctacaggggacttcgaccattacgaagttaccattaaaaacaagaacaactttattcagacaaaagcatttccttcccaaaagaccaacgtttacttatttagttag

SEQ ID NO: 334591 - DNA, 2760 bp, Artificial Sequence
  derived and/or modified sequence
atggaggccgagttctacatggtgatcctgacctgcctgatcttcagaaacagcgagggcttccagatcgtgcacgtgcagaagcagcagtgcctgttcaagaacgagaaggtggtggtgggcagctgcaacagaaccatccagaaccagcagtggatgtggaccgaggacgagaagctgctgcacgtgaagagcgccctgtgcctggccatcagcaacagcagcagaggccccagcagaagcgccatcctggacagatgcagccaggcccccagatggacctgctacgaccaggagggcttcctggaggtggagaacgccagcctgttcctgcagaagcagggcagcagagtggtggtgaagaaggccagaaagtacctgcacagctggatgaagatcgacgtgaacaaggagggcaagctggtgaacgagagcctgtgcctgcagaaggccggcctgggcgccgaggtgagcgtgagaagcaccagaaacaccgcccccccccagatcctgaccaccttcaacgccgtgcccgacggcctggtgttcctgatcagaaacaccaccgaggccttcatcagaaacgccgccgagaactacagccagaacagcagcgagagacagcaccccaacctgcacatgaccggcatcaccgacaccagctgggtgctgagcaccacccagcccttcagcagcaccaccgaggagaccggcctggccgagcccgagagatgcaacttcaccctggccgagagcaaggccagcagccacagcgtgagcatccagtggagaatcctgggcagcccctgcaacttcagcctgatctacagcagcgacaccctgggcgccgccctgtgccccaccttcagaatcgacaacaccacctacggctgcaacctgcaggacctgcaggccggcaccatctacaacttcagaatcatcagcctggacgaggagagaaccgtggtgctgcagaccgaccccctgccccccgccagattcggcgtgagcaaggagaagaccaccagcaccagcctgcacgtgtggtggacccccagcagcggcaaggtgaccagctacgaggtgcagctgttcgacgagaacaaccagaagatccagggcgtgcagatccaggagagcaccagctggaacgagtacaccttcttcaacctgaccgccggcagcaagtacaacatcgccatcaccgccgtgagcggcggcaagagaagcttcagcgtgtacaccaacggcagcaccgtgcccagccccgtgaaggacatcggcatcagcaccaaggccaacagcctgctgatcagctggagccacggcagcggcaacgtggagagatacagactgatgctgatggacaagggcatcctggtgcacggcggcgtggtggacaagcacgccaccagctacgccttccacggcctgacccccggctacctgtacaacctgaccgtgatgaccgaggccgccggcctgcagaactacagatggaagctggtgagaaccgcccccatggaggtgagcaacctgaaggtgaccaacgacggcagcctgaccagcctgaaggtgaagtggcagagaccccccggcaacgtggacagctacaacatcaccctgagccacaagggcaccatcaaggagagcagagtgctggccccctggatcaccgagacccacttcaaggagctggtgcccggcagactgtaccaggtgaccgtgagctgcgtgagcggcgagctgagcgcccagaagatggccgtgggcagaaccttccccgacaaggtggccaacctggaggccaacaacaacggcagaatgagaagcctggtggtgagctggagcccccccgccggcgactgggagcagtacagaatcctgctgttcaacgacagcgtggtgctgctgaacatcaccgtgggcaaggaggagacccagtacgtgatggacgacaccggcctggtgcccggcagacagtacgaggtggaggtgatcgtggagagcggcaacctgaagaacagcgagagatgccagggcagaaccgtgcccctggccgtgctgcagctgagagtgaagcacgccaacgagaccagcctgagcatcatgtggcagacccccgtggccgagtgggagaagtacatcatcagcctggccgacagagacctgctgctgatccacaagagcctgagcaaggacgccaaggagttcaccttcaccgacctggtgcccggcagaaagtacatggccaccgtgaccagcatcagcggcgacctgaagaacagcagcagcgtgaagggcagaaccgtgcccgcccaggtgaccgacctgcacgtggccaaccagggcatgaccagcagcctgttcaccaactggacccaggcccagggcgacgtggagttctaccaggtgctgctgatccacgagaacgtggtgatcaagaacgagagcatcagcagcgagaccagcagatacagcttccacagcctgaagagcggcagcctgtacagcgtggtggtgaccaccgtgagcggcggcatcagcagcagacaggtggtggtggagggcagaaccgtgcccgacaaggtgcagggcgtgagcgtgagcaacagcgccagaagcgactacctgagagtgagctgggtgcacgccaccggcgacttcgaccactacgaggtgaccatcaagaacaagaacaacttcatccagaccaaggccttccccagccagaagaccaacgtgtacctgttcagctag

SEQ ID NO: 334592 - DNA, 423 bp, Artificial Sequence
  derived and/or modified sequence
atgaagggacaggaagggataagaggggagggctgtacagacccagagatcaaagcttcacctcagatgtgggctgcccggttccgcgggatgagaagcaggtttagtccgctctttagccaggctacagagatgggacccagagtctcagctgggtggtgcctctcgggaggaggcagaaaggtttcctccctgcaaggtgacttccctccgggcgggttttgggctctgtcaaacgactccgccctgtccctcccccccctgtctttaccccacccccaccctctgcggccacctgggctgggggtgaatgagttcacccagggacttcacccacccctccaccccgcggctagcgtgttccagacctgcttttatagaaaaccacactactgctccacactccgcccgacaaccacatag

SEQ ID NO: 334593 - DNA, 702 bp, Artificial Sequence
  derived and/or modified sequence
atgggcaagacctggcaccccgagcacttcgtgtgcacccactgccaggaggagatcggcagcagaaacttcttcgagagagacggccagccctactgcgagaaggactaccacaacctgttcagccccagatgctactactgcaacggccccatcctggacaaggtggtgaccgccctggacagaacctggcaccccgagcacttcttctgcgcccagtgcggcgccttcttcggccccgagggcttccacgagaaggacggcaaggcctactgcagaaaggactacttcgacatgttcgcccccaagtgcggcggctgcgccagagccatcctggagaactacatcagcgccctgaacaccctgtggcaccccgagtgcttcgtgtgcagagagtgcttcacccccttcgtgaacggcagcttcttcgagcacgacggccagccctactgcgaggtgcactaccacgagagaagaggcagcctgtgcagcggctgccagaagcccatcaccggcagatgcatcaccgccatggccaagaagttccaccccgacccctgcaccagccccagaaccggcctggccagcaccccccactggagccacctgttcctgatcttccagcagtgcagcagaggcgccggcaagggcagacagggcctgctgggcagcctgttcatcctgatccccccccccacctag

SEQ ID NO: 334594 - DNA, 702 bp, Artificial Sequence
  derived and/or modified sequence
atgggaaaaacatggcatcctgagcattttgtgtgcactcactgtcaggaagaaataggcagtaggaatttcttcgagagagacggacagccttactgcgagaaggactatcataacctgttttcccctcgctgttattattgcaacggacctatactggataaggtagtgaccgcgctggatcggacatggcacccagaacatttcttttgcgcccaatgtggtgctttctttgggcccgagggtttccacgaaaaggacggtaaagcttactgccggaaagattacttcgacatgttcgcgccaaagtgcggggggtgcgctagagctattctggaaaactatatatctgccctgaacaccctctggcatcctgaatgttttgtgtgtcgcgagtgcttcacccctttcgtcaatgggagctttttcgaacacgacggacagccatactgtgaagtgcactatcacgagcgccggggttccctatgtagcggctgccagaagccaatcaccggccgttgcatcacggccatggcaaaaaagtttcatcctgatccttgcacctcacctcgtacaggtttggcatcgactccacattggagtcatttgttcctgatctttcaacagtgcagtcgcggggcaggcaagggcaggcaaggccttctcggctctctgtttatcctcatccccccgcccacgtag

SEQ ID NO: 334595 - DNA, 702 bp, Artificial Sequence
  derived and/or modified sequence
atgggcaagacctggcaccctgagcactttgtgtgcacccactgccaggaggagatcggcagcaggaacttctttgaaagagatggccagccctactgtgagaaggactaccacaacctcttcagcccccgctgctactactgcaatggccccatcctggacaaggtggtgacagccctggacaggacctggcaccctgagcacttcttctgtgcccagtgtggggccttcttcggccctgagggcttccacgagaaggatggcaaggcctactgcaggaaggactactttgacatgtttgcccccaagtgtggcggctgtgcccgggccatcctggagaactacatcagcgccctgaacaccctgtggcaccctgagtgctttgtgtgccgggagtgcttcaccccatttgtgaatggcagcttctttgaacatgatggccagccctactgtgaggtgcactaccacgagcggcggggcagcctgtgcagcggctgccagaagcccatcaccggccgctgcatcacagccatggccaagaagttccacccagacccctgcaccagccccaggacaggcctggccagcaccccccactggagccacctgttcctgatcttccagcagtgcagcagaggagctgggaagggccggcagggcctgctgggcagcctcttcatcctgatccccccacccacctag

SEQ ID NO: 334596 - DNA, 702 bp, Artificial Sequence
  derived and/or modified sequence
atgggcaagacctggcaccccgagcacttcgtgtgcacccactgccaagaggaaatcgggagcagaaacttcttcgagagggatggccagccctactgtgagaaggattaccataatttgttctcccctcgatgctattattgcaacggacccatcctcgataaggttgtcactgctctggaccgcacatggcatccggagcattttttctgtgcccaatgtggagccttctttgggcctgaaggcttccatgaaaaagatgggaaggcctattgtagaaaagattattttgacatgtttgcccctaagtgcgggggctgcgcccgggctatccttgagaactacatttccgcccttaataccctgtggcatccagaatgttttgtgtgtcgagagtgttttacacctttcgtcaacggatccttcttcgagcatgacgggcagccgtactgcgaagtccattatcatgaacggaggggctctctgtgttccggttgtcagaagcccatcaccggaagatgtattactgctatggccaaaaaattccaccctgacccgtgtacgagcccacgaaccgggctggcttccactccacactggtctcacttatttctcatattccaacaatgctctcgcggggccggaaagggacgacagggcctgctcggcagcctttttatcctaataccccccccaacatag

SEQ ID NO: 334597 - DNA, 702 bp, Artificial Sequence
  derived and/or modified sequence
atgggcaaaacgtggcacccagaacactttgtgtgcactcattgtcaggaggagattggatcccgtaactttttcgaaagggatggacaaccgtattgtgagaaagactaccataatctatttagccccaggtgctactattgcaatgggcctatcctggataaggtggtgacagccttagataggacatggcaccctgagcattttttctgtgctcagtgtggggcattttttgggccagaagggttccacgaaaaggacggtaaagcatattgtcggaaggattactttgatatgtttgcacctaaatgcggcggatgcgctcgtgccatcctggagaactatatcagcgcactcaatacactgtggcacccagagtgcttcgtgtgtcgtgaatgttttactccatttgtgaatggtagcttcttcgagcacgatggacagccctactgtgaggtgcattatcacgagcgtaggggctccctctgctccgggtgtcaaaaaccgataaccgggaggtgtatcaccgcaatggccaagaagttccaccccgatccatgtaccagcccaagaaccggccttgcatctacaccacactggtcccacctttttctgatttttcagcagtgttcgcgcggtgcgggaaagggaagacaaggactgttgggatctctttttattttaattccaccacccacctag

SEQ ID NO: 334598 - DNA, 1149 bp, Artificial Sequence
  derived and/or modified sequence
atggtgccttcatctccttcaccaccccccccccctcgggtgtacaaaccatgtttcgtttgcaatgacaaatccagtggttaccattacggggtcagcagttgcgaaggctgcaagggattttttcgaagaagtatccagaagaatatggtgtacacatgccatagggataagaattgtatcatcaacaaagtgacccgtaaccggtgtcagtactgccgacttcagaagtgctttgaggtcgggatgtccaaggaggctgtacgtaacgaccgaaacaaaaagaagaaagaagtgaaagaagaaggtagcccagacagttatgagctgagcccccagctggaagagctaatcacaaaggtttcgaaggcacatcaggagaccttcccaagcctgtgtcagttgggtaaatacaccaccaactctagcgctgatcaccgggtgcagctggaccttggtctttgggacaaattcagtgagcttgcgacgaaatgtatcatcaagatcgtggaattcgccaaacgtcttccaggattcaccgggctttctatagcagatcagatcacactcctcaaagccgcatgcctcgatattctgatgctgcggatatgtactcgatacacccccgagcaagacacaatgactttttcagacgggcttaccctgaacagaactcagatgcacaatgcagggtttggcccgttgaccgacctagttttcgcatttgcggggcagctcttgcccttggagatggatgataccgagacaggactcttgtccgcaatttgtctgatttgtggcgaccgaatggatctcgaggagccagagaaggtggacaagctgcaggaaccactgctggaggctcttaggctctatgcccgtcgcagaagacctagccagccgtacatgttcccacgaatgctgatgaaaattaccgatctgcgtggcattagcactaagggggccgaacgcgcaataacactcaaaatggagatccccggtcctatgccgccacttatcagggagatgctggagaatcctgagatgtttgaggatgacagtagtcaacccggaccacatccaaacgcaagctcagaggatgaggtgcctggggggcagggtaaaggtgggctgaagtccccagcctag

SEQ ID NO: 334599 - DNA, 1149 bp, Artificial Sequence
  derived and/or modified sequence
atggtgcccagcagccccagccccccacctccaccccgggtgtacaagccctgctttgtgtgcaatgacaagagcagcggctaccactacggcgtgagcagctgtgagggctgcaagggcttcttcagaagaagcatccagaagaacatggtgtacacctgccaccgggacaagaactgcatcatcaacaaggtgaccaggaaccgctgccagtactgccgcctgcagaagtgctttgaggtgggcatgagcaaggaggccgtgagaaatgacaggaacaagaagaagaaggaggtgaaggaggagggcagcccagacagctatgagctgagcccccagctggaggagctgatcaccaaggtgtccaaggcccaccaggagaccttccccagcctgtgccagctgggcaagtacaccaccaacagcagcgctgaccaccgggtgcagctggacctgggcctgtgggacaagttcagcgagctggccaccaagtgcatcatcaagatcgtggagtttgccaagaggctgcccggcttcaccggcctgagcattgctgaccagatcaccctgctgaaggccgcctgcctggacatcctgatgctgcgcatctgcacccgctacaccccagagcaggacaccatgaccttcagtgatggcctgaccctgaacagaacccagatgcacaatgccggcttcggccccctgacagacctggtgtttgcctttgctggccagctgctgcccctggagatggatgacacagagaccggcctgctgagcgccatctgcctgatctgtggggacaggatggacctggaggagcctgagaaggtggacaagctgcaggagcccctgctggaggccctgcggctgtatgccaggagaagaagacccagccagccctacatgttccccaggatgctgatgaagatcacagacctgcggggcatcagcaccaagggagctgagcgggccatcaccctgaagatggagatccctggccccatgcctcctctcatccgggagatgctggagaaccctgagatgtttgaagatgacagcagccagcccggcccccaccccaatgccagcagtgaagatgaggtgcctgggggccagggcaaaggaggcctgaagagccctgcctag

SEQ ID NO: 334600 - DNA, 1149 bp, Artificial Sequence
  derived and/or modified sequence
atggtgcccagcagccccagcccccccccccccccccgggtgtacaaaccatgttttgtgtgcaacgataaatctagtgggtatcactacggggtgtcaagttgcgaggggtgtaaaggtttctttcgcaggagcatacaaaaaaacatggtctatacatgccaccgagataaaaactgtatcattaataaagttaccagaaaccgctgccagtactgccgactgcagaagtgttttgaggtgggcatgtccaaagaggccgtgagaaacgatcgcaacaaaaaaaaaaaagaggttaaggaggaggggtcccccgatagctacgaactgagccctcagttagaagaactcatcacaaaggtgtccaaagcccatcaggagactttcccttccctctgtcagcttggaaagtacacaacgaacagttcagcagaccaccgagtacagctggacctggggttgtgggacaagttttccgagttggctacaaaatgcatcataaagattgtcgagttcgccaaacggctccctggttttacaggcttatctatcgcagaccagataacactgctgaaggccgcttgtttggacatactgatgctacggatctgcacccgctataccccggagcaggacaccatgacattttcagacgggttaacattaaatcggacacaaatgcacaacgccggctttggccccctgactgatctcgtctttgcattcgctggacagttgctgccacttgagatggatgacacggagactgggctgctgtcagcgatatgtcttatctgcggcgaccgcatggatttggaggaacctgaaaaggttgacaagcttcaagagcctcttttggaagcactccgcctctacgctaggagaagacggccatcacaaccctacatgttcccaaggatgctgatgaagataacggatttgcggggcatatctaccaagggagctgagcgggccattactctgaaaatggaaatccctggcccgatgcctcctctgatccgggagatgctcgagaacccagaaatgttcgaggatgatagctcacagccggggccccaccccaatgccagctctgaggatgaggtgcctgggggacaagggaagggtgggttgaaatcaccggcctag

SEQ ID NO: 334601 - DNA, 1149 bp, Artificial Sequence
  derived and/or modified sequence
atggtgccaagttccccaagcccgccacccccacctcgcgtgtacaaaccttgctttgtgtgcaatgataagtccagcggctaccactacggagtgtcctcatgcgagggatgtaagggtttctttcgcagaagcattcagaagaatatggtgtacacatgtcatcgcgacaaaaactgcatcattaataaagtcactagaaaccggtgccaatactgtcgtcttcagaaatgcttcgaagtcgggatgtctaaggaagcagtgcggaatgaccgaaacaaaaaaaagaaagaagtcaaagaagaaggaagccctgatagctatgagctgagccctcagctggaggaactgatcacaaaggtgagcaaggcgcaccaggaaaccttcccatctctgtgccagctgggaaagtacaccactaatagtagcgcggaccatagggtgcagttagacctgggcttatgggacaagttctctgagctagcaactaagtgtattatcaagattgtcgagttcgctaaaaggttacccggatttacaggtctatccattgccgatcaaatcacactgctcaaggccgcttgtctggacatcctgatgctacgtatctgtacccgatatacacccgagcaggacacaatgacctttagtgacggactaactctgaatagaacccaaatgcacaacgccggtttcgggcctttaaccgatctggtgttcgcgttcgctggacagcttttacctctcgagatggatgatacggagaccggactgctgtccgcaatttgcctgatttgcggcgaccgcatggatctggaagagccggaaaaagtggataagctgcaggagccattgctcgaggcattgagactgtatgcacgaaggcgcaggccatcacagccatatatgtttccgcgaatgttgatgaaaatcacggacctaaggggcatctcaaccaaaggtgccgaaagagctatcacgctgaagatggagattccgggtccaatgccacccctgatccgggaaatgctggagaatcctgaaatgtttgaggacgacagctcccagcccggaccacaccctaacgcgtccagtgaggacgaggtccctggaggccaaggaaaaggcggactaaagtcacctgcctag

SEQ ID NO: 334602 - DNA, 1149 bp, Artificial Sequence
  derived and/or modified sequence
atggtgcccagcagccccagccccccccccccccccagagtgtacaagccctgcttcgtgtgcaacgacaagagcagcggctaccactacggcgtgagcagctgcgagggctgcaagggcttcttcagaagaagcatccagaagaacatggtgtacacctgccacagagacaagaactgcatcatcaacaaggtgaccagaaacagatgccagtactgcagactgcagaagtgcttcgaggtgggcatgagcaaggaggccgtgagaaacgacagaaacaagaagaagaaggaggtgaaggaggagggcagccccgacagctacgagctgagcccccagctggaggagctgatcaccaaggtgagcaaggcccaccaggagaccttccccagcctgtgccagctgggcaagtacaccaccaacagcagcgccgaccacagagtgcagctggacctgggcctgtgggacaagttcagcgagctggccaccaagtgcatcatcaagatcgtggagttcgccaagagactgcccggcttcaccggcctgagcatcgccgaccagatcaccctgctgaaggccgcctgcctggacatcctgatgctgagaatctgcaccagatacacccccgagcaggacaccatgaccttcagcgacggcctgaccctgaacagaacccagatgcacaacgccggcttcggccccctgaccgacctggtgttcgccttcgccggccagctgctgcccctggagatggacgacaccgagaccggcctgctgagcgccatctgcctgatctgcggcgacagaatggacctggaggagcccgagaaggtggacaagctgcaggagcccctgctggaggccctgagactgtacgccagaagaagaagacccagccagccctacatgttccccagaatgctgatgaagatcaccgacctgagaggcatcagcaccaagggcgccgagagagccatcaccctgaagatggagatccccggccccatgccccccctgatcagagagatgctggagaaccccgagatgttcgaggacgacagcagccagcccggcccccaccccaacgccagcagcgaggacgaggtgcccggcggccagggcaagggcggcctgaagagccccgcctag

SEQ ID NO: 334603 - protein, 824 aa, Artificial Sequence
  derived and/or modified sequence
MADSSEGPRAGPGEVAELPGDESGTPGGEAFPLSSLANLFEGEDGSLSPSPADASRPAGPGDGRPNLRMKFQGAFRKGVPNPIDLLESTLYESSVVPGPKKAPMDSLFDYGTYRHHSSDNKRWRKKIIEKQPQSPKAPAPQPPPILKVFNRPILFDIVSRGSTADLDGLLPFLLTHKKRLTDEEFREPSTGKTCLPKALLNLSNGRNDTIPVLLDIAERTGNMREFINSPFRDIYYRGELPLSLAACTNQPHIVNYLTENPHKKADMRRQDSRGNTVLHALVAIADNTRENTKFVTKMYDLLLLKCARLFPDSNLEAVLNNDGLSPLMMAAKTGKIGIFQHIIRREVTDEDTRHLSRKFKDWAYGPVYSSLYDLSSLDTCGEEASVLEILVYNSKIENRHEMLAVEPINELLRDKWRKFGAVSFYINVVSYLCAMVIFTLTAYYQPLEGTPPYPYRTTVDYLRLAGEVITLFTGVLFFFTNIKDLFMKKCPGVNSLFIDGSFQLLYFIYSVLVIVSAALYLAGIEAYLAVMVFALVLGWMNALYFTRGLKLTGTYSIMIQKILFKDLFRFLLVYLLFMIGYASALVSLLNPCANMKVCNEDQTNCTVPTYPSCRDSETFSTFLLDLFKLTIGMGDLEMLSSTKYPVVFIILLVTYIILTFVLLLNMLIALMGETVGQVSKESKHIWKLQWATTILDIERSFPVFLRKAFRSGEMVTVGKSSDGTPDRRWCFRVDEVNWSHWNQNLGIINEDPGKNETYQYYGFSHTVGRLRRDRWSSVVPRVVELNKNSNPDEVVVPLDSMGNPRCDGHQQGYPRKWRTDDAPL

SEQ ID NO: 334604 - DNA, 2475 bp, Artificial Sequence
  derived and/or modified sequence
atggccgacagcagcgagggccccagagccggccccggcgaggtggccgagctgcccggcgacgagagcggcacccccggcggcgaggccttccccctgagcagcctggccaacctgttcgagggcgaggacggcagcctgagccccagccccgccgacgccagcagacccgccggccccggcgacggcagacccaacctgagaatgaagttccagggcgccttcagaaagggcgtgcccaaccccatcgacctgctggagagcaccctgtacgagagcagcgtggtgcccggccccaagaaggcccccatggacagcctgttcgactacggcacctacagacaccacagcagcgacaacaagagatggagaaagaagatcatcgagaagcagccccagagccccaaggcccccgccccccagcccccccccatcctgaaggtgttcaacagacccatcctgttcgacatcgtgagcagaggcagcaccgccgacctggacggcctgctgcccttcctgctgacccacaagaagagactgaccgacgaggagttcagagagcccagcaccggcaagacctgcctgcccaaggccctgctgaacctgagcaacggcagaaacgacaccatccccgtgctgctggacatcgccgagagaaccggcaacatgagagagttcatcaacagccccttcagagacatctactacagaggcgagctgcccctgagcctggccgcctgcaccaaccagccccacatcgtgaactacctgaccgagaacccccacaagaaggccgacatgagaagacaggacagcagaggcaacaccgtgctgcacgccctggtggccatcgccgacaacaccagagagaacaccaagttcgtgaccaagatgtacgacctgctgctgctgaagtgcgccagactgttccccgacagcaacctggaggccgtgctgaacaacgacggcctgagccccctgatgatggccgccaagaccggcaagatcggcatcttccagcacatcatcagaagagaggtgaccgacgaggacaccagacacctgagcagaaagttcaaggactgggcctacggccccgtgtacagcagcctgtacgacctgagcagcctggacacctgcggcgaggaggccagcgtgctggagatcctggtgtacaacagcaagatcgagaacagacacgagatgctggccgtggagcccatcaacgagctgctgagagacaagtggagaaagttcggcgccgtgagcttctacatcaacgtggtgagctacctgtgcgccatggtgatcttcaccctgaccgcctactaccagcccctggagggcacccccccctacccctacagaaccaccgtggactacctgagactggccggcgaggtgatcaccctgttcaccggcgtgctgttcttcttcaccaacatcaaggacctgttcatgaagaagtgccccggcgtgaacagcctgttcatcgacggcagcttccagctgctgtacttcatctacagcgtgctggtgatcgtgagcgccgccctgtacctggccggcatcgaggcctacctggccgtgatggtgttcgccctggtgctgggctggatgaacgccctgtacttcaccagaggcctgaagctgaccggcacctacagcatcatgatccagaagatcctgttcaaggacctgttcagattcctgctggtgtacctgctgttcatgatcggctacgccagcgccctggtgagcctgctgaacccctgcgccaacatgaaggtgtgcaacgaggaccagaccaactgcaccgtgcccacctaccccagctgcagagacagcgagaccttcagcaccttcctgctggacctgttcaagctgaccatcggcatgggcgacctggagatgctgagcagcaccaagtaccccgtggtgttcatcatcctgctggtgacctacatcatcctgaccttcgtgctgctgctgaacatgctgatcgccctgatgggcgagaccgtgggccaggtgagcaaggagagcaagcacatctggaagctgcagtgggccaccaccatcctggacatcgagagaagcttccccgtgttcctgagaaaggccttcagaagcggcgagatggtgaccgtgggcaagagcagcgacggcacccccgacagaagatggtgcttcagagtggacgaggtgaactggagccactggaaccagaacctgggcatcatcaacgaggaccccggcaagaacgagacctaccagtactacggcttcagccacaccgtgggcagactgagaagagacagatggagcagcgtggtgcccagagtggtggagctgaacaagaacagcaaccccgacgaggtggtggtgcccctggacagcatgggcaaccccagatgcgacggccaccagcagggctaccccagaaagtggagaaccgacgacgcccccctgtag

SEQ ID NO: 334605 - DNA, 2475 bp, Artificial Sequence
  derived and/or modified sequence
atggccgattccagcgaagggccgagagccggccctggcgaggttgcagagctgcccggggacgagtccggaacaccgggtggggaggcctttccgctttcaagcctggccaatctttttgagggcgaggatggcagcctgagtccttctccagcagatgcctcccgcccagccggccctggtgatggcaggcctaatctccgcatgaaattccagggagcctttaggaagggggtccctaatccgatcgatctgttagagagcactctctacgagtcctctgtcgttcccgggcctaagaaggctcccatggacagcctgtttgactacgggacctacagacatcatagcagtgataataagcggtggagaaaaaagattatcgaaaaacagcctcagtctcccaaggcccctgcaccacaaccgccacctatcttaaaggtgttcaacaggccgatacttttcgacattgtctcaagaggatccactgctgatctggacggacttctgcccttcctcctgacccataagaagcggctgactgacgaagagttcagggagccttcaactggcaagacatgtctccccaaggctcttctgaatctatccaacggaaggaatgacacaatcccggtgctgctcgacatagctgaaagaacagggaatatgcgagagttcatcaactcccctttccgcgacatttactaccgaggcgagctgccactgagccttgcagcctgcaccaaccagcctcacattgtgaattatcttaccgaaaatcctcataagaaagccgacatgcgacgccaggattcacgaggtaataccgtccttcatgccctggtggccattgccgacaacacgagggaaaataccaagttcgtgaccaaaatgtacgatcttcttttgctgaaatgcgctcgcctttttcccgactcaaacctcgaagccgtcctaaataatgacggcctgtctcccctcatgatggctgctaagacaggaaagattggaattttccagcacatcattaggagagaggtgacagacgaggacacaagacatctgtcaaggaaattcaaggactgggcctacggtccagtttatagctctctgtacgacctctcgagtcttgatacgtgtggtgaagaagcgtcagtgctggagattctggtgtacaactcaaaaatcgaaaaccgccatgaaatgttggctgttgagccgattaatgaacttctgcgagacaaatggaggaagttcggtgccgtttcattctacatcaatgtcgtgagttacctctgtgccatggttatctttactttgactgcttactaccagccgctggagggaaccccaccatatccttatcgaaccactgtggactacttaagacttgctggagaagtgattactctgtttacgggagttctgtttttcttcacgaatatcaaggatctctttatgaaaaaatgtccgggagtgaacagcctctttatcgatgggagctttcagctgctgtatttcatttattccgttctggtgatagtgtcagcagccctctacctggctggtattgaggcctacctggccgttatggtgttcgcactcgttcttgggtggatgaacgctctctactttacccgtgggctgaagctcacagggacttatagcattatgatccagaagatactctttaaagaccttttcaggtttcttctcgtgtacctgttgtttatgatcggttatgcctctgcgctcgtctcacttttaaacccgtgcgccaacatgaaagtgtgtaatgaggatcagacaaactgtacagtgcctacctatccgtcctgccgagatagcgaaacgttttccacgtttttactggacctcttcaagctgacaatcggcatgggggaccttgagatgctgagcagcaccaaataccccgtcgtattcatcatattgctagtaacatacatcatcctgacattcgtactacttctgaatatgctcattgcccttatgggcgaaactgtggggcaagtgtctaaggaatctaagcacatttggaagctgcagtgggctactaccatcttggacatagaaaggtcattcccggtatttttgaggaaagccttccgctcgggcgaaatggtgacagtcggaaagagttctgatggaaccccagatagaagatggtgcttcagagtggacgaagtgaactggtctcattggaatcagaacctgggcattataaacgaggacccagggaagaatgagacataccagtactatgggttctctcataccgtaggaaggctacggcgagatcggtggagctctgttgtgccaagggtagtggaactgaacaagaactcgaatcctgacgaagttgttgttcccctggattcaatgggtaatcctcggtgcgacggacaccagcagggatacccccggaagtggagaacagatgatgcaccactgtag

SEQ ID NO: 334606 - DNA, 2475 bp, Artificial Sequence
  derived and/or modified sequence
atggctgactcttctgaggggccgagggccggacccggcgaggtggcagagctccctggcgatgaaagtgggacgcccgggggggaagcttttcccttgtcatctctggctaatttgttcgaaggagaagatggctccctgtcacccagccccgcagatgcatcccgaccggctggcccaggggatggtcgacctaacctgaggatgaagtttcagggcgcttttcgtaagggggtgcctaatccaattgacctgctcgaatcgacattatatgaatctagcgttgtcccagggcctaagaaagcacccatggacagtctgtttgactacggcacatacaggcaccactcttcagataataagcgctggcggaaaaagataatcgagaaacaacctcaatcccctaaggcccccgcaccacagccgccaccaatcctcaaagtattcaacagacctatcttgttcgacattgtatctaggggcagcaccgcggaccttgatggtctcttaccattcctcctcacccacaagaagcgacttaccgacgaggagttcagggaacccagcaccggcaagacgtgtctgccaaaagctcttttaaatctgtcaaatggacgcaacgacaccatacccgttcttctcgacattgcagaaaggaccgggaacatgcgagagttcatcaacagcccctttcgcgatatttattaccggggagagctgccgttaagcctggcagcgtgtactaaccagccgcacatcgtgaactatctgactgagaatccacacaagaaagccgacatgcgaagacaagatagcaggggaaacaccgttctccacgcgctggtggccatcgccgacaacacccgggaaaataccaaatttgttacaaaaatgtacgacctcctgctgcttaagtgtgctcggctcttccctgactcgaatctagaagctgtgcttaataacgatggtctgagtcccctgatgatggccgcaaaaacagggaagatcggcatatttcagcacatcattcgacgggaagtgactgacgaggacacaagacaccttagcagaaagtttaaggattgggcttacggccctgtctactcctcactatacgacttgagcagcctggacacgtgtggagaggaggcgtccgttctggagattttagtgtataactccaaaatcgagaaccgccatgagatgctcgcggttgagccaattaatgagctgctgcgagacaagtggagaaagttcggagccgtttccttctatattaacgtggtgagctacttgtgtgctatggtgatctttaccctgacggcgtactaccaaccactcgagggcacacccccttacccctacagaactaccgtggactatctgagactcgccggagaggtcatcactctgtttactggggtgttattcttcttcaccaacataaaagatctgttcatgaaaaagtgccctggcgtgaattccctttttatcgacggatcgttccagctcctctactttatctattctgtgttggtgattgtatcggctgcattgtacctggctggaatcgaagcctacctcgccgtcatggtgtttgccctagtactgggctggatgaatgcgctgtatttcacgcgtggtctcaaacttactggcacatactcgataatgatacagaagattctcttcaaagacttattccgatttttactggtttatctgttgttcatgatcggctacgcaagcgcactggtgtccctcctgaatccatgcgctaacatgaaagtgtgtaatgaagatcaaacaaactgtactgtcccaacctacccatcttgtcgcgattctgagacattcagcacctttcttcttgatttgttcaagttgacaatcggcatgggcgaccttgagatgctgtcgagcaccaagtatcctgtggtctttatcattctgctggtcacctacattatccttactttcgttttgttgcttaacatgctgatcgccctgatgggtgaaaccgtgggccaggtcagcaaggagagcaagcacatttggaagttgcagtgggcgacaaccattctggacattgagcgctctttcccagtgtttctcagaaaagcatttcggtctggcgaaatggtgacagtcggtaagagctcggatggtacaccagaccgtcgatggtgcttccgggtagacgaggtaaattggtcccattggaatcagaatctgggcatcatcaatgaagatcctgggaagaatgagacctaccagtattatgggttttctcacacagttgggcggcttagaagggaccgttggagcagtgtcgttccgagggtggtcgagctgaataaaaacagtaacccagacgaagtggtggtgccattggatagtatgggcaaccctcggtgtgacgggcaccagcagggctatccaaggaaatggagaaccgatgatgcacctctctag

SEQ ID NO: 334607 - DNA, 2475 bp, Artificial Sequence
  derived and/or modified sequence
atggctgacagcagcgagggcccccgggccggccctggagaggtggccgagctgcctggagatgaaagtggcaccccaggaggagaggccttccccctgagcagcctggccaacctgtttgaaggagaagatggcagcctgagccccagccctgcagatgccagcaggcctgctggccctggagatggccggcccaacctgaggatgaagttccagggcgccttcagaaaaggagtgcccaaccccatcgacctgctggagagcaccctgtatgagagctctgtggtgcccggccccaagaaggcccccatggacagcctgtttgattatggcacctaccgccaccacagcagtgacaacaagcgctggaggaagaagatcatcgagaagcagccccagagccccaaggccccagccccccagcccccacccatcctgaaggtgttcaaccggcccatcctgtttgatattgtgtcccggggcagcacagctgacctggatggcctgctgcccttcctgctgacccacaagaagaggctgacagatgaggagttccgggagcccagcacaggcaagacctgcctgcccaaggccctgctgaacctgagcaatggaagaaatgacaccatccctgtgctgctggacattgctgagaggacaggcaacatgagggagttcatcaacagccccttccgggacatctactacagaggagagctgcccctgagcctggccgcctgcaccaaccagccccacatcgtgaactacctgacagagaacccccacaagaaggctgacatgaggcggcaggacagccggggcaacacagtgctgcacgccctggtggccatcgctgacaacacccgggagaacaccaagtttgtgaccaagatgtatgacctgctgctgctgaagtgtgcccggctcttcccagacagcaacctggaggccgtgctgaacaatgatggcctgagccccctgatgatggccgccaagacaggcaagattggcatcttccagcacatcatccggcgggaggtgacagatgaggacaccaggcacctgagcaggaagttcaaggactgggcctacggccctgtgtacagcagcctgtatgacctgagcagcctggacacctgtggggaggaggcctctgtgctggagatcctggtgtacaacagcaagattgaaaatagacatgagatgctggccgtggagcccatcaatgagctgctgcgggacaagtggaggaagtttggagctgtgtccttctacatcaacgtggtgtcctacctgtgtgccatggtgatcttcaccctgacagcctactaccagcccctggagggcaccccaccctacccctaccgcaccaccgtggactacctgcggctggccggggaggtgatcaccctcttcaccggggtgctcttcttcttcaccaacatcaaggacctcttcatgaagaagtgccctggggtgaacagcctcttcattgatggcagcttccagctgctgtacttcatctacagcgtgctggtgattgtgtctgctgccctgtacctggccggcatcgaggcctacctggccgtgatggtgtttgccctggtgctgggctggatgaatgccctgtacttcacccggggcctgaagctgaccggcacctacagcatcatgatccagaagatcctcttcaaggacctcttccgcttcctgctggtgtacctgctcttcatgattggctacgccagcgccctggtgtccctgctgaacccctgtgccaacatgaaggtgtgcaatgaagaccagaccaactgcaccgtgcccacctaccccagctgccgggacagcgagaccttcagcaccttcctgctggacctcttcaagctgaccatcggcatgggagacctggagatgctgagcagcaccaagtaccctgtggtgttcatcatcctgctggtgacctacatcatcctgacctttgtgctgctgctgaacatgctgattgccctgatgggagagaccgtgggccaggtgtccaaggagagcaagcacatctggaagctgcagtgggccaccaccatcctggacatcgagaggagcttccctgtgttcctgaggaaggccttccgctctggagagatggtgacagtgggcaagagcagtgatggcaccccagaccggcgctggtgcttccgggtggatgaggtgaactggagccactggaaccagaacctgggcatcatcaatgaagaccccgggaagaatgagacctaccagtactacggcttcagccacacagtgggccgcctgcggcgggaccgctggagctctgtggtgccccgggtggtggagctgaacaagaacagcaacccagatgaggtggtggtgcccctggacagcatgggcaacccccgctgtgatggccaccagcagggctaccccaggaagtggaggacagatgatgcccccctgtag

SEQ ID NO: 334608 - DNA, 2475 bp, Artificial Sequence
  derived and/or modified sequence
atggccgacagcagcgagggcccccgggccggccccggcgaggtggccgagctcccgggagacgagtctggtacaccaggtggcgaagcttttcctttgagctccttggcaaacctgtttgagggggaggacggatccctttctccctctccagccgatgcgagccggccagctggacctggtgacgggagaccaaatctcaggatgaagttccagggcgccttcagaaaaggggtgccaaatccaatagacctgctggagtctacactgtacgagtcgtcagtggtgccaggccccaaaaaggcacccatggacagcctgttcgactacggaacatacaggcatcacagcagcgacaacaagaggtggcgcaagaagataatcgaaaagcagcctcagtcccctaaagcccctgccccacagcccccgccaatcctgaaagtctttaatcgacctatcttatttgatattgtgtctcgcggatcaacagccgacctggacggtctgttgcctttcctgctgacacataaaaagcgcctgaccgatgaagaatttagagaaccttcgactgggaagacatgcctcccaaaagcgttactgaacctgtctaacggccgcaatgacaccattcccgtgctgctggacattgcggagaggaccggtaatatgcgcgaattcattaatagccccttcagggacatatactacagaggcgaactcccattgagcttagcagcctgcactaaccagccacacattgtcaactaccttacagagaatccacataagaaagcagatatgcggcgccaggattctcgaggcaatacggtcctgcatgctctggtggccatagctgacaatactagagaaaatactaaatttgtgaccaagatgtatgatctgttattgcttaaatgcgctcgactttttccggactcaaatctggaggctgtgctcaacaacgacgggctaagccctttgatgatggcagcaaaaacgggaaagatcggaatctttcagcacattattagaagggaggtgacagatgaggatacacgtcacctatcccggaagtttaaagactgggcttatggcccagtgtatagcagcttatacgatctgtcatcactggatacctgtggggaggaggcctcagttctggagatcctggtttacaacagcaaaatagaaaatcggcatgagatgctcgctgtagagcctatcaatgagcttctgcgcgacaagtggcggaagttcggcgctgtgagcttctacattaatgtcgtgtcttatctttgtgctatggttatttttaccctcacagcttactaccagcctctggagggcacgcccccatatccgtaccgaactacggtcgactacttacggctggcgggtgaagtaattactctgtttacaggcgtgctgttcttcttcactaacatcaaggacctcttcatgaagaaatgcccaggagtgaatagcttattcatcgatggatctttccaactgctatactttatttactccgtcttggttatcgttagcgccgctctctaccttgcaggaatcgaagcatatctggctgtaatggtctttgctctggtgctcggatggatgaacgcactctatttcaccagagggcttaagttaaccggtacatattcaattatgattcagaagattctgttcaaggacctgtttcggtttctgttggtctacctgctgtttatgataggatacgcgagtgcacttgtatctctgttgaacccatgcgcaaatatgaaggtgtgcaacgaggaccagacaaattgtacagtgccaacttaccccagctgtcgcgatagcgaaacattctcaacctttctcctcgatttattcaaactgaccataggaatgggtgatctggagatgttatcctcaaccaaatatcccgtggttttcatcatcctgcttgtcacctacattattctgacgttcgtgcttcttctgaatatgctgatcgcactaatgggtgaaacggtagggcaggtgtccaaagagagcaagcacatctggaagctccaatgggcaaccaccatcctggatatagaacggtccttccccgtatttctgcggaaggcattccgttccggcgaaatggtgactgtgggcaagtcctctgacgggacacctgaccggcggtggtgctttcgggtagatgaggttaactggtcccactggaaccaaaaccttgggattataaatgaagaccccggcaagaacgagacgtaccagtactacggattcagtcacaccgtgggtaggctgaggcgtgataggtggtcttccgttgttcctagggtggtggagcttaataagaacagtaatccagatgaggtggttgtgcccctggacagcatgggcaatccccggtgcgacgggcaccaacagggttacccgcgaaagtggagaacggacgatgcccctctatag

SEQ ID NO: 334609 - DNA, 2475 bp, Artificial Sequence
  derived and/or modified sequence
atggccgacagcagcgagggcccccgggccggccccggcgaggtggctgaactgcctggggatgagagtggaaccccaggtggcgaggccttcccgctgtcgtcattggcgaacctgtttgagggggaagatggttccctgagtccttcaccagcagatgcctcccgccctgccgggccaggcgatgggcggccaaatttaagaatgaaatttcagggcgcctttcgtaagggggtgccaaatccaattgacttgcttgagagcaccttatacgagtcatcggttgtgccgggtcctaaaaaagcccccatggattccctgtttgattatgggacatacagacaccactcttcagataacaagaggtggagaaaaaagatcatagaaaagcagccgcagtcccccaaggcccccgcccctcagccaccccccatcttgaaggtctttaatcgccccatcctgttcgacatcgtgagtcgtggaagcacagccgacctcgatgggctattaccctttctgcttacgcataagaaacgtttgactgatgaagaattccgcgaaccttctacaggaaagacctgtctccccaaagccctgctgaacctgagcaatggccgtaacgacaccattcccgtactgctggatattgccgaacgaacaggcaacatgcgggagttcattaattcacctttccgcgacatctactaccggggagaactcccactgagtctggccgcctgcaccaaccagccacacattgtgaactacttaactgagaatccgcacaagaaggctgacatgcgtaggcaagactcccgtggaaataccgttctccacgcactggtcgctatcgctgataatacgcgggaaaacactaagttcgtaacaaaaatgtatgacctgctgctcttaaagtgcgcccgacttttcccagactcgaacttggaagctgtcctgaacaatgatggcctatctcctttgatgatggcagctaaaacaggaaaaatcgggatcttccagcacataataagacgcgaagttacagacgaggacacgagacaccttagtagaaagtttaaggactgggcatacggccctgtgtactcatctttgtatgacctgagttctctcgatacctgtggcgaggaagcatccgtgctcgaaatactcgtttataactccaagattgaaaatagacacgaaatgctagcagtggagcccattaatgaactactgagggataagtggagaaagtttggagcggtgagcttttatatcaatgtcgtctcttatctgtgtgctatggttatctttaccctaacagcttattaccagcctctagagggtacaccgccctatccgtataggaccactgtggattatctgaggctcgcaggggaagtcattactctttttaccggcgtactctttttcttcaccaatatcaaggacctgtttatgaaaaagtgtcctggtgtcaacagcttgtttatcgacgggtcatttcagctgctgtacttcatttactcagtactcgtgattgtctccgccgccctgtatctagccgggatcgaagcttatttagcggttatggtttttgctttggttctgggatggatgaatgcactctattttactcgaggcttaaagctcacaggcacctactctattatgatccagaagattttgtttaaggatctgtttagatttctactggtatatttattgttcatgataggctatgctagtgcactcgtgtccttactcaacccatgcgccaacatgaaagtttgcaatgaagatcagacaaactgtaccgtgccaacctaccccagctgtagggactctgagaccttctccacttttttgctagacttgttcaaattgacaatcggaatgggggatctggaaatgctgtcatcaacaaaataccccgtggtgttcattatcttgctcgtcacatacattatcttaacatttgtgcttctgctaaacatgctgatcgcgctgatgggcgagacagtcggtcaagttagtaaggagtccaaacatatttggaagctccagtgggccactacgattctggatattgagaggagtttcccggtgttcctcagaaaagctttcagaagcggtgaaatggttaccgtagggaagtcatccgacggtacccctgaccgccgctggtgtttcagagtagacgaggtaaattggtcccactggaaccagaacctgggtataatcaacgaagacccgggaaagaacgagacttaccaatactacggcttttctcacacggttggccgcttgagaagggaccgctggtctagtgttgtgccacgggttgtcgagctgaataaaaactcaaatcctgacgaggtcgtcgtgcctctggacagcatgggcaacccacggtgtgacgggcatcaacaagggtaccctcggaaatggagaactgatgacgcccccctgtag

SEQ ID NO: 334610 - DNA, 2475 bp, Artificial Sequence
  derived and/or modified sequence
atggccgacagttcggagggacctagagccggacccggtgaagtagctgagctgcccggtgacgaatctgggacccctgggggagaagccttccctctgtctagtttagctaacctgttcgagggagaggatggctcccttagtccaagccccgcagacgcttcccggccagccggtccaggagatggcaggcctaaccttcgcatgaagtttcagggagcctttcggaagggagtgcccaaccccatcgatttactggagagcacattatatgagtcctcagtggtgcccggaccgaaaaaagccccaatggattccctgttcgattatggcacataccggcatcacagctccgacaacaagcgctggaggaaaaagattatcgaaaagcagcctcagtctcctaaggcccctgctcctcagccacccccaattttgaaagtgtttaaccgtcccatcctatttgatatcgtcagtagggggagcactgccgatttagacggactgctgcccttcctcttgacacacaagaagcgcctgacggatgaggaatttcgcgaacccagtacgggaaaaacctgccttcccaaggccttattaaacctgtctaatggaaggaacgacactatcccggtgttattggatatcgccgaacgtaccggcaacatgcgagagtttatcaattcccctttcagggacatctactaccggggagaactgccactgtcactggcagcctgcaccaaccagccacacattgtgaactatcttaccgagaatccccataagaaagccgacatgcgaagacaagattcaagaggaaacacagtgctgcatgccctcgttgcgatcgccgacaatactagagagaataccaaatttgtgactaaaatgtatgacctgctgctgctaaaatgtgcacgcctgttccctgattccaacttggaggctgtacttaataatgacggtttatctcccctcatgatggccgctaaaacaggaaaaatcggcattttccaacatatcatccgtcgagaagtgaccgatgaggacacccgccatttgtctcgcaagtttaaagactgggcttacggccctgtgtattccagcctgtatgatttatcttctctcgatacctgtggtgaggaggctagtgtgctggaaatcctggtctacaattcaaaaatcgaaaaccgccacgagatgctggccgtggaacctataaatgagctgcttagggataagtggcgcaaattcggcgctgtatcattctatatcaacgtggtgagctatctgtgcgctatggtcatcttcactttgactgcttactatcagccgctcgaaggtacacctccatacccataccgtacaactgtggactatttgagactggcgggagaagtcatcacactatttacaggggtacttttctttttcactaatatcaaagatctgtttatgaaaaaatgccctggagtgaactctctgttcattgatgggagcttccagctgctgtattttatctacagcgttctagtcatagtgagcgccgctctatacttagcaggcattgaggcgtacttggctgtgatggtctttgcactggtcctcggctggatgaatgccttatactttacccgaggcctcaagctcacaggaacctacagcatcatgattcagaagatcctattcaaggatttgtttaggtttctgctcgtgtacctccttttcatgatcggttacgcctctgcgctggtgtcgctgctgaatccttgtgccaacatgaaagtctgcaatgaggatcagactaactgcactgttcctacatatcctagctgccgagatagcgagaccttcagtacgttcctacttgacctgttcaaactcacgattgggatgggggatcttgagatgctgtctagtacgaagtatcctgtggtgtttataatattactcgtgacctatattatccttacgttcgtgcttctgctgaacatgctgatcgcactcatgggcgagacagtgggccaggtctccaaagagagcaaacacatctggaaactccaatgggctaccacgatactggatatagaaaggagttttcctgtattcttacggaaagcctttcggtctggagaaatggttacagtggggaaatcttctgatggcacccccgatagacggtggtgttttcgcgtggatgaggtcaattggtcgcattggaatcagaatttggggatcatcaatgaggatccgggaaagaatgaaacgtaccagtactacggcttcagccataccgtcggtaggctgcgcagagatcggtggagcagcgtcgtcccgagagtggttgagctcaataagaactccaaccccgacgaagtggtggttccactcgattctatgggcaaccccaggtgtgatggtcaccaacaggggtatcccaggaagtggcggaccgacgatgcacccctttag

SEQ ID NO: 334611 - DNA, 2475 bp, Artificial Sequence
  derived and/or modified sequence
atggcagattcttccgagggcccaagagcgggacctggggaagtggctgagctacccggtgacgagtcaggaaccccgggtggtgaagccttccccctgtcatctctagccaacctatttgagggcgaggatgggtccctgtcccctagccccgcagacgcctcccgaccggcaggccctggtgatggacgaccaaatctgcggatgaaattccaaggagccttccgtaagggtgtgccgaaccctatcgacctgctggaatcgaccctctatgagtcttcagtggtccctggcccaaaaaaagctcctatggactctctcttcgactatgggacatatcgccaccactcctctgacaataaaagatggcggaaaaagatcatcgagaaacagccacagtcgcctaaggcccctgcgccacagccaccacccatactgaaagtcttcaataggccaattttgtttgatattgtgagtcgcggatctaccgcagacttagacggactactcccattcctccttacacataagaaacggctaacggacgaggagttcagagaaccctcaaccgggaagacctgtttgccgaaggccctactcaacctaagtaacgggaggaatgatacaatccctgtcctgctggacatcgcagagaggacggggaacatgagagagtttatcaactcgccgttcagggacatttattacaggggagagctgcccctttcattagctgcttgtacaaaccagccacacattgtgaactacttgacagaaaatccacacaaaaaggcggacatgcgaagacaggacagccgcggaaacaccgtgctgcatgctttggttgccatcgccgacaacaccagagaaaatacgaaattcgtgactaagatgtacgatttactccttctcaaatgcgctcgcttgttcccggacagtaacctggaagccgtcctgaataatgatggcctcagcccacttatgatggctgcaaaaacaggtaaaattggtatctttcaacatatcatcagaagggaagtgaccgatgaagacactcgccacctatcaaggaaattcaaggactgggcctacggaccagtgtattcatcattgtacgatctcagttcactggacacctgcggcgaggaagcttcagtgcttgaaatcctggtctacaactccaagatagagaacagacacgagatgcttgctgttgagccaattaatgaactcttgagagacaaatggaggaagttcggtgccgtgtcattctacattaatgtggtctcgtatttgtgtgctatggtaatcttcacacttaccgcctattaccagccactggaagggacacctccttatccttatcggactacagtcgactacctgcgactcgcaggggaggttatcacccttttcaccggggtgctcttcttcttcaccaatatcaaggacctgtttatgaagaagtgcccaggggtgaattccctcttcatagacggctcatttcagctgctatatttcatttactccgtgcttgtcattgtttccgcggctctgtacctggctggaatagaggcctatctcgctgtaatggttttcgcactcgtcctgggttggatgaatgccctatacttcacgcgagggttgaaactcaccggaacttattcaatcatgatccaaaagatcttgttcaaagatctcttccgatttttgctcgtgtatttgcttttcatgatcggatacgctagcgcccttgtgagtctgctgaatccatgtgctaacatgaaagtatgtaacgaagaccagacgaactgcacagtcccgacttatccctcctgcagggactctgagactttcagtaccttcctactggacctttttaaactgacaattgggatgggtgacctggagatgctcagcagcacaaagtacccagttgtgttcatcatactgctggtcacttatatcatactgacctttgtcctcctgctgaacatgctcattgctctgatgggggaaacagtggggcaggtgtctaaggagtcaaaacacatttggaaactgcagtgggccacaaccattctcgacatcgaacggtccttcccagtcttcctgcggaaggcttttcgcagtggcgaaatggtgacggtcgggaagagtagtgacggcacaccagatcgtagatggtgctttcgggtcgacgaagtgaattggagccattggaaccagaatctgggaatcatcaacgaggatcccggaaaaaatgaaacttaccaatattatgggttttcccataccgtagggagacttcggcgagataggtggtcgtctgtggtgcctcgggtcgttgaactgaataaaaactcaaacccagacgaggtcgtcgtgccactcgatagcatgggcaatcctcgatgtgatggtcaccagcaggggtaccctcggaagtggcggaccgacgacgctccgctctag

SEQ ID NO: 334612 - DNA, 3097 bp, Artificial Sequence
  derived and/or modified sequence
ccggccgggattcaggaagcgcggatctcccggccgccggcgcccagccgtcccggaggctgagcagtgcagacgggcctggggcaggcatggcggattccagcgaaggcccccgcgcggggcccggggaggtggctgagctccccggggatgagagtggcaccccaggtggggaggcttttcctctctcctccctggccaatctgtttgagggggaggatggctccctttcgccctcaccggctgatgccagtcgccctgctggcccaggcgatgggcgaccaaatctgcgcatgaagttccagggcgccttccgcaagggggtgcccaaccccatcgatctgctggagtccaccctatatgagtcctcggtggtgcctgggcccaagaaagcacccatggactcactgtttgactacggcacctatcgtcaccactccagtgacaacaagaggtggaggaagaagatcatagagaagcagccgcagagccccaaagcccctgcccctcagccgccccccatcctcaaagtcttcaaccggcctatcctctttgacatcgtgtcccggggctccactgctgacctggacgggctgctcccattcttgctgacccacaagaaacgcctaactgatgaggagtttcgagagccatctacggggaagacctgcctgcccaaggccttgctgaacctgagcaatggccgcaacgacaccatccctgtgctgctggacatcgcggagcgcaccggcaacatgagggagttcattaactcgcccttccgtgacatctactatcgaggggagctgcccctgtcgctggctgcctgcaccaaccagccccacattgtcaactacctgacggagaacccccacaagaaggcggacatgcggcgccaggactcgcgaggcaacacagtgctgcatgcgctggtggccattgctgacaacacccgtgagaacaccaagtttgttaccaagatgtacgacctgctgctgctcaagtgtgcccgcctcttccccgacagcaacctggaggccgtgctcaacaacgacggcctctcgcccctcatgatggctgccaagacgggcaagattgggatctttcagcacatcatccggcgggaggtgacggatgaggacacacggcacctgtcccgcaagttcaaggactgggcctatgggccagtgtattcctcgctttatgacctctcctccctggacacgtgtggggaagaggcctccgtgctggagatcctggtgtacaacagcaagattgagaaccgccacgagatgctggctgtggagcccatcaatgaactgctgcgggacaagtggcgcaagttcggggccgtctccttctacatcaacgtggtctcctacctgtgtgccatggtcatcttcactctcaccgcctactaccagccgctggagggcacaccgccgtacccttaccgcaccacggtggactacctgcggctggctggcgaggtcattacgctcttcactggggtcctgttcttcttcaccaacatcaaagacttgttcatgaagaaatgccctggagtgaattctctcttcattgatggctccttccagctgctctacttcatctactctgtcctggtgatcgtctcagcagccctctacctggcagggatcgaggcctacctggccgtgatggtctttgccctggtcctgggctggatgaatgccctttacttcacccgtgggctgaagctgacggggacctatagcatcatgatccagaagattctcttcaaggaccttttccgattcctgctcgtctacttgctcttcatgatcggctacgcttcagccctggtctccctcctgaacccgtgtgccaacatgaaggtgtgcaatgaggaccagaccaactgcacagtgcccacttacccctcgtgccgtgacagcgagaccttcagcaccttcctcctggacctgtttaagctgaccatcggcatgggcgacctggagatgctgagcagcaccaagtaccccgtggtcttcatcatcctgctggtgacctacatcatcctcacctttgtgctgctcctcaacatgctcattgccctcatgggcgagacagtgggccaggtctccaaggagagcaagcacatctggaagctgcagtgggccaccaccatcctggacattgagcgctccttccccgtattcctgaggaaggccttccgctctggggagatggtcaccgtgggcaagagctcggacggcactcctgaccgcaggtggtgcttcagggtggatgaggtgaactggtctcactggaaccagaacttgggcatcatcaacgaggacccgggcaagaatgagacctaccagtattatggcttctcgcataccgtgggccgcctccgcagggatcgctggtcctcggtggtaccccgcgtggtggaactgaacaagaactcgaacccggacgaggtggtggtgcctctggacagcatggggaacccccgctgcgatggccaccagcagggttacccccgcaagtggaggactgatgacgccccgctctagggactgcagcccagccccagcttctctgcccactcatttctagtccagccgcatttcagcagtgccttctggggtgtccccccacaccctgctttggccccagaggcgagggaccagtggaggtgccagggaggccccaggaccctgtggtcccctggctctgcctccccaccctggggtgggggctcccggccacctgtcttgctcctatggagtcacataagccaacgccagagcccctccacctcaggccccagcccctgcctctccattatttatttgctctgctctcaggaagcgacgtgacccctgccccagctggaacctggcagaggccttaggaccccgttccaagtgcactgcccggccaagccccagcctcagcctgcgcctgagctgcatgcgccaccatttttggcagcgtggcagctttgcaaggggctggggccctcggcgtggggccatgccttctgtgtgttctgtagtgtctgggatttgccggtgctcaataaatgtttattcattgacggtgg

SEQ ID NO: 334613 - DNA, 2475 bp, Artificial Sequence
  derived and/or modified sequence
atggcggattccagcgaaggcccccgcgcggggcccggggaggtggctgagctccccggggatgagagtggcaccccaggtggggaggcttttcctctctcctccctggccaatctgtttgagggggaggatggctccctttcgccctcaccggctgatgccagtcgccctgctggcccaggcgatgggcgaccaaatctgcgcatgaagttccagggcgccttccgcaagggggtgcccaaccccatcgatctgctggagtccaccctatatgagtcctcggtggtgcctgggcccaagaaagcacccatggactcactgtttgactacggcacctatcgtcaccactccagtgacaacaagaggtggaggaagaagatcatagagaagcagccgcagagccccaaagcccctgcccctcagccgccccccatcctcaaagtcttcaaccggcctatcctctttgacatcgtgtcccggggctccactgctgacctggacgggctgctcccattcttgctgacccacaagaaacgcctaactgatgaggagtttcgagagccatctacggggaagacctgcctgcccaaggccttgctgaacctgagcaatggccgcaacgacaccatccctgtgctgctggacatcgcggagcgcaccggcaacatgagggagttcattaactcgcccttccgtgacatctactatcgaggggagctgcccctgtcgctggctgcctgcaccaaccagccccacattgtcaactacctgacggagaacccccacaagaaggcggacatgcggcgccaggactcgcgaggcaacacagtgctgcatgcgctggtggccattgctgacaacacccgtgagaacaccaagtttgttaccaagatgtacgacctgctgctgctcaagtgtgcccgcctcttccccgacagcaacctggaggccgtgctcaacaacgacggcctctcgcccctcatgatggctgccaagacgggcaagattgggatctttcagcacatcatccggcgggaggtgacggatgaggacacacggcacctgtcccgcaagttcaaggactgggcctatgggccagtgtattcctcgctttatgacctctcctccctggacacgtgtggggaagaggcctccgtgctggagatcctggtgtacaacagcaagattgagaaccgccacgagatgctggctgtggagcccatcaatgaactgctgcgggacaagtggcgcaagttcggggccgtctccttctacatcaacgtggtctcctacctgtgtgccatggtcatcttcactctcaccgcctactaccagccgctggagggcacaccgccgtacccttaccgcaccacggtggactacctgcggctggctggcgaggtcattacgctcttcactggggtcctgttcttcttcaccaacatcaaagacttgttcatgaagaaatgccctggagtgaattctctcttcattgatggctccttccagctgctctacttcatctactctgtcctggtgatcgtctcagcagccctctacctggcagggatcgaggcctacctggccgtgatggtctttgccctggtcctgggctggatgaatgccctttacttcacccgtgggctgaagctgacggggacctatagcatcatgatccagaagattctcttcaaggaccttttccgattcctgctcgtctacttgctcttcatgatcggctacgcttcagccctggtctccctcctgaacccgtgtgccaacatgaaggtgtgcaatgaggaccagaccaactgcacagtgcccacttacccctcgtgccgtgacagcgagaccttcagcaccttcctcctggacctgtttaagctgaccatcggcatgggcgacctggagatgctgagcagcaccaagtaccccgtggtcttcatcatcctgctggtgacctacatcatcctcacctttgtgctgctcctcaacatgctcattgccctcatgggcgagacagtgggccaggtctccaaggagagcaagcacatctggaagctgcagtgggccaccaccatcctggacattgagcgctccttccccgtattcctgaggaaggccttccgctctggggagatggtcaccgtgggcaagagctcggacggcactcctgaccgcaggtggtgcttcagggtggatgaggtgaactggtctcactggaaccagaacttgggcatcatcaacgaggacccgggcaagaatgagacctaccagtattatggcttctcgcataccgtgggccgcctccgcagggatcgctggtcctcggtggtaccccgcgtggtggaactgaacaagaactcgaacccggacgaggtggtggtgcctctggacagcatggggaacccccgctgcgatggccaccagcagggttacccccgcaagtggaggactgatgacgccccgctctag

SEQ ID NO: 334614 - protein, 811 aa, Artificial Sequence
  derived and/or modified sequence
MADSSEGPRAGPGEVAELPGDESGTPGGEAFPLSSLANLFEGEDGSLSPSPADASRPAGPGDGRPNLRMKFQGAFRKGVPNPIDLLESTLYESSVVPGPKKAPMDSLFDYGTYRHHSSDNKRWRKKIIEKQPQSPKAPAPQPPPILKVFNRPILFDIVSRGSTADLDGLLPFLLTHKKRLTDEEFREPSTGKTCLPKALLNLSNGRNDTIPVLLDIAERTGNMREFINSPFRDIYYRGQTALHIAIERRCKHYVELLVAQGADVHAQARGRFFQPKDEGGYFYFGELPLSLAACTNQPHIVNYLTENPHKKADMRRQDSRGNTVLHALVAIADNTRENTKFVTKMYDLLLLKCARLFPDSNLEAVLNNDGLSPLMMAAKTGKIGNRHEMLAVEPINELLRDKWRKFGAVSFYINVVSYLCAMVIFTLTAYYQPLEGTPPYPYRTTVDYLRLAGEVITLFTGVLFFFTNIKDLFMKKCPGVNSLFIDGSFQLLYFIYSVLVIVSAALYLAGIEAYLAVMVFALVLGWMNALYFTRGLKLTGTYSIMIQKILFKDLFRFLLVYLLFMIGYASALVSLLNPCANMKVCNEDQTNCTVPTYPSCRDSETFSTFLLDLFKLTIGMGDLEMLSSTKYPVVFIILLVTYIILTFVLLLNMLIALMGETVGQVSKESKHIWKLQWATTILDIERSFPVFLRKAFRSGEMVTVGKSSDGTPDRRWCFRVDEVNWSHWNQNLGIINEDPGKNETYQYYGFSHTVGRLRRDRWSSVVPRVVELNKNSNPDEVVVPLDSMGNPRCDGHQQGYPRKWRTDDAPL

SEQ ID NO: 334615 - DNA, 2436 bp, Artificial Sequence
  derived and/or modified sequence
atggccgacagcagcgagggccccagagccggccccggcgaggtggccgagctgcccggcgacgagagcggcacccccggcggcgaggccttccccctgagcagcctggccaacctgttcgagggcgaggacggcagcctgagccccagccccgccgacgccagcagacccgccggccccggcgacggcagacccaacctgagaatgaagttccagggcgccttcagaaagggcgtgcccaaccccatcgacctgctggagagcaccctgtacgagagcagcgtggtgcccggccccaagaaggcccccatggacagcctgttcgactacggcacctacagacaccacagcagcgacaacaagagatggagaaagaagatcatcgagaagcagccccagagccccaaggcccccgccccccagcccccccccatcctgaaggtgttcaacagacccatcctgttcgacatcgtgagcagaggcagcaccgccgacctggacggcctgctgcccttcctgctgacccacaagaagagactgaccgacgaggagttcagagagcccagcaccggcaagacctgcctgcccaaggccctgctgaacctgagcaacggcagaaacgacaccatccccgtgctgctggacatcgccgagagaaccggcaacatgagagagttcatcaacagccccttcagagacatctactacagaggccagaccgccctgcacatcgccatcgagagaagatgcaagcactacgtggagctgctggtggcccagggcgccgacgtgcacgcccaggccagaggcagattcttccagcccaaggacgagggcggctacttctacttcggcgagctgcccctgagcctggccgcctgcaccaaccagccccacatcgtgaactacctgaccgagaacccccacaagaaggccgacatgagaagacaggacagcagaggcaacaccgtgctgcacgccctggtggccatcgccgacaacaccagagagaacaccaagttcgtgaccaagatgtacgacctgctgctgctgaagtgcgccagactgttccccgacagcaacctggaggccgtgctgaacaacgacggcctgagccccctgatgatggccgccaagaccggcaagatcggcaacagacacgagatgctggccgtggagcccatcaacgagctgctgagagacaagtggagaaagttcggcgccgtgagcttctacatcaacgtggtgagctacctgtgcgccatggtgatcttcaccctgaccgcctactaccagcccctggagggcacccccccctacccctacagaaccaccgtggactacctgagactggccggcgaggtgatcaccctgttcaccggcgtgctgttcttcttcaccaacatcaaggacctgttcatgaagaagtgccccggcgtgaacagcctgttcatcgacggcagcttccagctgctgtacttcatctacagcgtgctggtgatcgtgagcgccgccctgtacctggccggcatcgaggcctacctggccgtgatggtgttcgccctggtgctgggctggatgaacgccctgtacttcaccagaggcctgaagctgaccggcacctacagcatcatgatccagaagatcctgttcaaggacctgttcagattcctgctggtgtacctgctgttcatgatcggctacgccagcgccctggtgagcctgctgaacccctgcgccaacatgaaggtgtgcaacgaggaccagaccaactgcaccgtgcccacctaccccagctgcagagacagcgagaccttcagcaccttcctgctggacctgttcaagctgaccatcggcatgggcgacctggagatgctgagcagcaccaagtaccccgtggtgttcatcatcctgctggtgacctacatcatcctgaccttcgtgctgctgctgaacatgctgatcgccctgatgggcgagaccgtgggccaggtgagcaaggagagcaagcacatctggaagctgcagtgggccaccaccatcctggacatcgagagaagcttccccgtgttcctgagaaaggccttcagaagcggcgagatggtgaccgtgggcaagagcagcgacggcacccccgacagaagatggtgcttcagagtggacgaggtgaactggagccactggaaccagaacctgggcatcatcaacgaggaccccggcaagaacgagacctaccagtactacggcttcagccacaccgtgggcagactgagaagagacagatggagcagcgtggtgcccagagtggtggagctgaacaagaacagcaaccccgacgaggtggtggtgcccctggacagcatgggcaaccccagatgcgacggccaccagcagggctaccccagaaagtggagaaccgacgacgcccccctgtag

SEQ ID NO: 334616 - DNA, 2436 bp, Artificial Sequence
  derived and/or modified sequence
atggccgactcatctgaagggcccagggctgggccaggtgaagtggccgaactgcccggtgatgagtctggtacaccgggcggggaagctttccctctgtcgagcctggccaatcttttcgagggagaagatggctccctgtcaccatctcctgccgacgcttccaggcctgcaggaccaggagatgggcggcctaacctgcgaatgaaatttcagggggccttccggaagggggtcccgaaccctatcgacctgcttgaatctaccctgtacgagtcttcggtcgtgcccggccccaaaaaggctcccatggacagcctctttgactatggcacataccgtcaccattcttctgacaacaaacgctggcgaaaaaaaattattgaaaagcaaccccagagtcctaaggcccccgcacctcagccacccccaatcctaaaagtgtttaatcggcctattctttttgatatcgtgagtcgcggatctaccgcggatctggatggcctgcttccatttctgctgactcataagaaaaggcttaccgatgaggagttccgagaaccaagcacaggtaaaacctgtttacctaaagccctgctgaatctgtccaacggcagaaacgatacaattcccgttctcctggacattgctgaaagaactggcaacatgagagagtttatcaattctccgtttcgggacatctattacagggggcagacagccctgcacatcgcaatcgaaagaaggtgtaagcactacgtcgaactgctcgtggcccagggcgccgacgttcacgcccaggccagaggcaggttcttccagccgaaagatgagggcggctatttttatttcggcgaattgcccctgagtctggccgcctgtacaaaccaaccgcatatcgtgaactacctgactgagaatcctcataagaaagccgatatgcgccgacaggacagcagaggcaatactgttcttcatgcgcttgtggccattgccgacaatacccgggaaaatactaagttcgtaacaaaaatgtacgatcttcttctcttgaaatgcgcgcgattgttcccggactcgaatttagaggctgtgctgaataacgatggtctctccccccttatgatggctgctaaaacaggcaagatcggtaatcgacacgagatgttggccgtggaaccgatcaatgagctcctgcgggacaagtggagaaagtttggggctgtgtccttctacatcaacgtggtcagctacctgtgcgccatggttatctttacactgactgcctattaccagcccttggaagggaccccgccatatccctatcgcaccacggtcgactaccttcgactggccggtgaagtgataaccctgttcacaggcgttctgttctttttcaccaacataaaggacctgttcatgaagaagtgccctggggtaaactcactctttatcgatgggtccttccagcttctgtactttatttattccgtgctggtgatcgtgtctgctgccctgtatctggctggaatcgaagcctacttggcggtaatggtattcgccctggttcttggatggatgaatgctctgtatttcaccagagggctgaaattgactggaacgtacagcattatgattcagaaaatcttgtttaaagatttgtttaggtttcttttagtctatttattattcatgatcggctatgccagtgccttggtttctctactcaacccttgtgctaatatgaaggtgtgtaatgaagatcagaccaactgcacggttccaacctatccctcctgcagagatagtgaaaccttttcgactttcctgctcgacctgttcaagctcacgattgggatgggcgatctggaaatgctatccagcacgaagtaccccgtagtctttattattcttctggtgacgtacattatattgacctttgtcctgttgttaaatatgctcatcgctcttatgggagagactgttggccaggtctccaaggagagcaagcacatttggaagcttcagtgggctaccactattctcgatatagaaaggagttttcccgtgttcctaaggaaagcgtttaggtctggggagatggtaaccgtgggcaagagcagtgatgggacaccggatcgacggtggtgcttcagagttgatgaggtgaattggtcgcactggaatcagaacctggggataatcaacgaggaccctgggaaaaatgagacctatcagtattatggttttagccatacagtcggccggctgaggcgagacagatggtcctccgtcgtgccaagggttgtggagttgaacaaaaactccaaccctgatgaagtggtggtgcccttagattcaatggggaaccccaggtgcgacggccatcaacaggggtacccaaggaaatggagaaccgatgatgcaccgctgtag

SEQ ID NO: 334617 - DNA, 2436 bp, Artificial Sequence
  derived and/or modified sequence
atggccgactcgtccgaaggacctcgggccggaccgggcgaggttgcagagctgccaggcgacgaatccgggacacctgggggcgaagccttccctctctcaagcttggccaacctgttcgaaggggaggacgggagcttaagccctagtcccgccgatgcttccaggccagctggaccaggcgacggtaggcccaacctgcgaatgaagttccaaggagcttttagaaaaggcgtcccaaatccgatcgacctcctagagtctaccctttacgagtcatctgtggttcccgggccaaagaaagcccccatggattctctctttgattacggaacctatagacatcactcctcggataacaaacggtggaggaagaagatcatcgaaaaacaacctcagagtccgaaggcgcccgctccccagccacctccaattctaaaggtcttcaataggcccattctgttcgatatcgtttctagaggttccaccgctgacctggacgggttactgccgttcttgctcactcacaaaaagagactgaccgatgaggaatttagggagcccagcaccggtaaaacctgtctacccaaagccttgctgaacctgtccaatggccgtaatgacaccattcctgttctgctggatatcgcagagagaacaggcaacatgagggagttcattaatagtccctttcgggacatatattacaggggccaaaccgctcttcacatcgctattgagcggagatgcaagcactacgttgaattgctagttgcccagggcgctgatgtgcacgcacaagctagggggaggtttttccagcctaaagacgaagggggttacttttactttggtgagctaccactgagcttggccgcctgtacgaatcagccccacatcgtaaactatcttacggagaatccgcacaaaaaagccgatatgcgcaggcaggattcgcgcggcaataccgttcttcatgctctagttgccatcgccgataacacacgagagaataccaagtttgtgactaaaatgtacgacctcctccttctgaaatgcgcacggctgttcccagactcaaacctggaagccgtcctcaataacgacgggctctcacctcttatgatggcagcaaagacgggaaagatcggcaaccgtcacgaaatgctcgcagtggagccgatcaacgaactgctccgcgataagtggcgtaagtttggagctgtctctttttacattaacgtggtatcctatctctgtgccatggtcattttcactctgactgcatattatcagcccttggagggaacgcccccgtatccctatcggactaccgtggactatctgcgtcttgctggtgaggtgatcaccctcttcactggcgttctgttttttttcacgaatattaaggatctctttatgaagaaatgcccaggcgtgaactccttgtttatcgacggtagctttcagctgttgtactttatctatagtgtgctggtaatcgtgagtgcagccctgtatctggcgggaatcgaggcttacttggccgtgatggtgttcgctctcgtgttggggtggatgaacgccttgtactttactcgtggtctgaaattgaccggtacatacagcatcatgattcagaaaatcctctttaaagacctctttagatttttgctggtatatctgttgtttatgatcggttacgcctctgccctggtatccctgctgaatccatgcgccaacatgaaagtgtgtaacgaggaccaaacgaactgcacagtaccaacataccctagttgccgggattcagaaaccttttcgaccttcctgttagatctttttaagctcactattggaatgggcgatttagagatgctctcttctaccaaatatcctgtcgtgttcatcattctgctggtgacttacatcatccttacattcgtcttacttctgaatatgttaattgccctgatgggggaaactgtgggacaggtgtcaaaggaatctaagcacatctggaaactccagtgggcgaccacaatcctggatattgagcggagttttccagtgttcctgaggaaagccttcagatctggggagatggtgaccgtggggaaatcctccgatggaaccccagaccgccggtggtgttttagagtcgatgaggtcaactggagccattggaatcagaacttggggattatcaatgaggatcctggtaaaaacgaaacttaccagtattacggattctcccacactgtcgggcgactccggagagataggtggtcaagtgtcgtaccaagagtagtcgaactgaacaagaattctaatccggacgaggtggtggttcccctcgactcaatgggcaatcccagatgtgatggacatcagcagggatacccacgcaagtggcgcacagacgatgctcccctgtag

SEQ ID NO: 334618 - DNA, 2436 bp, Artificial Sequence
  derived and/or modified sequence
atggctgacagcagcgagggcccccgggccggccctggagaggtggccgagctgcctggagatgaaagtggcaccccaggaggagaggccttccccctgagcagcctggccaacctgtttgaaggagaagatggcagcctgagccccagccctgcagatgccagcaggcctgctggccctggagatggccggcccaacctgaggatgaagttccagggcgccttcagaaaaggagtgcccaaccccatcgacctgctggagagcaccctgtatgagagctctgtggtgcccggccccaagaaggcccccatggacagcctgtttgattatggcacctaccgccaccacagcagtgacaacaagcgctggaggaagaagatcatcgagaagcagccccagagccccaaggccccagccccccagcccccacccatcctgaaggtgttcaaccggcccatcctgtttgatattgtgtcccggggcagcacagctgacctggatggcctgctgcccttcctgctgacccacaagaagaggctgacagatgaggagttccgggagcccagcacaggcaagacctgcctgcccaaggccctgctgaacctgagcaatggaagaaatgacaccatccctgtgctgctggacattgctgagaggacaggcaacatgagggagttcatcaacagccccttccgggacatctactaccggggccagacagccctgcacatcgccatcgagcggcgctgcaagcactacgtggagctgctggtggcccagggcgcagatgtgcacgcccaggcccggggccgcttcttccagcccaaggatgaaggaggctacttctactttggagagctgcccctgagcctggccgcctgcaccaaccagccccacatcgtgaactacctgacagagaacccccacaagaaggctgacatgaggcggcaggacagccggggcaacacagtgctgcacgccctggtggccatcgctgacaacacccgggagaacaccaagtttgtgaccaagatgtatgacctgctgctgctgaagtgtgcccggctcttcccagacagcaacctggaggccgtgctgaacaatgatggcctgagccccctgatgatggccgccaagacaggcaagattggcaacagacatgagatgctggccgtggagcccatcaatgagctgctgcgggacaagtggaggaagtttggagctgtgtccttctacatcaacgtggtgtcctacctgtgtgccatggtgatcttcaccctgacagcctactaccagcccctggagggcaccccaccctacccctaccgcaccaccgtggactacctgcggctggccggggaggtgatcaccctcttcaccggggtgctcttcttcttcaccaacatcaaggacctcttcatgaagaagtgccctggggtgaacagcctcttcattgatggcagcttccagctgctgtacttcatctacagcgtgctggtgattgtgtctgctgccctgtacctggccggcatcgaggcctacctggccgtgatggtgtttgccctggtgctgggctggatgaatgccctgtacttcacccggggcctgaagctgaccggcacctacagcatcatgatccagaagatcctcttcaaggacctcttccgcttcctgctggtgtacctgctcttcatgattggctacgccagcgccctggtgtccctgctgaacccctgtgccaacatgaaggtgtgcaatgaagaccagaccaactgcaccgtgcccacctaccccagctgccgggacagcgagaccttcagcaccttcctgctggacctcttcaagctgaccatcggcatgggagacctggagatgctgagcagcaccaagtaccctgtggtgttcatcatcctgctggtgacctacatcatcctgacctttgtgctgctgctgaacatgctgattgccctgatgggagaaacagtgggccaggtgtccaaggagagcaagcacatctggaagctgcagtgggccaccaccatcctggacatcgagaggagcttccctgtgttcctgaggaaggccttccgcagcggggagatggtgacagtgggcaagagcagtgatggcaccccagaccggcgctggtgcttccgggtggatgaggtgaactggagccactggaaccagaacctgggcatcatcaatgaagatcctgggaagaatgagacctaccagtactacggcttcagccacacagtgggccgcctgcggcgggaccgctggagctctgtggtgccccgggtggtggagctgaacaagaacagcaacccagatgaggtggtggtgcccctggacagcatgggcaacccccgctgtgatggccaccagcagggctaccccaggaagtggaggacagatgatgcccccctgtag

SEQ ID NO: 334619 - DNA, 2436 bp, Artificial Sequence
  derived and/or modified sequence
atggccgacagcagcgagggcccccgggccggccccggcgaggtggccgagctcccgggagacgaatctgggacccccgggggcgaagccttcccgctgtcctctctggcaaatcttttcgaaggtgaggacggctctctctcccccagtccagccgacgccagccgccccgctggtccaggggatggcagacctaacctgagaatgaagtttcagggcgcgtttcgaaagggggtaccaaacccgatagaccttctggaatcaactctttacgaatcctcagttgttcccgggcccaaaaaagcacctatggattcattgtttgattacggcacgtataggcaccattcttccgataacaagcgctggaggaagaagatcatcgagaaacaaccacaaagtcccaaagcacctgcccctcagcctcctcctatcctgaaagtctttaaccgacccatactgttcgatattgtgtcacgtgggagtaccgccgatctggacgggttgttaccttttctccttacccacaagaaacggcttaccgatgaagagtttcgtgagccttctaccgggaaaacttgtctccctaaggcacttcttaatctctctaatggccgtaacgatactatacctgtcttgctggatatcgccgagaggacaggaaatatgagggaattcataaactcgccattcagagacatctactatcgtggtcaaacggctttgcatattgccatcgagagacgttgtaagcattacgtcgagttgctggtggcgcaaggcgccgacgtgcacgctcaggctaggggacgcttttttcagcctaaagacgaaggcggatacttctactttggcgagctcccactctcactggcggcctgtaccaatcagccacatattgtcaattatttgacagagaaccctcataagaaggcggatatgcgcaggcaggactcacgtggaaatactgtccttcatgcactcgtcgcaatcgcagataatactagagagaatacaaaattcgtgaccaaaatgtacgacttactgctgctaaagtgtgcaagactgtttcccgattccaatctagaagcagtgctgaacaacgacggcctttcacccctcatgatggccgcaaaaacgggtaagattggcaacaggcacgagatgctcgcagtcgaaccgatcaacgagcttctgagggataagtggcggaagtttggcgccgtatctttctacattaatgttgtctcctatctgtgtgccatggttatatttaccctgactgcctattatcagcctctagagggcaccccgccgtacccatacaggactaccgtcgactatttgcgtctcgctggcgaggtaattaccttgtttaccggcgtgctgtttttctttactaacatcaaagatctcttcatgaaaaagtgccccggtgtcaatagtctgtttatcgacggttcctttcaattgctttacttcatctatagtgtgttggtgatcgtgtcagctgctttgtatctagcagggatcgaagcctacctcgcggtgatggtcttcgcattagtcttaggatggatgaacgctctctacttcactaggggcctgaagctcaccggaacctacagcattatgatccaaaaaattctgtttaaggatctcttccgcttcctgctggtctacttactgtttatgattggctatgcctcagccctggtatctttgctgaacccttgtgcgaatatgaaggtgtgtaacgaagaccagaccaattgcaccgtgcccacatatccttcttgccgagatagcgagaccttctcaacatttctgctagatctcttcaagctcactataggaatgggtgacctggagatgctgagctccacgaaatatcctgttgtgtttatcatactgctggtaacttacattatcttgacgtttgtgcttctccttaacatgttgatcgctctcatgggtgagaccgtgggtcaggtgagcaaagagagtaaacacatctggaaacttcaatgggccacaaccattctggatatcgagcgatctttccccgtgttcttgcgaaaagcctttcgatctggcgaaatggtgacagtcggcaaaagttcggatggcacaccagataggcgctggtgcttccgggtggacgaagttaactggtctcactggaatcagaatctaggtattattaacgaggatcctgggaagaatgagacctatcaatactatgggttcagtcacacagtcggccgcctgcggagagatcgttggtcgagtgttgtgcccagggtggtggagctgaataagaactctaatccagacgaagtggtggttccgttagattcaatgggaaaccctagatgcgacgggcatcagcagggctaccccagaaagtggcgcaccgacgatgctccattatag

SEQ ID NO: 334620 - DNA, 2436 bp, Artificial Sequence
  derived and/or modified sequence
atggccgacagcagcgagggcccccgggccggccccggcgaggtggctgagttacctggcgacgaaagcggaaccccgggcggagaagccttcccccttagttctctggctaacctgtttgagggagaagatggaagtctctcaccatccccagcagacgcatctcggccagccgggcctggcgatggcaggcccaacctccggatgaaatttcagggcgctttcagaaagggagtgcctaacccgattgacctcctggaaagtactctatacgagtcatcagtggtgccaggcccgaaaaaggccccaatggatagtctgttcgattatggcacttatcggcaccattctagtgacaataagcgatggaggaagaagatcatagagaagcagccccagtccccaaaagcgcctgctccccagcccccaccaattttgaaggtgtttaatcgacctattttgttcgacattgtgtctcggggcagtacagccgacctcgacggcctactgccctttctgctcacgcacaagaaaagactgacagatgaagagttcagggaacctagtactgggaagacttgcttgccgaaggccctgctgaatctcagcaatggaaggaacgataccatacccgtcctgctggatatagccgaacgtacagggaacatgagggaatttataaattccccattccgggacatctattaccggggacagaccgcgctgcatatcgctatcgaacgaaggtgtaagcattacgtcgagttgctggtggcgcagggagcagacgtgcacgcccaggctagaggccgcttcttccaacccaaggatgagggaggatacttctacttcggcgagctgcccctgagtctggctgcctgtacaaaccagccccacatcgtcaactacctgacggaaaacccccacaagaaagctgacatgagacggcaggacagcaggggcaatactgtgctacacgccctcgtagctatagctgataatactagagagaacacaaaattcgtcactaagatgtacgacttgctcctgctcaagtgcgctcgactgtttcctgattctaatcttgaagccgtattgaataatgatggattgtctcccctcatgatggctgcaaaaacaggaaagattggtaatcggcacgaaatgttagctgtggagcccatcaatgagctgctgagggacaagtggcgaaaattcggtgccgtctccttctacattaatgttgtatcttacctctgtgcaatggtaattttcaccctcactgcttactaccaacccctggaaggtaccccaccctatccatatcgtacaacagtggactaccttagacttgcaggcgaggtcatcaccctctttacaggggttctgtttttcttcactaatataaaggatctgttcatgaaaaaatgtcccggggttaacagcctttttatagacggctcttttcagttactgtatttcatatacagtgtcttggtgatcgtgagcgccgcactgtatctggccgggatagaggcctatctggccgtgatggttttcgcattagtacttggctggatgaatgcactttacttcactcggggattgaaattgacaggaacatacagcattatgatccagaagatactctttaaggacctcttccgctttctcctcgtgtacctgttatttatgattgggtacgcatctgccctggtttcactactgaatccctgcgccaacatgaaggtgtgtaatgaggaccagactaactgtactgtgccaacgtacccatcatgtcgggattccgaaaccttcagcacttttctactggacttgtttaaactaaccattggaatgggcgatctcgagatgctctcaagtacaaaatatcctgtggtgttcatcattttactggtcacttacataattctgacattcgtcctgctcttaaatatgctaatcgccttaatgggggaaacagtggggcaggtatccaaggagtccaaacacatctggaagctgcagtgggcaacaacaatcttggatatcgagagatcatttccagtcttcctgagaaaggcctttcgaagcggggaaatggtgacagtcggcaagtcgagcgatgggactcctgatcggagatggtgctttcgggtagatgaggtcaactggtcgcattggaatcagaacctgggcattattaacgaagacccgggcaagaacgaaacctaccaatactacggctttagtcatactgtggggcggcttcgccgtgaccggtggtcttcggtcgtccctagggttgtagagctgaacaaaaatagcaaccctgacgaagttgtcgtgcccttggactcgatggggaacccaagatgtgatggccaccaacagggctatccgcgaaagtggaggaccgacgacgcccccctgtag

SEQ ID NO: 334621 - DNA, 2436 bp, Artificial Sequence
  derived and/or modified sequence
atggcggattctagcgagggccctagggccggtccaggggaggtcgccgagctgccgggtgatgagtctggcacacctgggggtgaagcattcccactctcctctctcgccaatcttttcgaaggcgaggatgggagcctgagtccctcgcctgccgacgcatcaaggcccgcaggccctggcgatggacgccctaatctgcgaatgaagtttcagggggcattccgtaagggcgtgccgaacccgatagatcttcttgagtccacgttatacgaatcgtcggtcgtgccagggcctaaaaaggcaccaatggatagtctgttcgattacggtacatacaggcaccattcatcagacaataagagatggcgtaagaagattatcgaaaagcaacctcaatctccgaaggccccagcaccccagcctcccccaattctgaaagttttcaaccgaccgatcctgtttgacattgtgtcacgaggaagtacggcggacctggatggactgctaccatttttgttaacccacaagaagaggctgacagatgaagaatttagggagccaagcactggaaaaacatgcctgcccaaagccctactgaatctgagcaacggtcggaacgacacgattcctgtcttactggacattgctgagagaactggaaacatgcgcgagtttattaactctccctttagagacatctactataggggacagacagcactccatatcgcgatcgagagacgttgtaaacactatgtcgaactgctggttgcccagggggctgacgtgcacgcgcaggccaggggacggttctttcaaccgaaagacgagggaggctacttctattttggcgagctgccgctcagcctagcggcttgtacaaatcagccacatatcgtgaactacctgaccgaaaacccccacaaaaaagccgacatgcggaggcaggactccagaggcaacacagtactacacgcccttgtggctatagctgacaatacccgggagaacactaaattcgtgaccaaaatgtacgatctcctgctactcaagtgcgctagactttttccagattctaacctcgaggcggtgctcaacaacgacggcttgtctccacttatgatggctgctaaaacaggcaaaataggtaacagacatgaaatgctcgcagtggagccaattaatgagctgctccgcgacaagtggagaaagtttggggctgtgagtttttacataaatgtggtcagttacttgtgcgccatggtgatcttcactcttacagcatactaccagccactcgaagggacccctccatatccgtatagaacaacagtggactacctcaggctggcaggggaggtcatcacactctttactggtgtgctttttttttttacaaacattaaagacctctttatgaaaaaatgtcctggagtgaactctctattcattgacggaagttttcagctgctgtatttcatttactctgtgctcgttatcgtgagcgctgcactatatctggcagggatcgaggcataccttgcagtcatggtgtttgccttggtccttggctggatgaatgcactgtactttacccgtggactgaagctcacaggtacctattcgatcatgattcagaagattctttttaaagatctctttagatttctgctggtgtacctgctgttcatgatcggctacgcctcagcgctggtgagtttactgaacccatgtgccaatatgaaagtctgtaacgaggatcagaccaactgcactgtgccaacatacccctcttgcagggattccgaaacattctccactttcttgctcgaccttttcaagttgactattggcatgggcgacttggagatgttatcatcgaccaagtacccggttgtgttcataattctgttggtgacatatatcattctgacatttgtgcttttgctcaacatgcttatagcactgatgggcgaaaccgtgggccaggtttccaaggagagtaaacatatctggaaactacaatgggccactacgatactggacatcgaacggtcatttcctgttttcctccggaaagccttccgcagtggggagatggtgaccgtgggcaaaagtagcgatggcacacccgatagaagatggtgctttcgcgtggacgaagtgaattggtctcactggaaccagaatctagggataattaacgaggatccaggcaagaatgaaacatatcagtattatgggttttcccacacagttggccgtctgagaagagatcgctggagctctgtggtgcctcgcgtggtggagctgaataaaaatagtaaccctgacgaggtggttgtaccactggactcaatgggaaaccctaggtgtgacggtcatcagcaggggtatcctcgtaagtggcgcaccgacgacgctcccctgtag

SEQ ID NO: 334622 - DNA, 2436 bp, Artificial Sequence
  derived and/or modified sequence
atggcagattcctccgagggccctcgagccggtcctggcgaagtcgctgaactccccggagacgagtctggaacacccggaggcgaggcctttcccctcagtagccttgccaacctgtttgagggcgaagatggatcactctcacccagccccgctgatgcgtctaggccagcagggcctggtgatggcaggcctaatctgcgaatgaagttccagggggctttccgaaaaggagttccgaacccaatagacttactggaatccactctctacgaatcgtccgttgtccccggtcctaagaaggcgcctatggacagtctgttcgactacggcacgtatcggcaccactcttccgacaacaagagatggcggaagaaaattatcgagaaacagccgcagtctcccaaggcgccagctcctcagccccctcccatcctcaaggtgttcaatagaccaatcctgttcgacatcgttagccggggatcgacagccgacctcgacggactattgccattcttacttactcacaaaaagcgcttaactgacgaagagtttagggagccaagtacagggaagacctgtctgcccaaggccctgctcaacctaagtaacggcagaaacgataccatccctgtcttacttgatattgcagaaaggacgggcaatatgcgggagttcatcaactcgccattccgtgatatatattacagaggtcagaccgcactacacattgcaatagaacgtagatgcaaacactacgtagaattgctggtagctcagggagcggacgttcatgcacaagccagaggtcggttcttccaacctaaagatgaggggggttatttttattttggtgaactgccccttagtctggccgcatgcactaatcagccccacatagtgaattacttgactgaaaatccccacaaaaaagccgatatgcgaagacaagatagccggggaaatacagtcctgcacgctctggtggccatagccgacaacacacgcgagaataccaaatttgtgaccaaaatgtatgatctgctactcctgaagtgcgccaggctgttcccggactcaaatttggaggccgtgctgaataacgatgggttgtctccactgatgatggccgcaaagacaggcaaaatcggcaaccgacacgaaatgctcgccgtcgagcccatcaatgaactcctaagagataaatggcgcaagttcggcgcagtctctttttatataaatgtggtttcatatttgtgtgctatggtcatcttcaccctcaccgcgtattatcagccactggaggggacccccccatacccctacagaaccactgtagactatctcagactggctggtgaggtgatcaccttgttcaccggtgttttgtttttctttacaaacatcaaggacttgttcatgaagaaatgtcccggtgtcaatagtctctttattgacgggagctttcagctgctttacttcatctattccgtgctggtgattgtgtccgcagccctctacctcgcagggattgaggcttacctggctgtgatggtgttcgccctggtcttgggttggatgaacgccctgtatttcacccggggattgaaacttaccggaacctactccatcatgatccagaagattttattcaaagacctgttcagatttttgttggtgtacttgctgttcatgatcggatacgcaagcgcccttgtgtcactgctgaacccatgcgctaacatgaaggtatgcaatgaagatcagactaactgcaccgtgcccacctaccctagctgccgcgattcagagacgttcagtacttttcttcttgatctgtttaagctgactatcggaatgggagacctggaaatgctcagctcaacaaagtacccagttgtctttataatcctacttgtgacttacatcattctcacctttgtacttttactcaatatgttaatcgcgctcatgggtgaaactgtcggccaggtgtccaaagagagcaagcacatctggaaactccagtgggccaccaccatactggacatcgagagatccttccccgtattcctgcgtaaagccttccgcagcggggagatggtgaccgttggcaagtcctccgacggtacccccgatcggcgttggtgtttccgggtcgacgaggtcaactggagtcattggaaccagaacctcgggataatcaatgaggaccctggcaagaacgagacgtatcaatactacgggttctcccacacagtaggccgtctgaggagagatcgatggagctcggtcgtccccagggtggtcgagttaaataaaaattcaaatccagacgaggtggtggtacccctcgacagtatgggcaatccacggtgcgatggtcatcagcagggctatcccagaaaatggaggaccgacgatgcacccctttag

SEQ ID NO: 334623 - DNA, 3058 bp, Artificial Sequence
  derived and/or modified sequence
ccggccgggattcaggaagcgcggatctcccggccgccggcgcccagccgtcccggaggctgagcagtgcagacgggcctggggcaggcatggcggattccagcgaaggcccccgcgcggggcccggggaggtggctgagctccccggggatgagagtggcaccccaggtggggaggcttttcctctctcctccctggccaatctgtttgagggggaggatggctccctttcgccctcaccggctgatgccagtcgccctgctggcccaggcgatgggcgaccaaatctgcgcatgaagttccagggcgccttccgcaagggggtgcccaaccccatcgatctgctggagtccaccctatatgagtcctcggtggtgcctgggcccaagaaagcacccatggactcactgtttgactacggcacctatcgtcaccactccagtgacaacaagaggtggaggaagaagatcatagagaagcagccgcagagccccaaagcccctgcccctcagccgccccccatcctcaaagtcttcaaccggcctatcctctttgacatcgtgtcccggggctccactgctgacctggacgggctgctcccattcttgctgacccacaagaaacgcctaactgatgaggagtttcgagagccatctacggggaagacctgcctgcccaaggccttgctgaacctgagcaatggccgcaacgacaccatccctgtgctgctggacatcgcggagcgcaccggcaacatgagggagttcattaactcgcccttccgtgacatctactatcgaggtcagacagccctgcacatcgccattgagcgtcgctgcaaacactacgtggaacttctcgtggcccagggagctgatgtccacgcccaggcccgtgggcgcttcttccagcccaaggatgaggggggctacttctactttggggagctgcccctgtcgctggctgcctgcaccaaccagccccacattgtcaactacctgacggagaacccccacaagaaggcggacatgcggcgccaggactcgcgaggcaacacagtgctgcatgcgctggtggccattgctgacaacacccgtgagaacaccaagtttgttaccaagatgtacgacctgctgctgctcaagtgtgcccgcctcttccccgacagcaacctggaggccgtgctcaacaacgacggcctctcgcccctcatgatggctgccaagacgggcaagattgggaaccgccacgagatgctggctgtggagcccatcaatgaactgctgcgggacaagtggcgcaagttcggggccgtctccttctacatcaacgtggtctcctacctgtgtgccatggtcatcttcactctcaccgcctactaccagccgctggagggcacaccgccgtacccttaccgcaccacggtggactacctgcggctggctggcgaggtcattacgctcttcactggggtcctgttcttcttcaccaacatcaaagacttgttcatgaagaaatgccctggagtgaattctctcttcattgatggctccttccagctgctctacttcatctactctgtcctggtgatcgtctcagcagccctctacctggcagggatcgaggcctacctggccgtgatggtctttgccctggtcctgggctggatgaatgccctttacttcacccgtgggctgaagctgacggggacctatagcatcatgatccagaagattctcttcaaggaccttttccgattcctgctcgtctacttgctcttcatgatcggctacgcttcagccctggtctccctcctgaacccgtgtgccaacatgaaggtgtgcaatgaggaccagaccaactgcacagtgcccacttacccctcgtgccgtgacagcgagaccttcagcaccttcctcctggacctgtttaagctgaccatcggcatgggcgacctggagatgctgagcagcaccaagtaccccgtggtcttcatcatcctgctggtgacctacatcatcctcacctttgtgctgctcctcaacatgctcattgccctcatgggcgagacagtgggccaggtctccaaggagagcaagcacatctggaagctgcagtgggccaccaccatcctggacattgagcgctccttccccgtattcctgaggaaggccttccgctctggggagatggtcaccgtgggcaagagctcggacggcactcctgaccgcaggtggtgcttcagggtggatgaggtgaactggtctcactggaaccagaacttgggcatcatcaacgaggacccgggcaagaatgagacctaccagtattatggcttctcgcataccgtgggccgcctccgcagggatcgctggtcctcggtggtaccccgcgtggtggaactgaacaagaactcgaacccggacgaggtggtggtgcctctggacagcatggggaacccccgctgcgatggccaccagcagggttacccccgcaagtggaggactgatgacgccccgctctagggactgcagcccagccccagcttctctgcccactcatttctagtccagccgcatttcagcagtgccttctggggtgtccccccacaccctgctttggccccagaggcgagggaccagtggaggtgccagggaggccccaggaccctgtggtcccctggctctgcctccccaccctggggtgggggctcccggccacctgtcttgctcctatggagtcacataagccaacgccagagcccctccacctcaggccccagcccctgcctctccattatttatttgctctgctctcaggaagcgacgtgacccctgccccagctggaacctggcagaggccttaggaccccgttccaagtgcactgcccggccaagccccagcctcagcctgcgcctgagctgcatgcgccaccatttttggcagcgtggcagctttgcaaggggctggggccctcggcgtggggccatgccttctgtgtgttctgtagtgtctgggatttgccggtgctcaataaatgtttattcattgacggtgg

SEQ ID NO: 334624 - DNA, 2436 bp, Artificial Sequence
  derived and/or modified sequence
atggcggattccagcgaaggcccccgcgcggggcccggggaggtggctgagctccccggggatgagagtggcaccccaggtggggaggcttttcctctctcctccctggccaatctgtttgagggggaggatggctccctttcgccctcaccggctgatgccagtcgccctgctggcccaggcgatgggcgaccaaatctgcgcatgaagttccagggcgccttccgcaagggggtgcccaaccccatcgatctgctggagtccaccctatatgagtcctcggtggtgcctgggcccaagaaagcacccatggactcactgtttgactacggcacctatcgtcaccactccagtgacaacaagaggtggaggaagaagatcatagagaagcagccgcagagccccaaagcccctgcccctcagccgccccccatcctcaaagtcttcaaccggcctatcctctttgacatcgtgtcccggggctccactgctgacctggacgggctgctcccattcttgctgacccacaagaaacgcctaactgatgaggagtttcgagagccatctacggggaagacctgcctgcccaaggccttgctgaacctgagcaatggccgcaacgacaccatccctgtgctgctggacatcgcggagcgcaccggcaacatgagggagttcattaactcgcccttccgtgacatctactatcgaggtcagacagccctgcacatcgccattgagcgtcgctgcaaacactacgtggaacttctcgtggcccagggagctgatgtccacgcccaggcccgtgggcgcttcttccagcccaaggatgaggggggctacttctactttggggagctgcccctgtcgctggctgcctgcaccaaccagccccacattgtcaactacctgacggagaacccccacaagaaggcggacatgcggcgccaggactcgcgaggcaacacagtgctgcatgcgctggtggccattgctgacaacacccgtgagaacaccaagtttgttaccaagatgtacgacctgctgctgctcaagtgtgcccgcctcttccccgacagcaacctggaggccgtgctcaacaacgacggcctctcgcccctcatgatggctgccaagacgggcaagattgggaaccgccacgagatgctggctgtggagcccatcaatgaactgctgcgggacaagtggcgcaagttcggggccgtctccttctacatcaacgtggtctcctacctgtgtgccatggtcatcttcactctcaccgcctactaccagccgctggagggcacaccgccgtacccttaccgcaccacggtggactacctgcggctggctggcgaggtcattacgctcttcactggggtcctgttcttcttcaccaacatcaaagacttgttcatgaagaaatgccctggagtgaattctctcttcattgatggctccttccagctgctctacttcatctactctgtcctggtgatcgtctcagcagccctctacctggcagggatcgaggcctacctggccgtgatggtctttgccctggtcctgggctggatgaatgccctttacttcacccgtgggctgaagctgacggggacctatagcatcatgatccagaagattctcttcaaggaccttttccgattcctgctcgtctacttgctcttcatgatcggctacgcttcagccctggtctccctcctgaacccgtgtgccaacatgaaggtgtgcaatgaggaccagaccaactgcacagtgcccacttacccctcgtgccgtgacagcgagaccttcagcaccttcctcctggacctgtttaagctgaccatcggcatgggcgacctggagatgctgagcagcaccaagtaccccgtggtcttcatcatcctgctggtgacctacatcatcctcacctttgtgctgctcctcaacatgctcattgccctcatgggcgagacagtgggccaggtctccaaggagagcaagcacatctggaagctgcagtgggccaccaccatcctggacattgagcgctccttccccgtattcctgaggaaggccttccgctctggggagatggtcaccgtgggcaagagctcggacggcactcctgaccgcaggtggtgcttcagggtggatgaggtgaactggtctcactggaaccagaacttgggcatcatcaacgaggacccgggcaagaatgagacctaccagtattatggcttctcgcataccgtgggccgcctccgcagggatcgctggtcctcggtggtaccccgcgtggtggaactgaacaagaactcgaacccggacgaggtggtggtgcctctggacagcatggggaacccccgctgcgatggccaccagcagggttacccccgcaagtggaggactgatgacgccccgctctag

SEQ ID NO: 334625 - protein, 764 aa, Artificial Sequence
  derived and/or modified sequence
MADSSEGPRAGPGEVAELPGDESGTPGGEAFPLSSLANLFEGEDGSLSPSPADASRPAGPGDGRPNLRMKFQGAFRKGVPNPIDLLESTLYESSVVPGPKKAPMDSLFDYGTYRHHSSDNKRWRKKIIEKQPQSPKAPAPQPPPILKVFNRPILFDIVSRGSTADLDGLLPFLLTHKKRLTDEEFREPSTGKTCLPKALLNLSNGRNDTIPVLLDIAERTGNMREFINSPFRDIYYRGELPLSLAACTNQPHIVNYLTENPHKKADMRRQDSRGNTVLHALVAIADNTRENTKFVTKMYDLLLLKCARLFPDSNLEAVLNNDGLSPLMMAAKTGKIGNRHEMLAVEPINELLRDKWRKFGAVSFYINVVSYLCAMVIFTLTAYYQPLEGTPPYPYRTTVDYLRLAGEVITLFTGVLFFFTNIKDLFMKKCPGVNSLFIDGSFQLLYFIYSVLVIVSAALYLAGIEAYLAVMVFALVLGWMNALYFTRGLKLTGTYSIMIQKILFKDLFRFLLVYLLFMIGYASALVSLLNPCANMKVCNEDQTNCTVPTYPSCRDSETFSTFLLDLFKLTIGMGDLEMLSSTKYPVVFIILLVTYIILTFVLLLNMLIALMGETVGQVSKESKHIWKLQWATTILDIERSFPVFLRKAFRSGEMVTVGKSSDGTPDRRWCFRVDEVNWSHWNQNLGIINEDPGKNETYQYYGFSHTVGRLRRDRWSSVVPRVVELNKNSNPDEVVVPLDSMGNPRCDGHQQGYPRKWRTDDAPL

SEQ ID NO: 334626 - DNA, 2295 bp, Artificial Sequence
  derived and/or modified sequence
atggccgacagcagcgagggccccagagccggccccggcgaggtggccgagctgcccggcgacgagagcggcacccccggcggcgaggccttccccctgagcagcctggccaacctgttcgagggcgaggacggcagcctgagccccagccccgccgacgccagcagacccgccggccccggcgacggcagacccaacctgagaatgaagttccagggcgccttcagaaagggcgtgcccaaccccatcgacctgctggagagcaccctgtacgagagcagcgtggtgcccggccccaagaaggcccccatggacagcctgttcgactacggcacctacagacaccacagcagcgacaacaagagatggagaaagaagatcatcgagaagcagccccagagccccaaggcccccgccccccagcccccccccatcctgaaggtgttcaacagacccatcctgttcgacatcgtgagcagaggcagcaccgccgacctggacggcctgctgcccttcctgctgacccacaagaagagactgaccgacgaggagttcagagagcccagcaccggcaagacctgcctgcccaaggccctgctgaacctgagcaacggcagaaacgacaccatccccgtgctgctggacatcgccgagagaaccggcaacatgagagagttcatcaacagccccttcagagacatctactacagaggcgagctgcccctgagcctggccgcctgcaccaaccagccccacatcgtgaactacctgaccgagaacccccacaagaaggccgacatgagaagacaggacagcagaggcaacaccgtgctgcacgccctggtggccatcgccgacaacaccagagagaacaccaagttcgtgaccaagatgtacgacctgctgctgctgaagtgcgccagactgttccccgacagcaacctggaggccgtgctgaacaacgacggcctgagccccctgatgatggccgccaagaccggcaagatcggcaacagacacgagatgctggccgtggagcccatcaacgagctgctgagagacaagtggagaaagttcggcgccgtgagcttctacatcaacgtggtgagctacctgtgcgccatggtgatcttcaccctgaccgcctactaccagcccctggagggcacccccccctacccctacagaaccaccgtggactacctgagactggccggcgaggtgatcaccctgttcaccggcgtgctgttcttcttcaccaacatcaaggacctgttcatgaagaagtgccccggcgtgaacagcctgttcatcgacggcagcttccagctgctgtacttcatctacagcgtgctggtgatcgtgagcgccgccctgtacctggccggcatcgaggcctacctggccgtgatggtgttcgccctggtgctgggctggatgaacgccctgtacttcaccagaggcctgaagctgaccggcacctacagcatcatgatccagaagatcctgttcaaggacctgttcagattcctgctggtgtacctgctgttcatgatcggctacgccagcgccctggtgagcctgctgaacccctgcgccaacatgaaggtgtgcaacgaggaccagaccaactgcaccgtgcccacctaccccagctgcagagacagcgagaccttcagcaccttcctgctggacctgttcaagctgaccatcggcatgggcgacctggagatgctgagcagcaccaagtaccccgtggtgttcatcatcctgctggtgacctacatcatcctgaccttcgtgctgctgctgaacatgctgatcgccctgatgggcgagaccgtgggccaggtgagcaaggagagcaagcacatctggaagctgcagtgggccaccaccatcctggacatcgagagaagcttccccgtgttcctgagaaaggccttcagaagcggcgagatggtgaccgtgggcaagagcagcgacggcacccccgacagaagatggtgcttcagagtggacgaggtgaactggagccactggaaccagaacctgggcatcatcaacgaggaccccggcaagaacgagacctaccagtactacggcttcagccacaccgtgggcagactgagaagagacagatggagcagcgtggtgcccagagtggtggagctgaacaagaacagcaaccccgacgaggtggtggtgcccctggacagcatgggcaaccccagatgcgacggccaccagcagggctaccccagaaagtggagaaccgacgacgcccccctgtag

SEQ ID NO: 334627 - DNA, 2295 bp, Artificial Sequence
  derived and/or modified sequence
atggctgactccagcgagggtccccgcgcagggcctggagaggttgctgaactcccaggtgacgaaagcggcaccccgggcggggaggcttttccactgtcttccctagccaacctctttgagggggaggatggctcattgagtcccagtccggcagatgcatcacggccagccggaccaggtgacgggcgcccaaaccttagaatgaaatttcagggggcattccgtaaaggcgtgcccaaccccattgacctgctggagagcacactgtacgagagtagcgtcgttcccgggcctaagaaagcacctatggatagcctgtttgactatgggacatacaggcatcatagctctgacaacaagcgatggaggaagaagatcatcgagaaacagccccagagccccaaggccccagcccctcaaccaccacctatactcaaggtgtttaacagacccattttattcgatatcgtgagccgcggatccacagccgacctagacgggctcttgccatttctcctcacgcataaaaagcgcctgactgacgaggaattcagggaaccttctaccggcaagacatgcctgccaaaggcactgctgaacctgtccaatggacggaacgataccatcccagtcttactggacattgccgaacgaaccggtaatatgcgggaatttatcaattccccgttccgggatatctattacaggggggagcttcctttatcactggcagcctgtacaaaccagcctcacatcgtcaattacttgaccgagaacccacacaaaaaggccgatatgcgtaggcaggacagccgaggaaataccgttctgcacgcgcttgtcgctatcgcagataacaccagggaaaacacaaaatttgtcacaaagatgtacgatctcctgctgctgaagtgcgcacgcctgtttcctgatagtaatttggaagccgtgctcaacaatgacggcttatccccgcttatgatggcagcgaaaactggtaaaatcgggaatcggcacgagatgctggccgtggaacctattaacgaattattacgggacaagtggagaaagttcggcgcagtttctttttatataaacgtggtaagttacttgtgtgccatggttatcttcaccctgacagcttactaccagcccctggaaggcacaccaccttacccctatagaacaactgtcgactatctgcgcctcgccggcgaggtcatcaccctttttacaggcgtcctttttttcttcaccaatattaaagatctcttcatgaaaaaatgcccgggcgtgaatagcctcttcatcgacggcagttttcaattactctatttcatctactcagtactcgttatcgtatcagccgccctctacctcgcaggtattgaagcatacctggctgtgatggtcttcgctcttgtgcttgggtggatgaacgctctatattttactagaggcctcaaactgactggcacttatagcattatgattcagaagatcttatttaaagatctctttcggttcctcctagtgtacttattgtttatgatcggatacgcctccgccctggtgagcttgttaaacccttgtgccaatatgaaggtctgcaatgaggatcagaccaattgtaccgttccgacataccccagctgtcgggattccgaaaccttttccacttttctgttagatctgttcaagctcaccattggcatgggtgatttggagatgctgagttccacaaaatatcctgtggtctttatcattctactcgtgacctacatcatcctgactttcgttttgctcttaaacatgctgatcgcgctcatgggcgagacagtaggtcaggtgagcaaggagtctaaacacatctggaagctgcagtgggcaactaccatcctggacattgaacggtcatttccagtcttcctgaggaaggccttcagaagtggtgagatggtcactgtcgggaagtcgtctgacgggacgcccgatcgcaggtggtgttttagagtggatgaggtgaactggtcacactggaatcagaacctgggcataatcaatgaggaccctggcaaaaatgagacctatcagtactatggattttctcacacggtcggtagactgaggcgggataggtggagctccgtggtgcccagggtcgtcgagctcaacaaaaatagtaacccagatgaagtggtggtccccctggatagtatggggaatcccagatgcgacggtcaccagcaaggctatccccggaaatggagaacggacgacgccccgttatag

SEQ ID NO: 334628 - DNA, 2295 bp, Artificial Sequence
  derived and/or modified sequence
atggctgacagcagcgagggcccccgggccggccctggagaggtggccgagctgcctggagatgaaagtggcaccccaggaggagaggccttccccctgagcagcctggccaacctgtttgaaggagaagatggcagcctgagccccagccctgcagatgccagcaggcctgctggccctggagatggccggcccaacctgaggatgaagttccagggcgccttcagaaaaggagtgcccaaccccatcgacctgctggagagcaccctgtatgagagctctgtggtgcccggccccaagaaggcccccatggacagcctgtttgattatggcacctaccgccaccacagcagtgacaacaagcgctggaggaagaagatcatcgagaagcagccccagagccccaaggccccagccccccagcccccacccatcctgaaggtgttcaaccggcccatcctgtttgatattgtgtcccggggcagcacagctgacctggatggcctgctgcccttcctgctgacccacaagaagaggctgacagatgaggagttccgggagcccagcacaggcaagacctgcctgcccaaggccctgctgaacctgagcaatggaagaaatgacaccatccctgtgctgctggacattgctgagaggacaggcaacatgagggagttcatcaacagccccttccgggacatctactacagaggagagctgcccctgagcctggccgcctgcaccaaccagccccacatcgtgaactacctgacagagaacccccacaagaaggctgacatgaggcggcaggacagccggggcaacacagtgctgcacgccctggtggccatcgctgacaacacccgggagaacaccaagtttgtgaccaagatgtatgacctgctgctgctgaagtgtgcccggctcttcccagacagcaacctggaggccgtgctgaacaatgatggcctgagccccctgatgatggccgccaagacaggcaagattggcaacagacatgagatgctggccgtggagcccatcaatgagctgctgcgggacaagtggaggaagtttggagctgtgtccttctacatcaacgtggtgtcctacctgtgtgccatggtgatcttcaccctgacagcctactaccagcccctggagggcaccccaccctacccctaccgcaccaccgtggactacctgcggctggccggggaggtgatcaccctcttcaccggggtgctcttcttcttcaccaacatcaaggacctcttcatgaagaagtgccctggggtgaacagcctcttcattgatggcagcttccagctgctgtacttcatctacagcgtgctggtgattgtgtctgctgccctgtacctggccggcatcgaggcctacctggccgtgatggtgtttgccctggtgctgggctggatgaatgccctgtacttcacccggggcctgaagctgaccggcacctacagcatcatgatccagaagatcctcttcaaggacctcttccgcttcctgctggtgtacctgctcttcatgattggctacgccagcgccctggtgtccctgctgaacccctgtgccaacatgaaggtgtgcaatgaagaccagaccaactgcaccgtgcccacctaccccagctgccgggacagcgagaccttcagcaccttcctgctggacctcttcaagctgaccatcggcatgggagacctggagatgctgagcagcaccaagtaccctgtggtgttcatcatcctgctggtgacctacatcatcctgacctttgtgctgctgctgaacatgctgattgccctgatgggagagaccgtgggccaggtgtccaaggagagcaagcacatctggaagctgcagtgggccaccaccatcctggacatcgagaggagcttccctgtgttcctgaggaaggccttccgctctggagagatggtgacagtgggcaagagcagtgatggcaccccagaccggcgctggtgcttccgggtggatgaggtgaactggagccactggaaccagaacctgggcatcatcaatgaagaccccgggaagaatgagacctaccagtactacggcttcagccacacagtgggccgcctgcggcgggaccgctggagctctgtggtgccccgggtggtggagctgaacaagaacagcaacccagatgaggtggtggtgcccctggacagcatgggcaacccccgctgtgatggccaccagcagggctaccccaggaagtggaggacagatgatgcccccctgtag

SEQ ID NO: 334629 - DNA, 2295 bp, Artificial Sequence
  derived and/or modified sequence
atggccgacagcagcgagggcccccgggccggccccggcgaggtggccgaactgcccggagacgagtctggtactccaggtggggaggcgttcccgctcagctctctggctaatctgtttgaaggagaggacggctccctgagccctagtccagcagatgctagccgcccggccggtccgggagatgggcgacctaacctgcgaatgaagtttcagggcgcctttcgaaaaggagtcccaaatcctatcgacctgctggaaagtaccctctatgaatcttcagtcgttcctggcccaaagaaagctcccatggatagcctattcgactatggcacctacaggcatcatagcagtgacaacaaacgctggaggaagaagatcatagagaaacagccgcagagtcctaaagcccccgctcctcaaccaccgcctatccttaaggtgtttaacagacctatactgttcgatatagtcagcagaggcagcacagccgacctggacggccttctcccctttctgctcacacacaagaagcggttaacagacgaggagtttcgcgagccctctacagggaagacctgtctgcccaaagcactcctgaatctgtctaatggtaggaacgatacaatcccagtgctgctggacatcgccgagaggaccggcaacatgagagaatttattaattccccatttcgtgacatttactaccgaggggaactgccactttccctggcagcttgtaccaatcagcctcacatcgtaaattaccttaccgaaaatccgcacaagaaggccgatatgagaagacaggactcaagaggcaacaccgtgctacacgctctggtggctattgccgacaatacacgagagaatactaaattcgtgaccaaaatgtacgacctccttctgcttaagtgtgccagattgttccccgactcaaacctggaggccgtccttaataatgatgggctcagcccccttatgatggctgcgaagacaggtaagattgggaaccgccatgagatgcttgcagtggagccaatcaatgagttacttcgcgataagtggagaaaatttggcgcggtctcattttacattaacgtggtgagttatctgtgcgctatggttatctttactctgacagcatactatcagcctctggaagggacaccaccctatccctacaggacaactgtggactacctccggctagccggtgaggtgatcaccctctttaccggcgtactctttttcttcacaaacataaaagatctgtttatgaagaaatgcccaggagtgaactctctctttattgacggaagctttcagcttctgtactttatctactctgtactcgtgattgtttctgccgccttatatctggctggcatcgaggcatatctcgccgtgatggttttcgctctagttctaggatggatgaacgctctttactttacgagagggctgaaattaacggggacatactccatcatgattcagaaaatactctttaaagacctgttccgcttcttgctggtgtatctgctgttcatgatcggctacgctagtgccttggtgtcactgcttaacccttgcgccaacatgaaagtctgtaatgaggatcagaccaactgtaccgtccctacttaccctagctgtcgggacagcgaaaccttcagcacattcctgctcgacctgttcaaacttacaattgggatgggagatcttgaaatgctttcttccaccaagtatccagtcgtattcataattctgttagtaacttacattatcctgactttcgttctgctcctgaatatgctgattgcactcatgggtgagacggtcggccaagtaagcaaggagagtaaacatatttggaaattgcagtgggccacgaccatactggacatcgagcggagctttcctgtctttctgaggaaagccttccgctccggagagatggtgacagtgggaaagagttcagacgggactccagacagacgctggtgcttccgggtcgatgaagtaaactggagccattggaatcagaacctcggcattatcaacgaggatcccggtaaaaacgagacctatcagtactatggtttctcacacactgtgggaagactgcggcgggatcgctggtcatctgtggtgcctagggtagtcgagctaaataaaaactcaaatcctgacgaggtcgtggtccccctcgactccatgggcaatcctagatgtgacggacaccagcaggggtaccccaggaaatggaggactgacgatgcccctctctag

SEQ ID NO: 334630 - DNA, 2295 bp, Artificial Sequence
  derived and/or modified sequence
atggccgattccagcgagggaccgagagcgggaccgggagaggtggcagagctgccaggtgacgagtctggcaccccaggcggtgaggctttccccttgtcctcactggcaaatctttttgagggcgaggacgggtctctttcccccagccctgccgacgcctctcgcccagctggacctggtgacggtagacccaacctgcggatgaagttccaaggcgcttttaggaaaggtgtgcctaatcctatcgacttacttgaaagcactctttatgagagttcagtggtgccaggaccaaagaaggctcctatggattcccttttcgattacggcacatatagacaccattcctccgataataaaagatggcgcaagaaaatcatcgagaaacagccccagagcccaaaggcccctgcaccgcagcctcccccaatcctcaaagtatttaatagacctattctctttgacatcgtctcccgagggtccacggcagacctggacggcctgctcccatttctgctgacacacaagaaacggctgacagacgaggagttccgtgagccctcaactggtaagacttgtctccccaaggcgctgctgaatctgtctaacggccgtaatgatacaatcccggttctgctggatatagccgaacgaacgggcaatatgcgagagtttattaattctccttttcgagacatttactacaggggcgaactccccctatccctcgcagcctgtacaaatcagccccacatcgtcaactatcttacagagaatccgcataaaaaggcagacatgcgacggcaagattctagagggaacacggtcctacatgcgctcgtggccattgcagataatacacgggaaaacacaaagtttgtgactaagatgtatgatctgctcctgctcaaatgtgctcgactatttccagatagtaatctcgaggctgtcctcaacaatgatggactatcacctctgatgatggccgctaagacgggtaaaattgggaatcgtcacgagatgctggccgtcgaacctatcaacgagctcctcagggataagtggcgcaagtttggggcagtctccttttatatcaatgttgtttcctacttgtgcgccatggtgatttttacactgactgcttattatcagcctctggagggcacccctccctacccatataggacgacagtcgattacctgagactggccggtgaggtgatcacacttttcactggagtgctatttttctttactaatatcaaggacctcttcatgaagaagtgtccgggagtgaactctcttttcatcgatggcagcttccaattattgtactttatctactccgtgctggtgattgttagtgccgctctttacctggcagggatcgaggcctatttagcagtgatggtcttcgctctggtgcttggctggatgaatgccctatattttactagaggcttaaagctaacgggcacctattccatcatgatacagaaaattttgtttaaagacctctttcgctttctgttagtttaccttctgtttatgataggatacgcctccgctctggtaagcttgctcaatccttgcgccaacatgaaggtgtgtaatgaagaccagaccaattgtacagttcctacctaccccagctgccgggactccgaaacattttccacattcctgttagatctgttcaaacttactatcgggatgggagatcttgagatgttatctagcactaaatatccagtcgtgtttattattttattagtcacttacattattttaacctttgttctactcctaaacatgcttattgcactgatgggggaaacagtggggcaagtttccaaggaaagcaagcacatctggaaactccaatgggccaccacaatcctggatattgagaggagcttccctgttttcttacgaaaggcatttaggagcggggagatggtgactgtcgggaaaagttctgatgggacgccagaccgtcggtggtgtttccgggttgacgaagttaattggtcccattggaatcagaacttgggcatcattaatgaagatcccggaaagaatgagacctatcagtactatggcttctcacacaccgtcggccgtctccgcagggatagatggtccagtgtggtccccagagtcgtggagctcaataagaattccaacccagatgaggttgttgtgccgctagatagcatgggaaacccacgatgcgatggacaccaacaggggtatcctcgcaagtggagaactgatgatgcccctctctag

SEQ ID NO: 334631 - DNA, 2295 bp, Artificial Sequence
  derived and/or modified sequence
atggcggattccagcgaaggcccccgcgcggggcccggggaggtggctgagctccccggggatgagagtggcaccccaggtggggaggcttttcctctctcctccctggccaatctgtttgagggggaggatggctccctttcgccctcaccggctgatgccagtcgccctgctggcccaggcgatgggcgaccaaatctgcgcatgaagttccagggcgccttccgcaagggggtgcccaaccccatcgatctgctggagtccaccctatatgagtcctcggtggtgcctgggcccaagaaagcacccatggactcactgtttgactacggcacctatcgtcaccactccagtgacaacaagaggtggaggaagaagatcatagagaagcagccgcagagccccaaagcccctgcccctcagccgccccccatcctcaaagtcttcaaccggcctatcctctttgacatcgtgtcccggggctccactgctgacctggacgggctgctcccattcttgctgacccacaagaaacgcctaactgatgaggagtttcgagagccatctacggggaagacctgcctgcccaaggccttgctgaacctgagcaatggccgcaacgacaccatccctgtgctgctggacatcgcggagcgcaccggcaacatgagggagttcattaactcgcccttccgtgacatctactatcgaggggagctgcccctgtcgctggctgcctgcaccaaccagccccacattgtcaactacctgacggagaacccccacaagaaggcggacatgcggcgccaggactcgcgaggcaacacagtgctgcatgcgctggtggccattgctgacaacacccgtgagaacaccaagtttgttaccaagatgtacgacctgctgctgctcaagtgtgcccgcctcttccccgacagcaacctggaggccgtgctcaacaacgacggcctctcgcccctcatgatggctgccaagacgggcaagattgggaaccgccacgagatgctggctgtggagcccatcaatgaactgctgcgggacaagtggcgcaagttcggggccgtctccttctacatcaacgtggtctcctacctgtgtgccatggtcatcttcactctcaccgcctactaccagccgctggagggcacaccgccgtacccttaccgcaccacggtggactacctgcggctggctggcgaggtcattacgctcttcactggggtcctgttcttcttcaccaacatcaaagacttgttcatgaagaaatgccctggagtgaattctctcttcattgatggctccttccagctgctctacttcatctactctgtcctggtgatcgtctcagcagccctctacctggcagggatcgaggcctacctggccgtgatggtctttgccctggtcctgggctggatgaatgccctttacttcacccgtgggctgaagctgacggggacctatagcatcatgatccagaagattctcttcaaggaccttttccgattcctgctcgtctacttgctcttcatgatcggctacgcttcagccctggtctccctcctgaacccgtgtgccaacatgaaggtgtgcaatgaggaccagaccaactgcacagtgcccacttacccctcgtgccgtgacagcgagaccttcagcaccttcctcctggacctgtttaagctgaccatcggcatgggcgacctggagatgctgagcagcaccaagtaccccgtggtcttcatcatcctgctggtgacctacatcatcctcacctttgtgctgctcctcaacatgctcattgccctcatgggcgagacagtgggccaggtctccaaggagagcaagcacatctggaagctgcagtgggccaccaccatcctggacattgagcgctccttccccgtattcctgaggaaggccttccgctctggggagatggtcaccgtgggcaagagctcggacggcactcctgaccgcaggtggtgcttcagggtggatgaggtgaactggtctcactggaaccagaacttgggcatcatcaacgaggacccgggcaagaatgagacctaccagtattatggcttctcgcataccgtgggccgcctccgcagggatcgctggtcctcggtggtaccccgcgtggtggaactgaacaagaactcgaacccggacgaggtggtggtgcctctggacagcatggggaacccccgctgcgatggccaccagcagggttacccccgcaagtggaggactgatgacgccccgctctag

SEQ ID NO: 334632 - protein, 97 aa, Artificial Sequence
  derived and/or modified sequence
MSSDNQWSADEDEGQLSRLIRKSRDSPFVPIGIAGFVTVVSCGLYKLKYRRDQKMSIHLIHMRVAAQGFVVGAVTLGVLYSMYKDYIRPRFFSESKK

SEQ ID NO: 334633 - DNA, 371 bp, Artificial Sequence
  derived and/or modified sequence
gatgggagaggaaaaacaaattatttttaatgattcacggcaaccacatttatatcctattgttactagagaaaaaaatgtcttcagataaccagtggtcagcagatgaggatgaaggccaattatcccgactaatcaggaaatctagagactccccctttgtccctataggtatagcaggctttgtgactgtggtgtcctgtggtctttacaagctaaagtacagaagagatcagaaaatgtcaattcatcttattcacatgagagttgctgcccaaggatttgttgttggagctgtgactctaggtgttctctattctatgtataaggattacattagaccacgattcttcagtgagtccaaaaaatga

SEQ ID NO: 334634 - protein, 972 aa, Artificial Sequence
  derived and/or modified sequence
MAARLLAPPGPDSFKPFTPESLANIERRIAESKLKKPPKADGSHREDDEDSKPKPNSDLEAGKSLPFIYGDIPQGLVAVPLEDFDPYYLTQKTFVVLNRGKTLFRFSATPALYILSPFNLIRRIAIKILIHSVFSMIIMCTILTNCVFMTFSNPPDWSKNVEYTFTGIYTFESLVKIIARGFCIDGFTFLRDPWNWLDFSVIMMAYVTEFVDLGNVSALRTFRVLRALKTISVIPGLKTIVGALIQSVKKLSDVMILTVFCLSVFALIGLQLFMGNLRNKCVVWPINFNESYLENGTKGFDWEEYINNKTNFYTVPGMLEPLLCGNSSDAGQCPEGYQCMKAGRNPNYGYTSFDTFSWAFLALFRLMTQDYWENLYQLTLRAAGKTYMIFFVLVIFVGSFYLVNLILAVVAMAYEEQNQATLEEAEQKEAEFKAMLEQLKKQQEEAQAAAMATSAGTVSEDAIEEEGEEGGGSPRSSSEISKLSSKSAKERRNRRKKRKQKELSEGEEKGDPEKVFKSESEDGMRRKAFRLPDNRIGRKFSIMNQSLLSIPGSPFLSRHNSKSSIFSFRGPGRFRDPGSENEFADDEHSTVEESEGRRDSLFIPIRARERRSSYSGYSGYSQGSRSSRIFPSLRRSVKRNSTVDCNGVVSLIGGPGSHIGGRLLPEATTEVEIKKKGPGSLLVSMDQLASYGRKDRINSIMSVVTNTLVEELEESQRKCPPCWYKFANTFLIWECHPYWIKLKEIVNLIVMDPFVDLAITICIVLNTLFMAMEHHPMTPQFEHVLAVGNLVFTGIFTAEMFLKLIAMDPYYYFQEGWNIFDGFIVSLSLMELSLADVEGLSVLRSFRLLRVFKLAKSWPTLNMLIKIIGNSVGALGNLTLVLAIIVFIFAVVGMQLFGKSYKECVCKINQDCELPRWHMHDFFHSFLIVFRVLCGEWIETMWDCMEVAGQAMCLIVFMMVMVIGNLVVSTNL

SEQ ID NO: 334635 - DNA, 2919 bp, Artificial Sequence
  derived and/or modified sequence
atggctgcccggttgctggctcctcccgggccagatagtttcaagccttttacaccagaatcattagcaaacatcgaaaggagaatcgcggaaagcaaattaaaaaagccacccaaagctgatggctcccaccgtgaagatgatgaggacagcaagccaaagccaaattcggacttggaagctggcaagagtttgccctttatttacggtgacattccccaggggctggtagcagtcccccttgaggattttgatccctactatttgacccagaagacgttcgtggtcttgaacaggggcaagacactgtttcgattctccgcaacacctgccctctatattttaagcccgttcaatcttatccgaaggatcgccattaagatccttatccacagtgtcttttcaatgatcatcatgtgcaccattttgacgaactgtgtgtttatgacattctctaatcccccagattggtctaagaacgtcgagtatactttcaccggcatctacacgtttgagtctctcgtgaaaatcatcgctcgaggattttgtatcgacggctttacctttttgcgggacccctggaactggctggacttttccgtcattatgatggcctatgttacagagtttgtggacctggggaatgtatcggccttgagaacattccgggttctgagggctctgaagacaatctccgtgattcccggtctcaagacaatagtcggcgcactgatacagtctgtaaaaaagcttagcgatgtcatgattctgacagtgttttgtttatccgtgtttgcccttatagggttacagctgtttatgggcaatctgcggaacaagtgtgtcgtgtggcctattaacttcaatgagagttacttggaaaacggcaccaaggggtttgattgggaggagtatattaataataagaccaacttctacacagtgcccggtatgctggagccccttttgtgcgggaactcttccgacgctggccagtgccctgaaggatatcaatgcatgaaggcaggccgcaaccccaattacggatacacatcattcgatacattctcctgggccttcctggcacttttcagactcatgacacaggattactgggaaaatctgtaccagctgactctgcgcgccgctggcaaaacgtacatgatctttttcgtccttgtgattttcgtagggagcttctacttggtaaacctgattttggccgtcgtggccatggcttatgaagagcaaaaccaggccacacttgaggaagctgagcagaaagaagccgagttcaaggccatgctggagcagctgaagaaacagcaagaagaggcgcaggccgccgctatggccacgagcgctgggaccgtaagtgaggacgcaatcgaagaagaaggcgaagagggcgggggcagtccacgtagctcttcagagatctccaagctgtcttccaagagcgccaaggaaaggcgaaatcgccgaaaaaaaagaaagcagaaggagctttccgagggcgaggagaaaggagaccctgagaaggtctttaaaagcgaatctgaagatggaatgcgccgtaaagcctttcggctgcccgacaaccggattggaagaaagttcagcattatgaaccagagcctgttaagcattccaggatcaccattcttatcaagacataattccaagagttcaattttttcttttcggggaccggggcgcttcagagatcccgggtctgagaatgaattcgctgatgatgagcattctaccgtcgaggagtccgaagggcggagagattcccttttcatccccatcagagcgcgggagcgaagatctagctatagtggatattcaggatacagtcagggatcccggtcgtcacgcattttcccaagcctgcgccgcagcgtgaaacgaaactctaccgtcgattgcaacggcgtagtaagtctgatcggcggacctgggagccatattgggggcagacttctgccagaagccacgaccgaggtcgaaattaaaaagaaaggcccaggatccctccttgtgagcatggatcaacttgctagctatgggagaaaagatcggatcaatagtattatgtctgttgtgacaaatactctggtagaagagctggaagagtcacagaggaagtgtcctccttgctggtacaaatttgctaacacctttctcatctgggagtgccacccatattggatcaagctgaaggagatcgttaacctgattgtcatggatcccttcgtcgatcttgccatcacgatttgtattgtcctaaatactcttttcatggccatggaacaccaccctatgactccacagtttgaacatgtgttggccgttggcaacctggtctttaccggtatctttaccgctgagatgtttctaaaactgattgccatggatccgtactactatttccaggaagggtggaatatttttgatggttttatagtgagccttagcttaatggaactgtcactggccgatgttgagggcctgagtgtgcttcgctcctttcggctactcagggtcttcaaacttgccaaatcatggcctaccctcaacatgcttataaaaattatcggaaactctgtcggagccctaggcaatttaaccctggtgctggctattattgttttcatttttgcagtggtggggatgcagttgttcggaaaaagctataaggaatgtgtctgcaagatcaaccaagactgtgaactgcctcgatggcacatgcacgatttctttcattcctttctgattgtgtttcgtgtgctgtgcggagaatggatagaaacaatgtgggattgcatggaggttgccggccaggcaatgtgtctcatcgtgtttatgatggtgatggtcatcggcaacctcgtcgtcagcaccaatttgtag

SEQ ID NO: 334636 - DNA, 2919 bp, Artificial Sequence
  derived and/or modified sequence
atggccgcccggctgctggcccctcctggccctgacagcttcaagcccttcaccccagagagcctggccaacattgaaagaagaattgctgagagcaagctgaagaagccacccaaggcagatggcagccaccgggaggatgatgaggacagcaagcccaagcccaacagcgacctggaggccggcaagagcctgcccttcatctatggagacatcccccagggcctggtggccgtgcccctggaggactttgacccctactacctgacccagaagacctttgtggtgctgaacagaggcaagaccctcttccgcttcagcgccaccccagccctgtacatcctgagccccttcaacctgatccgccgcatcgccatcaagatcctgatccacagcgtcttctccatgatcatcatgtgcaccatcctgaccaactgtgtgttcatgaccttcagcaaccccccagactggagcaagaatgtggagtacaccttcaccggcatctacacctttgagagcctggtgaagatcatcgcccggggcttctgcattgatggcttcaccttcctgcgggacccctggaactggctggacttcagcgtcatcatgatggcctacgtgacagaatttgtggacctgggcaatgtgtctgccctgcggaccttccgggtgctgcgggccctgaagaccatcagcgtcatccctggcctgaagaccatcgtgggcgccctgatccagagcgtgaagaagctgagtgatgtgatgatcctgaccgtcttctgcctgtctgtgtttgccctgattggcctgcagctgttcatgggcaacctgaggaacaagtgtgtggtgtggcccatcaacttcaatgaaagctacctggagaatggcaccaagggctttgactgggaggagtacatcaacaacaagaccaacttctacacagtgcccggcatgctggagcccctgctgtgtggcaacagcagtgatgctggccagtgcccagagggctaccagtgcatgaaggccggcaggaaccccaactacggctacaccagctttgacaccttctcctgggccttcctggccctcttccggctgatgacccaggactactgggagaacctgtaccagctgaccctgcgggctgctgggaagacctacatgatcttctttgtgctggtgatctttgtgggcagcttctacctggtgaacctgatcctggccgtggtggccatggcctatgaggagcagaaccaggccaccctggaggaggccgagcagaaggaggccgagttcaaggccatgctggagcagctgaagaagcagcaggaggaggcccaggccgccgccatggccaccagcgctggcaccgtgtctgaagatgccatcgaggaggagggggaggagggcggcggcagccccaggagcagcagcgagatcagcaagctgagcagcaagagcgccaaggagaggaggaacagaaggaagaagaggaagcagaaggagctgtctgagggggaggagaagggggaccctgagaaggtgttcaagtctgagagtgaagatggcatgaggaggaaggccttccggctgcctgacaaccgcatcggcaggaagttcagcatcatgaaccagagcctgctgagcatccctggcagccccttcctgagccgccacaacagcaagagcagcatcttctccttccggggccctggccgcttccgggaccccggctctgaaaatgaatttgctgatgatgagcacagcacagtggaggagagcgagggcagaagagacagcctcttcatccccatccgggcccgggagcggcgcagcagctacagcggctacagcggctacagccagggcagccgcagcagccgcatcttccccagcctgcggcgctctgtgaagaggaacagcacagtggactgcaatggagtggtgtccctcatcggcggccctggcagccacatcggcggccgcctgctgcctgaggccaccacagaggtggagatcaagaagaagggccctggcagcctgctggtgtccatggaccagctggccagctatggcaggaaggaccgcatcaacagcatcatgtctgtggtgaccaacaccctggtggaggagctggaggagagccagaggaagtgccccccctgctggtacaagtttgccaacaccttcctgatctgggagtgccacccctactggatcaagctgaaggagatcgtgaacctgattgtgatggacccctttgtggacctggccatcaccatctgcatcgtgctgaacaccctcttcatggccatggagcaccaccccatgaccccccagtttgaacatgtgctggccgtgggcaacctggtgttcaccggcatcttcaccgctgagatgttcctgaagctgattgccatggacccctactactacttccaggagggctggaacatctttgatggcttcatcgtgtccctgagcctgatggagctgagcctggctgatgtggagggcctgtctgtgctgcgctccttccggctgctgcgggtcttcaagctggccaagtcctggcccaccctgaacatgctgatcaagatcatcggcaacagcgtgggcgccctgggcaacctgaccctggtgctggccatcatcgtgttcatctttgctgtggtgggcatgcagctgtttgggaagagctacaaggaatgtgtgtgcaagatcaaccaggactgtgagctgccccgctggcacatgcatgacttcttccacagcttcctgattgtgttccgggtgctgtgtggggagtggattgagaccatgtgggactgcatggaggtggccggccaggccatgtgcctgattgtgttcatgatggtgatggtgattggcaacctggtggtgtccaccaacctgtag

SEQ ID NO: 334637 - DNA, 2919 bp, Artificial Sequence
  derived and/or modified sequence
atggccgcccggctgctggccccccccggccccgacagcttcaagccctttacacccgaaagtctggccaacatcgaaaggaggatagctgagagtaagctgaaaaagcctcccaaggcagacggctctcatagggaggacgatgaagacagtaagccgaagcctaactccgatctggaagcgggaaagagtttgccgttcatttacggcgacataccgcaggggcttgtcgcggtgcccctcgaggactttgacccgtattacctgacacaaaagacatttgtggttctaaaccgtgggaaaaccttgttccggttctctgctacacctgccctctacatactctcccctttcaacctcattcgccgcatagctatcaagatccttatccattccgtgtttagcatgatcatcatgtgtaccatcctgacaaattgcgtctttatgaccttctccaatcctcccgactggtctaagaatgtagagtatacattcacgggcatttatacattcgaaagcctagtgaagattatcgccagaggcttctgcatcgatggctttacattcctgagagacccatggaattggctcgacttcagcgtgatcatgatggcttacgtgaccgagttcgttgatctggggaacgttagcgccctccgaacctttcgcgtactgcgtgccctgaaaacgatttccgtgattcccgggctgaagaccatcgtgggcgcattaattcagagtgtaaaaaagcttagcgacgtgatgatcttgaccgttttctgtctctccgtgttcgccttaatcgggctgcagctgtttatgggcaatctcaggaataagtgtgttgtctggcccataaatttcaatgagtcctacctggagaatgggacgaagggattcgactgggaggaatacatcaataacaagactaatttctatactgtgcccggcatgctcgaacctctgctgtgcgggaatagtagtgatgcaggccagtgccccgagggataccagtgcatgaaggctgggagaaacccgaattacgggtatacatccttcgatactttttcatgggccttcctcgccctgttcagattgatgacacaggattactgggagaatctgtaccaactgacactgagagccgccggtaagacctatatgatcttcttcgtcctggtgatcttcgtgggttccttctatctggtgaacctgattctggcagtagtggcaatggcctatgaggaacagaaccaggctacgcttgaggaggcagaacagaaagaagcggaattcaaggctatgctcgaacagctcaagaaacaacaggaggaagcccaggctgctgcaatggccacatccgctggaaccgtatctgaggatgccattgaagaagaaggcgaggaggggggaggctcaccacgaagtagcagtgaaatcagcaagctcagcagcaagtccgctaaagagaggaggaacaggcgcaagaagcggaagcaaaaggagttgagcgagggtgaggaaaagggagatcccgaaaaagtgttcaaatcggagagcgaggatggcatgcgccggaaggcatttagactcccagacaaccggatcgggagaaaattctcaattatgaaccagtccttgctgtctattcccggttcacctttcctgtcccggcacaactcaaagtcatctattttctcctttcgcggccctggtagattccgcgatccagggtctgaaaatgaattcgccgatgatgaacattccaccgtggaggagtcagaggggcggcgagattctctgtttattccaattcgagcgagagagcgccggtccagttactctggatattctggctatagccagggcagtcgtagctcaaggatcttcccatcgctcaggagaagcgtgaagcgaaattccacggtggactgtaatggagtggtgagcctgataggggggccaggttcacacatcggcgggagactcctacctgaagctacaaccgaagttgaaatcaaaaagaaaggacctggctctcttttggtcagcatggaccagttggccagctatgggagaaaagaccgcatcaactctataatgtccgtagtcacaaatactcttgtcgaggagttagaggagtcgcagcgaaaatgcccaccttgttggtacaagttcgccaatactttcctgatttgggagtgccatccctactggatcaaacttaaggaaatcgtgaatttgatagtgatggaccccttcgtggacctggccatcacaatttgcatcgtactgaacactctgtttatggccatggaacaccacccaatgaccccacagtttgagcacgtcctggccgtcggtaatctggtcttcacgggcatcttcacagcggaaatgtttcttaagttgatcgctatggacccctactattactttcaagaaggatggaatatctttgacggatttattgtgtctctgagtctgatggaattgtcactggccgatgtggagggcctgtccgtgctgagatctttccgcctgttgcgagttttcaagctcgcaaagagttggccaacattgaacatgctaattaagattattggaaatagtgtgggagcccttggcaacttaactttggtgctggccataatcgtgttcatctttgccgtggtcggcatgcaattgttcgggaagtcttacaaggagtgtgtatgtaaaatcaatcaggactgtgagctccctaggtggcacatgcacgactttttccacagctttctgatcgtgtttcgggtcctgtgcggcgagtggatcgaaacgatgtgggattgcatggaagttgccggacaggctatgtgcctgatagtgtttatgatggtgatggtcattggaaacctggtagtatcgacaaatctgtag

SEQ ID NO: 334638 - DNA, 2919 bp, Artificial Sequence
  derived and/or modified sequence
atggccgcacggctactcgcgccacccggaccagattcgtttaaacccttcacacctgaaagcctggccaacatcgagcgaaggatcgcggagtctaagctgaaaaaaccccctaaggccgacggaagtcatcgggaggatgatgaggactctaagcctaagcccaatagtgacctggaagccggaaagtcgctgccctttatctacggtgacatcccccaggggctggtcgctgttcctctggaggacttcgatccatattacctgactcagaaaacgttcgtagtgctcaatcgcggaaaaaccttatttcgcttcagcgcgacccccgcactgtatatattgtccccctttaatctaatccggagaatagccatcaagatcctcattcacagcgttttctccatgatcatcatgtgcactatcctgaccaactgcgtatttatgactttttcaaaccccccagattggtcaaaaaatgtcgagtacacgtttacaggtatttatacctttgagagtctcgtgaaaatcatcgcgaggggattctgcatagacggcttcacattcctacgcgacccgtggaactggttggatttcagcgtgattatgatggcatacgtcaccgagtttgtggatttaggcaatgtctccgcactgagaacctttagggtcctgcgggctctaaagactatatcagtcatcccgggactgaagacaattgtcggggctctcatccagtcggtgaaaaagctcagcgatgttatgattttaacagtcttttgcctgagcgtgttcgcactgatcgggctacagctgtttatggggaatctgcggaataaatgcgttgtctggccgataaacttcaacgaaagctatctggaaaatggtacaaaaggcttcgactgggaggaatatattaacaataaaaccaatttttatactgtaccaggcatgctcgagccgttactttgtggcaactcttctgacgccggtcagtgtcccgaaggatatcagtgtatgaaggcaggacggaaccctaattatgggtatacaagttttgacaccttttcatgggcttttctagctctctttcggctcatgacgcaggattattgggagaacctctatcaactcactctgcgtgctgccggaaaaacatacatgattttcttcgtgctagtgatcttcgttggatcattctacctggttaatttaatcctcgcagtcgtggcaatggcttacgaggagcaaaaccaagcaactttggaggaggccgagcagaaagaggccgaattcaaggctatgctcgaacagctcaagaaacaacaggaggaggcccaggccgcagctatggccacttcggccggtaccgttagtgaagacgctatcgaagaggaaggagaggaaggtggtggttctccacgctcctcaagtgaaattagcaagttaagttcaaagtcagctaaagagcgcagaaaccggagaaagaagcgcaagcaaaaagagttgtccgaaggggaagaaaagggcgacccagagaaagtctttaagtctgaaagtgaggacggcatgcggcgtaaagcgtttcgcctgccagacaaccggattggacggaaattctcaataatgaatcagtcattattgagtattcctggctctccttttctcagtagacacaactccaagtctagtatcttctctttccgcggacctgggagattccgcgatcccggaagtgaaaacgaatttgccgacgacgagcactctaccgtggaagagtcagagggaagacgagacagcctctttatacctattcgtgccagagaaaggagatcatcatactctggctactcaggctactcccagggttccaggtccagcaggatcttccctagccttcgccgttcagtcaagagaaactctaccgtggattgcaacggcgttgtgagtctgataggagggcctgggtctcacatcggagggaggctgttacctgaggctactacggaggtggagatcaaaaagaaaggaccgggttctcttctggtttcaatggaccagctcgcctcctacgggaggaaagaccggattaattctatcatgtccgtggttacaaacaccttggtggaagagctcgaagagagccagcgcaaatgccctccatgctggtataaattcgctaatactttcctcatctgggaatgtcacccctactggatcaagctcaaggagattgttaacctcatcgtgatggacccattcgttgatctggctataacgatctgtatagtcctgaataccctgttcatggctatggaacaccaccctatgactccacagtttgaacacgtcctggccgttggtaacctggtgtttaccggaattttcactgcagagatgtttctcaagctgatcgccatggacccctactactacttccaggagggatggaacatattcgacgggtttattgtatcactgtctctgatggagctttccctagcagacgttgagggcctgagtgtgctgcggtcttttcgattgcttagggtgttcaaactcgcaaagagttggcccacgctgaatatgctgatcaagataataggtaatagcgttggtgcattagggaacctgacactggtgctggccatcatcgtctttatttttgccgtggtcgggatgcaactcttcggcaagtcatataaagagtgcgtgtgtaaaatcaaccaggattgtgagctcccccgatggcatatgcacgactttttccactcatttcttatcgtgtttagggtgctctgcggtgagtggatagagacaatgtgggattgcatggaggtggctgggcaagctatgtgcctaatcgtctttatgatggtgatggttatcggcaacttggtggtttctacaaatttgtag

SEQ ID NO: 334639 - DNA, 3253 bp, Artificial Sequence
  derived and/or modified sequence
gagacgcgagtctgagagcctgcgggcgggcggcgcgctgcaggcgagcgggcgagcgggcgcgccctgcagggagctgacctgtcctggacgcagcataactaacgaagctgctgcaggatgagaagatggcagcgcggctgcttgcaccaccaggccctgatagtttcaagcctttcacccctgagtcactggcaaacattgagaggcgcattgctgagagcaagctcaagaaaccaccaaaggccgatggcagtcatcgggaggacgatgaggacagcaagcccaagccaaacagcgacctggaagcagggaagagtttgcctttcatctacggggacatcccccaaggcctggttgcagttcccctggaggactttgacccatactatttgacgcagaaaacctttgtagtattaaacagagggaaaactctcttcagatttagtgccacgcctgccttgtacattttaagtccttttaacctgataagaagaatagctattaaaattttgatacattcagtatttagcatgatcattatgtgcactattttgaccaactgtgtattcatgacttttagtaaccctcctgactggtcgaagaatgtggagtacacgttcacagggatttatacatttgaatcactagtgaaaatcattgcaagaggtttctgcatagatggctttacctttttacgggacccatggaactggttagatttcagtgtcatcatgatggcatatgtgacagagtttgtggacctgggcaatgtctcagcgctgagaacattcagggttctccgagctttgaaaactatctctgtaattccaggcctgaagacaattgtgggtgccctgattcagtctgtgaagaaactgtcagatgtgatgatcctgacagtgttctgcctgagtgtttttgccttgatcggactgcagctgttcatggggaaccttcgaaacaagtgtgttgtgtggcccataaacttcaacgagagctatcttgaaaatggcaccaaaggctttgattgggaagagtatatcaacaataaaacaaatttctacacagttcctggcatgctggaacctttactctgtgggaacagttctgatgctgggcaatgcccagagggataccagtgtatgaaagcaggaaggaaccccaactatggttacacaagttttgacacttttagctgggccttcttggcattatttcgccttatgacccaggactattgggaaaacttgtatcaattgactttacgagcagccgggaaaacatacatgatcttcttcgtcttggtcatctttgtgggttctttctatctggtgaacttgatcttggctgtggtggccatggcttatgaagaacagaatcaggcaacactggaggaggcagaacaaaaagaggctgaatttaaagcaatgttggagcaacttaagaagcaacaggaagaggcacaggctgctgcgatggccacttcagcaggaactgtctcagaagatgccatagaggaagaaggtgaagaaggagggggctcccctcggagctcttctgaaatctctaaactcagctcaaagagtgcaaaggaaagacgtaacaggagaaagaagaggaagcaaaaggaactctctgaaggagaggagaaaggggatcccgagaaggtgtttaagtcagagtcagaagatggcatgagaaggaaggcctttcggctgccagacaacagaatagggaggaaattttccatcatgaatcagtcactgctcagcatcccaggctcgcccttcctctcccgccacaacagcaagagcagcatcttcagtttcaggggacctgggcggttccgagacccgggctccgagaatgagttcgcggatgacgagcacagcacggtggaggagagcgagggccgccgggactccctcttcatccccatccgggcccgcgagcgccggagcagctacagcggctacagcggctacagccagggcagccgctcctcgcgcatcttccccagcctgcggcgcagcgtgaagcgcaacagcacggtggactgcaacggcgtggtgtccctcatcggcggccccggctcccacatcggcgggcgtctcctgccagaggctacaactgaggtggaaattaagaagaaaggccctggatctcttttagtttccatggaccaattagcctcctacgggcggaaggacagaatcaacagtataatgagtgttgttacaaatacactagtagaagaactggaagagtctcagagaaagtgcccgccatgctggtataaatttgccaacactttcctcatctgggagtgccacccctactggataaaactgaaagagattgtgaacttgatagttatggacccttttgtggatttagccatcaccatctgcatcgtcctgaatacactgtttatggcaatggagcaccatcctatgacaccacaatttgaacatgtcttggctgtaggaaatctggttttcactggaattttcacagcggaaatgttcctgaagctcatagccatggatccctactattatttccaagaaggttggaacatttttgacggatttattgtctccctcagtttaatggaactgagtctagcagacgtggaggggctttcagtgctgcgatctttccgattgctccgagtcttcaaattggccaaatcctggcccaccctgaacatgctaatcaagattattggaaattcagtgggtgccctgggcaacctgacactggtgctggccattattgtcttcatctttgccgtggtggggatgcaactctttggaaaaagctacaaagagtgtgtctgcaagatcaaccaggactgtgaactccctcgctggcatatgcatgactttttccattccttcctcattgtctttcgagtgttgtgcggggagtggattgagaccatgtgggactgcatggaagtggcaggccaggccatgtgcctcattgtctttatgatggtcatggtgattggcaacttggtggttagtactaatttgtagatatttttgttctacaccctgaatattctacccctggcccagaagcccaagtccttctactgcttagtccttctactacccgtcatgtttgttgatttttattctttcttggcccagaaaccctaaggtacaaatgaaggagaggagagagatacttacagagtgcctacttagtcatgacccccacaacttgtcaacccttttcc

SEQ ID NO: 334640 - DNA, 2919 bp, Artificial Sequence
  derived and/or modified sequence
atggccgccagactgctggccccccccggccccgacagcttcaagcccttcacccccgagagcctggccaacatcgagagaagaatcgccgagagcaagctgaagaagccccccaaggccgacggcagccacagagaggacgacgaggacagcaagcccaagcccaacagcgacctggaggccggcaagagcctgcccttcatctacggcgacatcccccagggcctggtggccgtgcccctggaggacttcgacccctactacctgacccagaagaccttcgtggtgctgaacagaggcaagaccctgttcagattcagcgccacccccgccctgtacatcctgagccccttcaacctgatcagaagaatcgccatcaagatcctgatccacagcgtgttcagcatgatcatcatgtgcaccatcctgaccaactgcgtgttcatgaccttcagcaacccccccgactggagcaagaacgtggagtacaccttcaccggcatctacaccttcgagagcctggtgaagatcatcgccagaggcttctgcatcgacggcttcaccttcctgagagacccctggaactggctggacttcagcgtgatcatgatggcctacgtgaccgagttcgtggacctgggcaacgtgagcgccctgagaaccttcagagtgctgagagccctgaagaccatcagcgtgatccccggcctgaagaccatcgtgggcgccctgatccagagcgtgaagaagctgagcgacgtgatgatcctgaccgtgttctgcctgagcgtgttcgccctgatcggcctgcagctgttcatgggcaacctgagaaacaagtgcgtggtgtggcccatcaacttcaacgagagctacctggagaacggcaccaagggcttcgactgggaggagtacatcaacaacaagaccaacttctacaccgtgcccggcatgctggagcccctgctgtgcggcaacagcagcgacgccggccagtgccccgagggctaccagtgcatgaaggccggcagaaaccccaactacggctacaccagcttcgacaccttcagctgggccttcctggccctgttcagactgatgacccaggactactgggagaacctgtaccagctgaccctgagagccgccggcaagacctacatgatcttcttcgtgctggtgatcttcgtgggcagcttctacctggtgaacctgatcctggccgtggtggccatggcctacgaggagcagaaccaggccaccctggaggaggccgagcagaaggaggccgagttcaaggccatgctggagcagctgaagaagcagcaggaggaggcccaggccgccgccatggccaccagcgccggcaccgtgagcgaggacgccatcgaggaggagggcgaggagggcggcggcagccccagaagcagcagcgagatcagcaagctgagcagcaagagcgccaaggagagaagaaacagaagaaagaagagaaagcagaaggagctgagcgagggcgaggagaagggcgaccccgagaaggtgttcaagagcgagagcgaggacggcatgagaagaaaggccttcagactgcccgacaacagaatcggcagaaagttcagcatcatgaaccagagcctgctgagcatccccggcagccccttcctgagcagacacaacagcaagagcagcatcttcagcttcagaggccccggcagattcagagaccccggcagcgagaacgagttcgccgacgacgagcacagcaccgtggaggagagcgagggcagaagagacagcctgttcatccccatcagagccagagagagaagaagcagctacagcggctacagcggctacagccagggcagcagaagcagcagaatcttccccagcctgagaagaagcgtgaagagaaacagcaccgtggactgcaacggcgtggtgagcctgatcggcggccccggcagccacatcggcggcagactgctgcccgaggccaccaccgaggtggagatcaagaagaagggccccggcagcctgctggtgagcatggaccagctggccagctacggcagaaaggacagaatcaacagcatcatgagcgtggtgaccaacaccctggtggaggagctggaggagagccagagaaagtgccccccctgctggtacaagttcgccaacaccttcctgatctgggagtgccacccctactggatcaagctgaaggagatcgtgaacctgatcgtgatggaccccttcgtggacctggccatcaccatctgcatcgtgctgaacaccctgttcatggccatggagcaccaccccatgaccccccagttcgagcacgtgctggccgtgggcaacctggtgttcaccggcatcttcaccgccgagatgttcctgaagctgatcgccatggacccctactactacttccaggagggctggaacatcttcgacggcttcatcgtgagcctgagcctgatggagctgagcctggccgacgtggagggcctgagcgtgctgagaagcttcagactgctgagagtgttcaagctggccaagagctggcccaccctgaacatgctgatcaagatcatcggcaacagcgtgggcgccctgggcaacctgaccctggtgctggccatcatcgtgttcatcttcgccgtggtgggcatgcagctgttcggcaagagctacaaggagtgcgtgtgcaagatcaaccaggactgcgagctgcccagatggcacatgcacgacttcttccacagcttcctgatcgtgttcagagtgctgtgcggcgagtggatcgagaccatgtgggactgcatggaggtggccggccaggccatgtgcctgatcgtgttcatgatggtgatggtgatcggcaacctggtggtgagcaccaacctgtag

SEQ ID NO: 334641 - DNA, 756 bp, Artificial Sequence
  derived and/or modified sequence
gccacagtcggattcgctgccgcagcagccgccacccccaggagccgccgggaccctcgcgtcgtcgccgccgcggcccagatccccacaccatgccgtcggagaagaccttcaagcagcggcgcaccttcgaacaaagagtagaagatgtccgacttattcgagagcagcatccaaccaaaatcccggtgataatagaacgatacaagggtgagaagcagcttcctgttctggataaaacaaagttccttgtacctgaccatgtcaacatgagtgagctcatcaagataattagaaggcgcttacagctcaatgctaatcaggccttcttcctgttggtgaacggacacagcatggtcagcgtctccacaccaatctcagaggtgtatgagagtgagaaagatgaagatggattcctgtacatggtctgtgcctcccaggagacgttcgggatgaaattgtcagtgtaaaaccagaaaaaatgcatctcttctagaattttttaaacccttaccaaggaaaaaaaaagggatgttaccaactgagatcgatcagttcatctaatcacagatcatcaaacagtagtgttcccacctaggagtgttaggaagttgtgtttgtgtttcaagcagaaaaactgagctccaagtgagcacattcagctttggaaactatattatttaatgtaggctagcttgttttcaaattttaaaagtttaaaaataaaatactttgcattctaaaaaaaaaaaaaaa

SEQ ID NO: 334642 - DNA, 832 bp, Artificial Sequence
  derived and/or modified sequence
gcaaggctcgcagccacctctcgggagtgcagggccagatcctgtgccagcggccttacacggccacagtcggattcgctgccgcagcagccgccacccccaggagccgccgggaccctcgcgtcgtcgccgccgcggcccagatccccacaccatgccgtcggagaagaccttcaagcagcggcgcaccttcgaacaaagagtagaagatgtccgacttattcgagagcagcatccaaccaaaatcccggtgataatagaacgatacaagggtgagaagcagcttcctgttctggataaaacaaagttccttgtacctgaccatgtcaacatgagtgagctcatcaagataattagaaggcgcttacagctcaatgctaatcaggccttcttcctgttggtgaacggacacagcatggtcagcgtctccacaccaatctcagaggtgtatgagagtgagaaagatgaagatggattcctgtacatggtctgtgcctcccaggagacgttcgggatgaaattgtcagtgtaaaaccagaaaaaatgcatctcttctagaattttttaaacccttaccaaggaaaaaaaaagggatgttaccaactgagatcgatcagttcatctaatcacagatcatcaaacagtagtgttcccacctaggagtgttaggaagttgtgtttgtgtttcaagcagaaaaactgagctccaagtgagcacattcagctttggaaactatattatttaatgtaggctagcttgttttcaaattttaaaagtttaaaaataaaatactttgcattctaaaaaaaaaaaaaaattgccttacacaat

SEQ ID NO: 334643 - DNA, 330 bp, Artificial Sequence
  derived and/or modified sequence
cccatggtgggcctgctggtgcacaccgccgccaccttcaactacagcttcagaaagatcagaggcctgctgtgcccccagcacaagcagagaggcgtgcaggccaaccagacccccgtgctgttcctgcacatcagctgcgtgtactacagcctgtacctgttcttcctgttctgctgcctgttcctgatccccctggagcagaagatgaccaccagccccctgccctacccctgcgacaacatccacgtgaccgtgtggcccctgggcgaggtgctgatggagaccagaatgtgggagagcaagatcggcctggagatgagactgtag

SEQ ID NO: 334644 - DNA, 1644 bp, Artificial Sequence
  derived and/or modified sequence
atgggcgatcacaaaatcttgatcgaccgttacgacggacgtggacatctgcatgatcttagtgagtacgacgctgagtactccacatggaatagagattatcaattgtctgaagaggaggccaggatcgaggctctttgcgacgaagagcgatacctggcgctacacaccgacctgttagaagaagaagccagacaggaagaagaatacaaacgactgagcgaggctctagcagaagacggctcatacaatgccgtgggtttcacttacgggagcgattattacgatcctagcgagcccaccgaggaagaggaaccaagcaaacaaagggagaaaaacgaagccgagaatctggaggaaaatgaggagccgtttgtcgctccactcggactttctgtgcctagcgacgtcgagctcccgcccactgccaaaatgcacgccatcatagaaaggacagctagctttgtctgtcggcaaggggcccagttcgagatcatgctaaaagctaaacaagcccggaacagtcagttcgatttcctaaggttcgatcactacctaaatccttactataagtttatccaaaaagccatgaaggaggggcggtacaccgtcctggcggagaataagagcgatgaaaaaaagaaatccggtgtgtcctcggacaatgaggatgatgacgatgaagaagatgggaactacctgcatccttccctgtttgcatctaaaaagtgtaatcgcctcgaggagctgatgaaacctctgaaagttgtggaccctgatcaccctttggcggctctcgtgagaaaggcacaagcagattcatccacacctactccacacaacgccgacggcgcacctgtccagccatctcaggttgaatacaccgctgactcaactgtagctgctatgtattattcatactacatgctcccggacggaacctactgtttggccccgcccccacccggcatcgatgtgacaacctactatagcacactgcccgcaggtgtgacagtttctaacagtcccggtgtcaccacaaccgcacctccgcctccaggtaccacgcccctgcccccaccaacaacagccgaaacgtcttcaggcgccactagcaccactactacgacttctgcattggctcctgtggccgcaattattcctcctcctcctgacgttcaaccggtcatagacaagctggccgaatacgtcgcccgcaatggcctgaaattcgagacctcagtccgggccaaaaatgaccaacgctttgaatttctgcagccctggcaccagtataatgcctactatgagttcaagaaacagttttttttgcagaaagagggtggcgactccatgcaagcagtctctgccccagaagaagcccccactgacagcgccccagagaaaccctcagacgctggagaggacggagctcctgaagacgccgctgaggttggagccagagccggaagcggcggcaaaaaagaagcctcctctagtaagactgtgccagacgggaaactcgttaaggcgtcttttgcccccatctccttcgccatcaaggccaaagaaaatgaccttctgcccctggaaaaaaacagaaagaaaaggaagaaaaggaaaaggaaatccacaaagaagtag

SEQ ID NO: 334645 - DNA, 1644 bp, Artificial Sequence
  derived and/or modified sequence
atgggagaccacaagatcctgattgacagatatgatggccggggccacctgcatgacctgtctgaatatgatgctgagtacagcacctggaacagagactaccagctgtctgaggaggaggccagaattgaggccctgtgtgatgaggagcgctacctggccctgcacacagacctgctggaggaggaggcccggcaggaggaggagtacaagaggctgtctgaggccctggctgaagatggcagctacaatgctgtgggcttcacctacggcagtgactactatgaccccagcgagcccacagaggaggaggagcccagcaagcagcgggagaagaatgaagctgagaacctggaggagaatgaggagccctttgtggcccccctgggcctgtctgtgcccagtgatgtggagctgcccccaacagccaagatgcacgccatcattgaaagaacagccagctttgtgtgccggcagggcgcccagtttgagatcatgctgaaggccaagcaggccaggaacagccagtttgacttcctgcgctttgaccactacctgaacccctactacaagttcatccagaaggccatgaaggagggccgctacacagtgctggccgagaacaagagtgatgagaagaagaagagcggcgtgtccagtgacaatgaagatgatgatgatgaagaagatggcaactacctgcaccccagcctgtttgccagcaagaagtgcaaccggctggaggagctgatgaagcccctgaaggtggtggaccctgaccaccccctggccgccctggtgaggaaggcccaggccgacagcagcacccccaccccccacaatgctgatggagcccctgtgcagcccagccaggtggagtacacagctgacagcacagtggccgccatgtactacagctactacatgctgcctgatggcacctactgcctggcccctcctcctcctggcattgatgtgaccacctactacagcaccctgcctgctggggtgacagtgagcaacagccctggggtgaccaccacagcccctcctcctcctggcaccacccccctgcccccacccaccacagctgagaccagcagcggggccaccagcaccaccaccaccaccagcgccctggcccctgtggccgccatcatccccccacctccagatgtgcagcctgtgattgacaagctggccgagtatgtggccagaaatggcctgaagtttgagacctctgtgcgggccaagaatgaccagagatttgagttcctgcagccctggcaccagtacaatgcctactatgagttcaagaagcagttcttcctgcagaaggagggcggggacagcatgcaggccgtgtctgcccctgaggaggcccccacagattctgcccctgagaagcccagtgatgctggagaagatggagccccagaagatgctgctgaggtgggcgcccgggccggcagcggcggcaagaaggaggccagcagcagcaagacagtgcctgatggcaagctggtgaaggccagctttgcccccatcagctttgccatcaaggccaaggaaaatgacctgctgcccctggagaagaacaggaagaagaggaagaagaggaagaggaagagcaccaagaagtag

SEQ ID NO: 334646 - DNA, 1644 bp, Artificial Sequence
  derived and/or modified sequence
atgggcgaccacaagatcctgatcgaccggtacgacggccggggccacctgcatgatttatccgagtatgatgccgagtatagcacctggaatcgcgattatcagttgtctgaggaagaggcacgaatcgaagctttatgcgacgaggagagatacttagccctgcatacagacttactagaggaggaagccagacaagaggaagagtataaaagactcagtgaggcccttgccgaggatggttcttataacgcagtcggctttacatacggcagtgattattatgatccctcagagcccaccgaggaagaggagccctccaaacagagagagaagaatgaggctgagaaccttgaagagaacgaagagccctttgtggccccactgggattgagcgtgccgagcgacgtggaactgcctccgacggccaagatgcacgccattatagagagaacagcatcatttgtgtgtcggcagggggcacaatttgaaatcatgttaaaggctaagcaggcacgcaattcccaatttgatttcctgcgtttcgaccactacctgaatccttattacaagtttatccagaaagctatgaaagaaggccggtataccgtgctggcagaaaacaagtctgacgaaaagaaaaaatccggtgtatcttcagataatgaggatgatgacgatgaagaggacggaaattacttacacccgtccctatttgcctcaaagaagtgtaataggcttgaagagctgatgaaaccgctaaaagtggtcgatcccgaccacccgctggccgcccttgtacgtaaagctcaagcggattctagtaccccaactccccataacgccgatggagcacctgtccagcccagccaggttgaatacactgcggatagcactgtagcggctatgtactatagctattatatgctccccgacggcacatattgcttagctcccccgccccccggaattgacgtgacaacctattacagtaccctgcccgctggggttacagtgagcaactccccgggtgtgacaaccacagcgcccccaccaccgggaacgacaccactgcctcctcccacgacagcagagacatcatcaggtgccacctccactaccacaacaacctctgctcttgcccctgttgccgctatcatcccacccccacccgatgtgcagccagtgatcgacaagctcgccgagtacgttgcaaggaacggactcaagtttgaaaccagcgtgcgagccaaaaatgaccagcgtttcgagtttctgcagccttggcaccagtataatgcctattacgaattcaagaaacagttcttcctgcaaaaggaaggtggggactcgatgcaagctgtcagtgcacctgaggaggctccaaccgacagtgctcctgagaagcctagtgacgccggagaagatggtgcccctgaagatgccgctgaagttggtgctcgggccggctctggggggaagaaggaagcctccagctccaagacagtgccagatggcaaattagtcaaagctagcttcgcgcctatatcttttgcgattaaggccaaggaaaatgacctcctacctctggagaagaaccggaagaagcgtaagaagcggaagcgcaaaagcacaaagaagtag

SEQ ID NO: 334647 - DNA, 1970 bp, Artificial Sequence
  derived and/or modified sequence
attttgtggcccgctatggcggcggtgttgaggttgggtacgggatgcggggtctttgactgaaggggtaggccaagtggaggtatcagggacgtcgcgcggcacagaagaggaccagcctggacgccggggacgctgtcatgtacggcgcgagcgggggccgcgccaaacccgagaggaaaagcggcgcgaaggaggaggccgggccaggcggtgccggcggtgggggcagccgagtggagctcttggttttcggctatgcctgcaagctgttccgggacgacgagcgggccctggctcaggaacagggacagcacctcatcccctggatgggggaccacaagatcctcatcgacagatatgatggacgtggtcacctgcatgacctttctgagtacgatgctgagtattccacgtggaacagagattatcagctgtctgaagaggaggcgcgaatagaggccctgtgtgatgaagagaggtatttagccttgcatacggacttgcttgaggaggaggcaaggcaagaggaagaatacaagcgattgagtgaagcactagcagaggatgggagctacaatgccgtggggttcacttacggtagcgactattacgacccgtcagagccgacggaggaggaggagccttccaaacagagagaaaaaaatgaggccgaaaatttagaggaaaatgaagagcccttcgttgcccccttaggattgagcgtcccgtctgacgtggagttgccaccaaccgctaaaatgcacgccatcatcgagcgcacggccagcttcgtgtgcaggcagggagcacagtttgagatcatgctgaaggccaagcaggcccggaactcccagtttgactttctgcgcttcgaccactacctcaacccctactataagttcatccagaaagccatgaaagagggacgctacactgtcctggcagaaaacaaaagtgacgagaaaaaaaaatcaggagtcagctctgacaatgaagatgatgatgatgaagaagatgggaattaccttcatccctctctctttgcctccaagaagtgtaaccgccttgaagagctgatgaagcccttgaaggtagtggacccagatcatcccctcgcagcacttgttcgtaaggcacaggctgacagttccactcccaccccacacaacgcagacggtgcgcctgtgcagccctcccaggtggagtacacggcagactcgaccgtggcagccatgtattacagctactacatgctaccggacggcacttactgcctggcgccgccccctcccggaatcgacgtgactacttactacagcacccttcctgctggcgtgaccgtgtctaactcccctggagtgacgaccaccgccccaccacctcctgggaccacaccactaccgcccccaaccacagcagagactagcagcggggccacctccacaaccaccaccacaagtgcacttgcccccgtggccgccatcatccccccgccccccgacgtccagcccgtgattgacaagctggccgagtatgtcgccaggaacggcctgaagttcgagaccagtgttcgtgccaagaatgatcaaagatttgagttcctgcagccgtggcaccagtataatgcttattatgagtttaagaagcagttcttcctccagaaagaagggggcgatagcatgcaggctgtgtctgcaccagaagaggctcccacagactctgctcccgagaagccaagtgatgctggggaggatggcgcgcctgaagacgcagccgaggtgggagcacgggcaggctcaggcgggaagaaggaggcatcgtccagtaagaccgtcccggacgggaagctggtgaaagcttcctttgctccaataagctttgcaatcaaggccaaagaaaatgatctgcttcccctggaaaaaaatcgtaagaagagaaagaaaagaaaaagaaaaagcacaaaaaaa

SEQ ID NO: 334648 - DNA, 1644 bp, Artificial Sequence
  derived and/or modified sequence
atgggcgatcacaaaattctcattgataggtacgatggacgcggacacctgcatgatctgtcagaatatgatgccgagtactcaacgtggaaccgcgattatcagctctctgaagaagaagcacggatagaggctttgtgtgatgaggagaggtatctggcccttcacacagaccttcttgaggaagaggctagacaggaggaagagtataagagactgagcgaggctctcgctgaagatggaagctataacgccgtgggcttcacctacggcagcgactactacgaccccagcgagccaacagaggaagaggagccctccaagcagagagaaaaaaacgaggcggagaatttagaggagaacgaggaaccattcgtggcccctctcgggctgagcgtaccgtccgacgttgagctgcccccaactgccaagatgcatgctatcattgagaggactgcgtcctttgtgtgccgccaaggcgctcaatttgagataatgctcaaggccaagcaagccagaaacagtcagttcgactttttacgctttgaccattatctgaacccctactacaaattcattcagaaggcgatgaaggagggcaggtataccgtgttagctgaaaacaaaagcgatgagaagaaaaagtcaggagtaagctctgataacgaagacgatgacgatgaagaagacgggaattatctacacccctcactcttcgctagcaagaagtgcaataggctcgaggaactgatgaagcctttgaaggtggtggaccccgaccaccctctggcagctctggtgcggaaggcacaggcggacagcagtaccccaacacctcacaacgccgacggtgcacccgtgcagccatcccaggttgagtacaccgccgacagtaccgtcgccgctatgtactactcctactacatgctgccagatggaacatactgcctagctccccctcctcccggtattgatgtgacgacatattacagtaccctgcccgctggagttactgtcagcaatagcccaggggtgacgactactgccccaccaccgccagggacaacccccctgccccctcctaccacagccgaaacttcctcaggtgccacaagcacaactacgacaacttccgccctagccccagtggcagcaatcatcccgcctcccccagatgtacagcctgtgattgataaactggcagagtatgttgccagaaacggcctcaagtttgagacttctgtacgcgctaagaacgatcagaggttcgagttcctacagccgtggcaccaatacaacgcttattatgagttcaagaaacagtttttcttgcagaaagagggaggcgattcgatgcaagccgtctctgccccagaagaagcacccacagacagcgctccagagaagccttccgacgcaggcgaggatggcgcacccgaggatgcagcagaggtaggcgcacgagctgggagcggtggaaagaaggaggcatcttcgtcgaaaacggtacccgatggtaagctcgtcaaagcatcctttgcccctatcagctttgctattaaggccaaagagaacgacctgctgccgctcgaaaagaaccgcaaaaagcgcaaaaaacgtaagagaaaaagcactaagaagtag

SEQ ID NO: 334649 - DNA, 1644 bp, Artificial Sequence
  derived and/or modified sequence
atgggcgaccacaagatcctgatcgacagatacgacggcagaggccacctgcacgacctgagcgagtacgacgccgagtacagcacctggaacagagactaccagctgagcgaggaggaggccagaatcgaggccctgtgcgacgaggagagatacctggccctgcacaccgacctgctggaggaggaggccagacaggaggaggagtacaagagactgagcgaggccctggccgaggacggcagctacaacgccgtgggcttcacctacggcagcgactactacgaccccagcgagcccaccgaggaggaggagcccagcaagcagagagagaagaacgaggccgagaacctggaggagaacgaggagcccttcgtggcccccctgggcctgagcgtgcccagcgacgtggagctgccccccaccgccaagatgcacgccatcatcgagagaaccgccagcttcgtgtgcagacagggcgcccagttcgagatcatgctgaaggccaagcaggccagaaacagccagttcgacttcctgagattcgaccactacctgaacccctactacaagttcatccagaaggccatgaaggagggcagatacaccgtgctggccgagaacaagagcgacgagaagaagaagagcggcgtgagcagcgacaacgaggacgacgacgacgaggaggacggcaactacctgcaccccagcctgttcgccagcaagaagtgcaacagactggaggagctgatgaagcccctgaaggtggtggaccccgaccaccccctggccgccctggtgagaaaggcccaggccgacagcagcacccccaccccccacaacgccgacggcgcccccgtgcagcccagccaggtggagtacaccgccgacagcaccgtggccgccatgtactacagctactacatgctgcccgacggcacctactgcctggccccccccccccccggcatcgacgtgaccacctactacagcaccctgcccgccggcgtgaccgtgagcaacagccccggcgtgaccaccaccgccccccccccccccggcaccacccccctgcccccccccaccaccgccgagaccagcagcggcgccaccagcaccaccaccaccaccagcgccctggcccccgtggccgccatcatcccccccccccccgacgtgcagcccgtgatcgacaagctggccgagtacgtggccagaaacggcctgaagttcgagaccagcgtgagagccaagaacgaccagagattcgagttcctgcagccctggcaccagtacaacgcctactacgagttcaagaagcagttcttcctgcagaaggagggcggcgacagcatgcaggccgtgagcgcccccgaggaggcccccaccgacagcgcccccgagaagcccagcgacgccggcgaggacggcgcccccgaggacgccgccgaggtgggcgccagagccggcagcggcggcaagaaggaggccagcagcagcaagaccgtgcccgacggcaagctggtgaaggccagcttcgcccccatcagcttcgccatcaaggccaaggagaacgacctgctgcccctggagaagaacagaaagaagagaaagaagagaaagagaaagagcaccaagaagtag

SEQ ID NO: 334650 - DNA, 186 bp, Artificial Sequence
  derived and/or modified sequence
atgtcagagcctccggtgtactgtaacctagtagatttaagacgatgtcccaggtcccctccaccgggcccagcctgcccactcctgcagcgcctggatgcctgggagcagcacctggatcccaattcagggcggtgtttttacatcaattccttgaccggctgtaagagctggaagcctccctag

SEQ ID NO: 334651 - DNA, 396 bp, Artificial Sequence
  derived and/or modified sequence
atgtcagagcctccagtctactgcaacttggtggacctgcgccgctgtccccggtcccccccacccggtccggcctgtcctcttttacaaagactggacgcgtgggagcaacatttggatccgaactcgggacggtgtttttacattaattcccttaccgggtgtaaaagttggaagcctccacggcgttcccgaagcgagacgaatcctgggagcatggaaggcacccagactctaaagcggaacaatgatgtgttgcagccccaagcaaagggattcagatctgatactgggacgcccgagcccctcgacccgcaaggatcgctgtccctgagtcagcgcacctcccagctggaccccccagctctgcaggcccctagaccccttccacagtag

SEQ ID NO: 334652 - DNA, 186 bp, Artificial Sequence
  derived and/or modified sequence
atgtctgagccccctgtgtactgcaacctggtggacctgcggcgctgccccaggagccccccacctggccctgcctgccccctgctgcagaggctggatgcctgggagcagcacctggaccccaacagcggccgctgcttctacatcaacagcctgaccggctgcaagtcctggaagccaccctag

SEQ ID NO: 334653 - DNA, 396 bp, Artificial Sequence
  derived and/or modified sequence
atgtctgagccccctgtgtactgcaacctggtggacctgcggcgctgccccaggagccccccacctggccctgcctgccccctgctgcagaggctggatgcctgggagcagcacctggaccccaacagcggccgctgcttctacatcaacagcctgaccggctgcaagtcctggaagccaccccggcgcagccgctctgagaccaaccctggctccatggagggcacccagaccctgaagagaaataatgatgtgctgcagccccaggccaagggcttcagaagtgacaccggcaccccagagcccctggacccccagggcagcctgagcctgagccagaggaccagccagctggaccccccagccctgcaggccccccggcccctgccccagtag

SEQ ID NO: 334654 - DNA, 159 bp, Artificial Sequence
  derived and/or modified sequence
atggccaacgagcacaccctgatccaccccgccagcatcgaggacccgctcgaggctaggccgatgtccgacgaggatcccgaagatgaggacgccttaccggctcggtggaaaaaggaaatgggccgaaaacgtaagcgcacgattgcaacattgtag

SEQ ID NO: 334655 - DNA, 186 bp, Artificial Sequence
  derived and/or modified sequence
atgagcgagccccccgtgtactgcaacctggtggacctgcggcggtgcccccgctcccccccacctggtcccgcatgccctttattacaacgacttgacgcatgggagcagcatttagatccgaacagtggcaggtgcttttacatcaattccctcacaggctgtaagtcctggaaacccccctag

SEQ ID NO: 334656 - DNA, 396 bp, Artificial Sequence
  derived and/or modified sequence
atgagcgagccccccgtgtactgcaacctggtggacctgcggcggtgtccgcgctcacctcctccaggaccagcctgcccactgctgcagaggcttgacgcctgggaacagcatctcgatccgaactccggaaggtgtttttatatcaattctctgacaggatgtaaatcttggaaacctcctcggaggtctcgctctgagaccaaccctgggagtatggagggcactcagaccttaaaaagaaacaacgacgtgctgcagcctcaagccaagggcttccgtagcgataccggaactccagaacccctggatcctcaaggcagcttaagtctgtcccaacggacatcccagctggaccccccagctttacaggccccccggccactcccacagtag

SEQ ID NO: 334657 - DNA, 186 bp, Artificial Sequence
  derived and/or modified sequence
atgagcgagcctccagtttactgcaatttagtcgatctgaggaggtgccccaggtctcctccgccaggtcctgcttgcccgctgttacagcgccttgacgcatgggagcagcatcttgacccgaattccggaaggtgcttttacataaattctctgactgggtgcaagtcctggaaacccccttag

SEQ ID NO: 334658 - DNA, 396 bp, Artificial Sequence
  derived and/or modified sequence
atgagtgagccacctgtgtattgtaatctcgtggacttgagaagatgtcccaggtctccccctcccggacccgcttgtccattgctgcagaggctcgacgcatgggagcagcacctcgaccccaattcagggagatgcttttatataaattcactcaccggttgtaagtcttggaagccacctagacgtagcaggtcagagactaatcccggatctatggagggcactcagacactcaaacggaacaatgacgttttacagcctcaggccaagggcttccggtcagatactgggacccctgagcccctcgatccccaggggtccttatctttatcccaacggactagccagctcgatcctccagccctgcaggcccctaggccacttccacaatag

SEQ ID NO: 334659 - DNA, 563 bp, Artificial Sequence
  derived and/or modified sequence
gttctgcttgcctgataggctacagcaggtctcctctagagatgtgacttgcccagcccttccctctctttcttaaccgtgggtggaaaggggctcctcttcccttctgtagacccttctctgtcttcttttaccttgcaggatgtgagggtggggcacccccttcaacattccccccaccccacaaaaagcctgttcccctttcctgtggccctgaggtgggggtggggtgggggaggcgggaagttggcaacaggaagtgaggagaagagcaaagaaaactgtgagagagagaatttttaaaaagcagctggggcctgaggtttctcccccagtaccctgggtcacctcagcccagagctggcggcccccagcccctcatgtcagagccccctgtgtactgtaacctggtggaccttcgccgctgtcctcggtccccacccccaggccctgcatgccccctgctgcagaggctggatgcctgggagcagcacctggaccccaactctggacgctgcttctacataaattcactgactggctgcaagtcctggaagcccccg

SEQ ID NO: 334660 - DNA, 624 bp, Artificial Sequence
  derived and/or modified sequence
ctttccaggaaggaccaagcggaagatccctctcccaggaagacttgccgtcagaagccagtgccagcacagtgagtcacagctcttctgagctgggccctgttctaggcacaggacagacagcacctctgtcttcaggggactcccctggggatgacaaacacaaaaacaaataaataagataacgcttggtactactgataagtctaaaggcaggcccccagcccctcatgtcagagccccctgtgtactgtaacctggtggaccttcgccgctgtcctcggtccccacccccaggccctgcatgccccctgctgcagaggctggatgcctgggagcagcacctggaccccaactctggacgctgcttctacataaattcactgactggctgcaagtcctggaagcccccgcgccgcagtcgcagcgagacgaaccctggctccatggaggggacacagaccctgaagaggaacaatgatgtcctgcaacctcaggcaaagggcttcagatctgacacagggaccccagaaccgcttgacccacagggttcactcagcctcagccaacgcacctcgcagcttgaccctccagccttgcaggcccctcgacctctgccgcagc

SEQ ID NO: 334661 - DNA, 186 bp, Artificial Sequence
  derived and/or modified sequence
atgagcgagccccccgtgtactgcaacctggtggacctgagaagatgccccagaagccccccccccggccccgcctgccccctgctgcagagactggacgcctgggagcagcacctggaccccaacagcggcagatgcttctacatcaacagcctgaccggctgcaagagctggaagcccccctag

SEQ ID NO: 334662 - DNA, 396 bp, Artificial Sequence
  derived and/or modified sequence
atgagcgagccccccgtgtactgcaacctggtggacctgagaagatgccccagaagccccccccccggccccgcctgccccctgctgcagagactggacgcctgggagcagcacctggaccccaacagcggcagatgcttctacatcaacagcctgaccggctgcaagagctggaagccccccagaagaagcagaagcgagaccaaccccggcagcatggagggcacccagaccctgaagagaaacaacgacgtgctgcagccccaggccaagggcttcagaagcgacaccggcacccccgagcccctggacccccagggcagcctgagcctgagccagagaaccagccagctggacccccccgccctgcaggcccccagacccctgccccagtag

SEQ ID NO: 334663 - protein, 483 aa, Artificial Sequence
  derived and/or modified sequence
MYSDEESSRLLGPDERLLEKDDSVIVEDSLSEPLGYCDGSGPEPHSPGGIRLPNGKLKCDVCGMVCIGPNVLMVHKRSHTGERPFHCNQCGASFTQKGNLLRHIKLHSGEKPFKCPFCNYACRRRDALTGHLRTHSVSSPTVGKPYKCNYCGRSYKQQSTLEEHKERCHNYLQSLSTEAQALAGQPGDEIRDLEMVPDSMLHSSSERPTFIDRLANSLTKRKRSTPQKFVGEKQMRFSLSDLPYDVNSGGYEKDVELVAHHSLEPGFGSSLAFVGAEHLRPLRLPPTNCISELTPVISSVYTQMQPLPGRLELPGSREAGEGPEDLADGGPLLYRPRGPLTDPGASPSNGCQDSTDTESNHEDRVAGVVSLPQGPPPQPPPTIVVGRHSPAYAKEDPKPQEGLLRGTPGPSKEVLRVVGESGEPVKAFKCEHCRILFLDHVMFTIHMGCHGFRDPFECNICGYHSQDRYEFSSHIVRGEHKVG

SEQ ID NO: 334664 - DNA, 420 bp, Artificial Sequence
  derived and/or modified sequence
tggccattcctaggatgacctgggaatttatcccctctgcactgctccccaagcacttggataatgaagctgagctgtcttcaactgtattatatgtagacagaaggtcaccatctacagcctggtgaaaaatgagtcagacctttccactgtaaagacaaacacatgagctgagctaagaatctctttaaaatggacatagaagactgcaatggccgctcctatgtgtctggaccaatgaaggaattattggcatgcactaaaggagatagcaagatgggtcagacacacatatgagagtcattggcaacacccgggtaatgtaaggaatccacgcttcctggaaggtgagtggctgggctcacccctgcctgccactgagacgcagacatgcatacaccacccgcactccctcgccgt

SEQ ID NO: 334665 - DNA, 249 bp, Artificial Sequence
  derived and/or modified sequence
atgcagtgcctttactttattctgattctgaagggctatttccaccagcagcaccatactctgcttattactattgcgctctgtttcttacagcaacagcaagagaccaatctactggcaaacctcacgacgaatgatgcaagagacaactcaaaagattttcagaacagcaaagtgggagctgcggcaacaagccgggacgaaggagagacacagaaatgtatccagaagcccctccacgagaaatag

SEQ ID NO: 334666 - DNA, 4731 bp, Artificial Sequence
  derived and/or modified sequence
gcggagacggggaaggggtcgccgtggctgccggtcctcgagttgggggctgccgcggacactgctaggcagacggcgagtaccgagcgcgggtggccgcggtgtccgtgggccacgctcagctgcggtcagaggcgacatgagtgccgcggggctgctggccccggccccggcccaggctggagcgccgccggcccccgagtactaccccgaggaggatgaagagctggagagcgccgaggacgacgagcgcagctgtcggggccgcgagtcggacgaagacactgaggatgctagtgaaactgacctggcaaagcatgatgaagaagactatgtagaaatgaaggaacagatgtatcaggacaaactggcttctctcaagaggcagttgcaacaactgcaagaaggtacattacaggaatatcagaagagaatgaaaaaactagatcagcagtacaaagagaggatacggaatgcagacacactgttactgcaagctcagactgaacaagtggaacgaaattacattaaagaaaagaaggcagcagtgaaagaatttgaagacaagaaggttgagctgaaagagaacctgattgctgagctagaagaaaagaagaaaatgattgaaaatgaaaagctgacaatggaactgactggagattctatggaggtgaaacctatcatgaccagaaagttgcggaggcgaccaaatgatcccgtccccatcccagacaagaggaggaaacctgctccagcccagctaaactatttgttaacagatgaacagatcatggaggatctgagaacattaaataagcttaagtcacccaagagaccagcatctccatcctctcctgagcacttgcctgcaacacccgcggaatctccagcccagaggttcgaagctcggatagaagatggcaaactgtactatgacaaaagatggtaccacaagagccaggccatctatctggagtcaaaggacaaccagaaactgagctgcgtgatcagttctgtaggagccaatgagatctgggtgaggaagacaagtgacagcaccaagatgaggatctacctgggccagcttcagcgcgggctcttcgtgatccgccggcgctcagctgcttgactttctacagtgctcttctcttgaccctttttctggagtgggttttatttttgttttgtttcgttttctccttaatagaaaaatgttaacttactgggaatagctactcagccttggaaatggagagcactgcagtgaattctttagggcacttttgtggccggatgcttccaactttgtcagtcttttctgcctcaacttcttccagacatcagtcaccatgagactgttttactttcaggcgtattggggggtttgatttactttccttttatttctttattttttgcttatacttgtttttgaaaacctcctctgagtttgaagggacagctatttttattgattatctttaagtctctctaccatggagaagagcaggaagggatacactctccagtgcattttcatgttttgaatctgattagtggatcacgtagctactttccctgtcgcgtccaattcactatttgcccagaagcttggggcagaggtcctagcaggagatgatgaattctcgtggctctcggccttctcagagaaataaatgctttgtgtaacatctgtgcacaccatccattccgctcgctgagcgatggaaaagcttgcctggaagactatgtgcactgaagtaaatggggttgggggaggggacatttcatatttataatgtgctgaaggtaccatattttaaatgttatttaatgcaggtgatttattcaaacatttgttctagcttaagctggaataagcagtggtcatttcagaagttttcatttgtaattccttcctctcccttgttcccaagtaggtagtagtaagtatgtgccacaggctgattatctgggtaatcttttacgggtgggaggtgagattgatagtgcaataatcagtgatctatagaccctcatgcacgattcaagtttcactcttgtggctgatgccattattgcacattggccattccaaacctgtggagaactttgttgtcaggccctgagcgctcacagcttcatttggcccaggttgaagacaaggaaagctctgctgtggctgcctctggactgacaccctccctaatgagtcctgatgaaacagcctttcctacatccttccctcactcccatgattggagaaatgattcattgggtgatgagtgttggggttttctatactcatgttgccatcttgagatgttcaaaaaatttggggttagagcaactgttagcgtctctatgagcaatcagtagaacttacacatcctaggaaatctttctttgtaagtaattcttttggtctcaagtgattctcttcatgttgtctcttgatgtacatacccccaagcaagttggggggactgtgatgacaattaaatcaccttctctgaagttctggctctgcagagaccaaaccttactgacttgtacagacttgtacaagtaaagacttatacagatagatttttgttttaacttacaatccgttttttcctcttttttttttttttttctggtgttggagtcttatttagaaaacaggataaatgacgctgttatcaaaagttgcctggggttctgtatttcttctctgccctccaatccccgactgctatgatgtttactacagtgaacccagcccatggtaaacacaggcttcacctgttcttgtttgttagccttgactgtgaggcaggacttccctcgcttgaactgttacacatacgatgtgtgtgtcacatcacatattgtgcagctgttggttttcatgtagtgccctgcgatggaaattagatatatttcatgtatttttccattgaaggtggagtttttcaatgatcatgtgttttgtcctcctaaacagtataccaaagtttgtttttatagttgaggattgtattgataaccactggggttccgcattgaagcaggaacaaattgcctctttttctggccttctctgtgggacctctgcttttgtgaagcaactatttatttgaagaccagggtatgggcacttttgccttctctcctctctgacttttgagggtattgagggcgcccttagtcatagtctcgactccgccattgccttctcctcggcgtcctcacaactcttaattgggcctagtgaaaatgggggcaggtgagaagtccattttgagaatcagcatagtaaattacatttctaatcccagaggacttaatattttcttttgtcaccccagaggtgaaaaatcagcagttgaagcctgacaggcctcagtggtgaccaggaacagaagcagccttcctgttagtagatgggggtacttctgtggtgggcagaagccttactaaaggggaagacagactttgaagtttctagacgagaaggaggctagcttctagcctgggtggccattattccaaaaggtcattgtttctcactagaccccagggcaccagatgaatttccaagtttaaactctttcctgcaggtgattactttgaaaaaggttggtccagaccattttgatcaagaacctgtatatgtgttgtgttagaggcatctgcctcaagtctatgtacagtgtttgctgcgggtgtgttccaatattcattttacctctgcttgggggttttgtgtgttcccctccccccatgccctgcctacccccttttccctgaaccacgtccttttgaataatttccagatggatttctgtagccataccaaagccagggtgttttcattcatgcggatactagtatttatagatgtctgactacctaacttaatttttgtttttgaacttctaattggggccagtgtaaggtcgatcccagaggctgatctgcaaatcaagctacatgtatttgtgtataagaccctgtgttcaggactgggtgacttttctaagaaatatggggtttagaatggggttgactgtattttttaacctaattctggagagaagattgtattttttacagttttttgggtttggcttccttctcacatttctttagctttgaatttttactaaataaatttcctcctgattaattttttttttctcatctgggaatttgaaatctcggtgcttactgttacaccaatttgtccaaagagttgaaatcactttaatgccagaacatggtaaatttgcagccatttcaagcaggtgatggtctttttttataacatcgttaacgggtaccattaaatattctgagaggtgaatgtaaaatataaaaggtataggtttttttttttttttaaagaaaacaataaactttcaaagagaaaaccagcatgaagtctgtattgtatccattgacttgataagtgatagaaatttattttaggtttttgatccattgcttatggggaaaggaagttagggcagaggaagggatattctagacatttaattcttagtgaagactaagatacagaatgatgtcaggctaatactcagttttgtaaagagcaatctggggtgttgacccttaaatgtttgtgcactcttcttgttgcagataaaagtcattaaaaatcaagtgaatagaatggatcttgggtggaaaaacaatcttgaaataaacttgtgattgaggata

SEQ ID NO: 334667 - DNA, 4897 bp, Artificial Sequence
  derived and/or modified sequence
ggattttaagacggcgatgaaagggctgaggttgtggcgacgggggcgtccagcggcatctccactcccccaaggatggcggaatcaggccgttgtcgggcagctctcgacccggaagtcgctcgcggcgcgaggcccccgttgccgagcgcgggcgcggggggcggagctcggcggagacggggaaggggtcgccgtggctgccggtcctcgagttgggggctgccgcggacactgctaggcagacggcgagtaccgagcgcgggtggccgcggtgtccgtgggccacgctcagctgcggtcagaggcgacatgagtgccgcggggctgctggccccggccccggcccaggctggagcgccgccggcccccgagtactaccccgaggaggatgaagagctggagagcgccgaggacgacgagcgcagctgtcggggccgcgagtcggacgaagacactgaggatgctagtgaaactgacctggcaaagcatgatgaagaagactatgtagaaatgaaggaacagatgtatcaggacaaactggcttctctcaagaggcagttgcaacaactgcaagaaggtacattacaggaatatcagaagagaatgaaaaaactagatcagcagtacaaagagaggatacggaatgcagaactcttcctccagctggaaactgaacaagtggaacgaaattacattaaagaaaagaaggcagcagtgaaagaatttgaagacaagaaggttgagctgaaagagaacctgattgctgagctagaagaaaagaagaaaatgattgaaaatgaaaagctgacaatggaactgactggagattctatggaggtgaaacctatcatgaccagaaagttgcggaggcgaccaaatgatcccgtccccatcccagacaagaggaggaaacctgctccagcccagctaaactatttgttaacagatgaacagatcatggaggatctgagaacattaaataagcttaagtcacccaagagaccagcatctccatcctctcctgagcacttgcctgcaacacccgcggaatctccagcccagaggttcgaagctcggatagaagatggcaaactgtactatgacaaaagatggtaccacaagagccaggccatctatctggagtcaaaggacaaccagaaactgagctgcgtgatcagttctgtaggagccaatgagatctgggtgaggaagacaagtgacagcaccaagatgaggatctacctgggccagcttcagcgcgggctcttcgtgatccgccggcgctcagctgcttgactttctacagtgctcttctcttgaccctttttctggagtgggttttatttttgttttgtttcgttttctccttaatagaaaaatgttaacttactgggaatagctactcagccttggaaatggagagcactgcagtgaattctttagggcacttttgtggccggatgcttccaactttgtcagtcttttctgcctcaacttcttccagacatcagtcaccatgagactgttttactttcaggcgtattggggggtttgatttactttccttttatttctttattttttgcttatacttgtttttgaaaacctcctctgagtttgaagggacagctatttttattgattatctttaagtctctctaccatggagaagagcaggaagggatacactctccagtgcattttcatgttttgaatctgattagtggatcacgtagctactttccctgtcgcgtccaattcactatttgcccagaagcttggggcagaggtcctagcaggagatgatgaattctcgtggctctcggccttctcagagaaataaatgctttgtgtaacatctgtgcacaccatccattccgctcgctgagcgatggaaaagcttgcctggaagactatgtgcactgaagtaaatggggttgggggaggggacatttcatatttataatgtgctgaaggtaccatattttaaatgttatttaatgcaggtgatttattcaaacatttgttctagcttaagctggaataagcagtggtcatttcagaagttttcatttgtaattccttcctctcccttgttcccaagtaggtagtagtaagtatgtgccacaggctgattatctgggtaatcttttacgggtgggaggtgagattgatagtgcaataatcagtgatctatagaccctcatgcacgattcaagtttcactcttgtggctgatgccattattgcacattggccattccaaacctgtggagaactttgttgtcaggccctgagcgctcacagcttcatttggcccaggttgaagacaaggaaagctctgctgtggctgcctctggactgacaccctccctaatgagtcctgatgaaacagcctttcctacatccttccctcactcccatgattggagaaatgattcattgggtgatgagtgttggggttttctatactcatgttgccatcttgagatgttcaaaaaatttggggttagagcaactgttagcgtctctatgagcaatcagtagaacttacacatcctaggaaatctttctttgtaagtaattcttttggtctcaagtgattctcttcatgttgtctcttgatgtacatacccccaagcaagttggggggactgtgatgacaattaaatcaccttctctgaagttctggctctgcagagaccaaaccttactgacttgtacagacttgtacaagtaaagacttatacagatagatttttgttttaacttacaatccgttttttcctcttttttttttttttttctggtgttggagtcttatttagaaaacaggataaatgacgctgttatcaaaagttgcctggggttctgtatttcttctctgccctccaatccccgactgctatgatgtttactacagtgaacccagcccatggtaaacacaggcttcacctgttcttgtttgttagccttgactgtgaggcaggacttccctcgcttgaactgttacacatacgatgtgtgtgtcacatcacatattgtgcagctgttggttttcatgtagtgccctgcgatggaaattagatatatttcatgtatttttccattgaaggtggagtttttcaatgatcatgtgttttgtcctcctaaacagtataccaaagtttgtttttatagttgaggattgtattgataaccactggggttccgcattgaagcaggaacaaattgcctctttttctggccttctctgtgggacctctgcttttgtgaagcaactatttatttgaagaccagggtatgggcacttttgccttctctcctctctgacttttgagggtattgagggcgcccttagtcatagtctcgactccgccattgccttctcctcggcgtcctcacaactcttaattgggcctagtgaaaatgggggcaggtgagaagtccattttgagaatcagcatagtaaattacatttctaatcccagaggacttaatattttcttttgtcaccccagaggtgaaaaatcagcagttgaagcctgacaggcctcagtggtgaccaggaacagaagcagccttcctgttagtagatgggggtacttctgtggtgggcagaagccttactaaaggggaagacagactttgaagtttctagacgagaaggaggctagcttctagcctgggtggccattattccaaaaggtcattgtttctcactagaccccagggcaccagatgaatttccaagtttaaactctttcctgcaggtgattactttgaaaaaggttggtccagaccattttgatcaagaacctgtatatgtgttgtgttagaggcatctgcctcaagtctatgtacagtgtttgctgcgggtgtgttccaatattcattttacctctgcttgggggttttgtgtgttcccctccccccatgccctgcctacccccttttccctgaaccacgtccttttgaataatttccagatggatttctgtagccataccaaagccagggtgttttcattcatgcggatactagtatttatagatgtctgactacctaacttaatttttgtttttgaacttctaattggggccagtgtaaggtcgatcccagaggctgatctgcaaatcaagctacatgtatttgtgtataagaccctgtgttcaggactgggtgacttttctaagaaatatggggtttagaatggggttgactgtattttttaacctaattctggagagaagattgtattttttacagttttttgggtttggcttccttctcacatttctttagctttgaatttttactaaataaatttcctcctgattaattttttttttctcatctgggaatttgaaatctcggtgcttactgttacaccaatttgtccaaagagttgaaatcactttaatgccagaacatggtaaatttgcagccatttcaagcaggtgatggtctttttttataacatcgttaacgggtaccattaaatattctgagaggtgaatgtaaaatataaaaggtataggtttttttttttttttaaagaaaacaataaactttcaaagagaaaaccagcatgaagtctgtattgtatccattgacttgataagtgatagaaatttattttaggtttttgatccattgcttatggggaaaggaagttagggcagaggaagggatattctagacatttaattcttagtgaagactaagatacagaatgatgtcaggctaatactcagttttgtaaagagcaatctggggtgttgacccttaaatgtttgtgcactcttcttgttgcagataaaagtcattaaaaatcaagtgaatagaatggatcttgggtggaaaaacaatcttgaaataaacttgtgattgag

SEQ ID NO: 334668 - protein, 408 aa, Artificial Sequence
  derived and/or modified sequence
MGEQRWWMKLSCCASAGPWKPLTWILHSGESMSSPTPGPQPTWPSTQPFCNLTTGSWGWTCPMGAISPTATCLTSSGYQPRPSSSSLCPISSTALAVCVSVQPKTGLIDYNQLALTARLFRPRLIIAGTSAYARLIDYARMREVCDEVKAHLLADMAHISGLVAAKVIPSPFKHADIVTTTTHKTLRGARSGLIFYRKGVKAVDPKTGREIPYTFEDRINFAVFPSLQGGPHNHAIAAVAVALKQACTPMFREYSLQVLKNARAMADALLERGYSLVSGGTDNHLVLVDLRPKGLDGARAERVLELVSITANKNTCPGDRSAITPGGLRLGAPALTSRQFREDDFRRVVDFIDEGVNIGLEVKSKTAKLQDFKSFLLKDSETSQRLANLRQRVEQFARAFPMPGFDEH

SEQ ID NO: 334669 - DNA, 1227 bp, Artificial Sequence
  derived and/or modified sequence
atgggagaacagaggtggtggatgaagctgtcctgctgcgcaagtgctggtccttggaaacctctcacctggattctgcactccggcgagagtatgtcttcacctacacctgggccacaacccacctggccatccactcagcctttttgtaatttgacaaccggtagctggggctggacgtgcccgatgggtgctatctcacccaccgccacatgcctgactagctcaggttaccagccgagaccttcatccagctccttgtgccccattagcagtaccgcactcgcggtgtgcgtgtcagtccagccaaagactggtttaatcgactataaccagttagctctaacagcccgtttgttcaggcccagactgattatcgcaggcactagtgcctacgcacgtctaatcgactatgctcggatgcgagaggtgtgcgacgaagtcaaggcacacttactggcggacatggcacacatcagtggcctcgtcgcggcaaaagttattccatcgccttttaagcatgccgatatagtgacgaccaccacacacaaaactctcaggggagctcggagcggattaatcttttaccgcaaaggcgtcaaagccgtagatccaaagaccgggagagaaattccttacacatttgaggacagaatcaatttcgctgtgttcccttctctccaaggaggcccccataaccatgccattgcggccgttgctgtggcgctgaaacaggcttgtactcctatgtttagggagtattcacttcaggtattgaaaaacgctagggccatggcagacgcactgctcgagcgcggatatagtctggtctcgggcgggactgataaccatcttgtactggtggatctccgccctaaggggttggacggggcccgagctgaaagagtgctcgaactggtgagcataacggcaaacaaaaatacttgtccaggcgaccgatccgcaataacgccaggtgggctgagactaggggcacccgcactgacatcacgccaattccgggaggacgatttccgacgggtggtggatttcatcgatgaaggagtgaatatcggcctagaggtgaagtcgaagactgcaaagctacaggactttaagagctttctgctgaaggactctgaaacatcacagcggctggccaacctccgccaaagagtggagcaatttgccagggcctttccaatgccagggtttgatgaacactag

SEQ ID NO: 334670 - DNA, 1227 bp, Artificial Sequence
  derived and/or modified sequence
atgggagagcagcgctggtggatgaagctgagctgctgtgccagcgctggcccctggaagcccctgacctggatcctgcacagcggggagagcatgagcagccccaccccaggcccccagcccacctggcccagcacccagcccttctgcaacctgaccaccggctcctggggctggacctgccccatgggcgccatcagccccacagccacctgcctgaccagcagcggctaccagccccggcccagcagcagcagcctgtgccccatcagcagcacagccctggccgtgtgtgtgtctgtgcagcccaagacaggcctgattgactacaaccagctggccctgacagcccggctcttccggcccaggctcatcatcgccggcaccagcgcctatgcccggctgattgattatgccaggatgagggaggtgtgtgatgaggtgaaggcccacctgctggccgacatggcccacatcagcggcctggtggccgccaaggtgatccccagccccttcaagcatgctgacatcgtgaccaccaccacccacaagaccctgcggggggcccggagcggcctcatcttctacaggaagggcgtgaaggctgtggaccccaagacaggccgggagatcccctacacctttgaggaccgcatcaactttgctgtgttccccagcctgcagggcggcccccacaaccacgccatcgctgctgtggccgtggccctgaagcaggcctgcacccccatgttccgggagtacagcctgcaggtgctgaagaatgcccgggccatggctgatgccctgctggagcggggctacagcctggtgtctgggggcacagacaaccacctggtgctggtggacctgcggcccaagggcctggatggagcccgggcagagcgggtgctggagctggtgtccatcacagccaacaagaacacctgccctggggacagaagtgccatcaccccaggcggcctgcggctgggcgccccagccctgaccagccggcagttccgggaggatgacttccggcgggtggtggacttcattgatgaaggagtgaacatcggcctggaggtgaagagcaagacagccaagctgcaggacttcaagagcttcctgctgaaggacagcgagaccagccagaggctggccaacctgcggcagagggtggagcagtttgcccgggccttccccatgcctggctttgatgagcactag

SEQ ID NO: 334671 - DNA, 1227 bp, Artificial Sequence
  derived and/or modified sequence
atgggcgagcagcggtggtggatgaagctgagctgctgcgccagcgccggcccttggaaaccattgacatggattctccattctggtgaatctatgtcaagcccaactcctggaccccagccgacttggccatctacccagccattttgcaaccttaccaccggatcatgggggtggacatgccctatgggagccatctcaccaaccgctacctgcctgacttcaagcggctaccagccgcgcccctcttcatccagcctgtgcccaatatcttctacagcgctggctgtgtgtgtgtcagtgcagcctaaaacgggcttgattgactacaaccagctggcgctgacagccaggttatttcggcctagactgattatcgcagggacatctgcgtatgcccggctgattgactacgctagaatgagagaagtctgcgacgaggtcaaagcccacctgttggccgatatggcgcacatatccggtctggtcgctgcaaaagtcattcctagccccttcaagcatgcagacattgtgacaaccactacacataagaccctgcggggtgcccgatctggattgatcttctatcgaaaaggcgttaaagcggtcgaccctaaaaccggcagggagattccttatacatttgaggacaggatcaatttcgccgtattcccatccttacagggcggccctcacaaccacgccatcgccgcagttgcggtcgccctgaaacaggcttgcacacccatgtttcgtgaatattccctacaggtactgaaaaacgctcgagcaatggctgatgccctccttgagaggggatatagtctggtatcaggaggtactgataaccacctggtgctcgttgatctgagaccgaaaggcctggacggcgccagggcagagagagttctggagttggtgagcataacagctaataagaatacatgccctggggacaggtctgccatcacacctggtggcttaagacttggtgcaccggccctgacgagcagacagtttagggaggacgacttcaggcgagtggtggacttcatcgacgagggggtaaacatcggactggaggtgaaatctaaaaccgcaaaactgcaagacttcaagtcttttcttttaaaggattctgaaacatcccagcggctcgcaaatcttaggcagagagttgagcaattcgcacgcgcgtttccaatgcctggttttgacgagcactag

SEQ ID NO: 334672 - DNA, 1227 bp, Artificial Sequence
  derived and/or modified sequence
atgggtgagcaaagatggtggatgaagctgtcatgttgtgcaagtgctggtccctggaagccactaacctggattttgcatagcggcgagtctatgtccagcccgacgcccggaccccaacctacctggccttctacgcagcctttttgcaacttgaccactggaagctggggctggacttgccctatgggagcaatctcacctactgccacctgtttgacaagctccgggtaccaacctagaccctcaagttcctcactgtgccctatcagttctacggctctggctgtttgtgtgagtgtgcagcccaagacaggcttgatcgactataatcagctggctttgacagctagactttttcgcccacgcctgataatagctggcacctccgcatatgctcgcttgattgattatgctcgaatgcgtgaggtttgtgacgaggtgaaggctcacctgttagctgacatggcccacatatcaggtctggtcgctgctaaggtgattcccagtcccttcaagcacgctgatattgtgactaccacaacacacaagacactcagaggtgccaggagcggtctgatattctataggaaaggagtgaaagccgtggaccccaaaactggcagagagattccgtatacctttgaggaccggatcaactttgccgtgttccctagtctgcagggtggcccacacaaccacgccatcgctgcggttgccgtcgccctgaagcaggcttgcacccctatgttccgggaatatagtcttcaggtactcaagaacgctagggccatggcagacgccctgctcgaacggggatactccctcgtgtctgggggaaccgacaaccacctggttctggtcgacctcaggcctaaagggttggatggagcgagagccgagcgggtgctggagctcgtcagtataaccgctaacaaaaacacctgtcccggagacaggagcgccatcacccccggaggattgagactgggggcacctgctctaacatcacgccagttccgagaggacgacttcagacgggtagttgactttatagacgagggggttaatatcggtttggaggtcaagtctaaaaccgctaaactgcaggacttcaagtcattcttactgaaggacagtgaaacaagccaacgtcttgccaacttgcgacaaagggtggagcaattcgccagggcgtttcccatgcccggtttcgacgagcactag

SEQ ID NO: 334673 - DNA, 1885 bp, Artificial Sequence
  derived and/or modified sequence
acaatctgtggcctcagcccttgccaactctgcctcttcccccgctgactgggcctctgcagagatgtgggcagctggtcaggatggccattcgggctcagcacagcaacgcagcccagactcagactggggaagcaaacaggggctggacaggccaggagagcctgtcggacagtgatcctgagatgtgggagttgctgcagagggagaaggacaggcagtgtcgtggcctggagctcattgcctcagagatactatgggggagcagaggtggtggatgaaattgagctgctgtgccagcgccgggccttggaagcctttgacctggatcctgcacagtggggagtcaatgtccagccctactccgggtccccagccaacctggccgtctacacagcccttctgcaacctcacgaccggatcatggggctggacctgcccgatgggggccatctcacccacggctacatgtctgacgtcaagcggatatcagccacgtccatcttcttcgagtctatgccctataagctcaacggctttagctgtttgtgtgtctgtccagcccaaaactggcctcattgactacaaccagctggcactgactgctcgacttttccggccacggctcatcatagctggcaccagcgcctatgctcgcctcattgactacgcccgcatgagagaggtgtgtgatgaagtcaaagcacacctgctggcagacatggcccacatcagtggcctggtggctgccaaggtgattccctcgcctttcaagcacgcggacatcgtcaccaccactactcacaagactcttcgaggggccaggtcagggctcatcttctaccggaaaggggtgaaggctgtggaccccaagactggccgggagatcccttacacatttgaggaccgaatcaactttgccgtgttcccatccctgcaggggggcccccacaatcatgccattgctgcagtagctgtggccctaaagcaggcctgcacccccatgttccgggagtactccctgcaggttctgaagaatgctcgggccatggcagatgccctgctagagcgaggctactcactggtatcaggtggtactgacaaccacctggtgctggtggacctgcggcccaagggcctggatggagctcgggctgagcgggtgctagagcttgtatccatcactgccaacaagaacacctgtcctggagaccgaagtgccatcacaccgggcggcctgcggcttggggccccagccttaacttctcgacagttccgtgaggatgacttccggagagttgtggactttatagatgaaggggtcaacattggcttagaggtgaagagcaagactgccaagctccaggatttcaaatccttcctgcttaaggactcagaaacaagtcagcgtctggccaacctcaggcaacgggtggagcagtttgccagggccttccccatgcctggttttgatgagcattgaaggcacctgggaaatgaggcccacagactcaaagttactctccttccccctacctgggccagtgaaatagaaagcctttctattttttggtgcgggagggaagacctctcacttagggcaagagccaggtatagtctcccttcccagaatttgtaactgagaagatcttttctttttcctttttttggtaacaagacttagaaggagggcccaggcactttctgtttgaacccctgtcatgatcacagtgtcagagacgcgtcctctttcttggggaagttgaggagtgcccttcagagccagtagcaggcaggggtgggtaggcaccctccttcctgtttttatctaataaaatgctaacctgccctgagtttccattactgtgggtggggttcccctggg

SEQ ID NO: 334674 - DNA, 1227 bp, Artificial Sequence
  derived and/or modified sequence
atgggcgagcagagatggtggatgaagctgagctgctgcgccagcgccggcccctggaagcccctgacctggatcctgcacagcggcgagagcatgagcagccccacccccggcccccagcccacctggcccagcacccagcccttctgcaacctgaccaccggcagctggggctggacctgccccatgggcgccatcagccccaccgccacctgcctgaccagcagcggctaccagcccagacccagcagcagcagcctgtgccccatcagcagcaccgccctggccgtgtgcgtgagcgtgcagcccaagaccggcctgatcgactacaaccagctggccctgaccgccagactgttcagacccagactgatcatcgccggcaccagcgcctacgccagactgatcgactacgccagaatgagagaggtgtgcgacgaggtgaaggcccacctgctggccgacatggcccacatcagcggcctggtggccgccaaggtgatccccagccccttcaagcacgccgacatcgtgaccaccaccacccacaagaccctgagaggcgccagaagcggcctgatcttctacagaaagggcgtgaaggccgtggaccccaagaccggcagagagatcccctacaccttcgaggacagaatcaacttcgccgtgttccccagcctgcagggcggcccccacaaccacgccatcgccgccgtggccgtggccctgaagcaggcctgcacccccatgttcagagagtacagcctgcaggtgctgaagaacgccagagccatggccgacgccctgctggagagaggctacagcctggtgagcggcggcaccgacaaccacctggtgctggtggacctgagacccaagggcctggacggcgccagagccgagagagtgctggagctggtgagcatcaccgccaacaagaacacctgccccggcgacagaagcgccatcacccccggcggcctgagactgggcgcccccgccctgaccagcagacagttcagagaggacgacttcagaagagtggtggacttcatcgacgagggcgtgaacatcggcctggaggtgaagagcaagaccgccaagctgcaggacttcaagagcttcctgctgaaggacagcgagaccagccagagactggccaacctgagacagagagtggagcagttcgccagagccttccccatgcccggcttcgacgagcactag

SEQ ID NO: 334675 - protein, 668 aa, Artificial Sequence
  derived and/or modified sequence
MDLVLKRCLLHLAVIGALLAVGATKVPRNQDWLGVSRQLRTKAWNRQLYPEWTEAQRLDCWRGGQVSLKVSNDGPTLIGANASFSIALNFPGSQKVLPDGQVIWVNNTIINGDQVWGGQPVYPQETDDACIFPDGGPCPSGSWSQKRSFVYVWKTWGQYWQVLGGPVSGLSIGTGRAMLGTHTMEVTVYHRRGSRSYVPLAHSSSAFTITDQVPFSVSVSQLRALDGGNKHFLRNQPLTFALQLHDPSGYLAEADLSYTWDFGDSSGTLISRALVVTHTYLEPGPVTAQVVLQAAIPLTSCGSSPVPGTTDGHRPTAEAPNTTAGQVPTTEVVGTTPGQAPTAEPSGTTSVQVPTTEVISTAPVQMPTAESTGMTPEKVPVSEVMGTTLAEMSTPEATGMTPAEVSIVVLSGTTAAQVTTTEWVETTARELPIPEPEGPDASSIMSTESITGSLGPLLDGTATLRLVKRQVPLDCVLYRYGSFSVTLDIVQGIESAEILQAVPSGEGDAFELTVSCQGGLPKEACMEISSPGCQPPAQRLCQPVLPSPACQLVLHQILKGGSGTYCLNVSLADTNSLAVVSTQLIMPVPGILLTGQEAGLGQVPLIVGILLVLMAVVLASLIYRRRLMKQDFSVPQLPHSSSHWLRLPRIFCSCPIGENSPLLSGQQV

SEQ ID NO: 334676 - protein, 668 aa, Artificial Sequence
  derived and/or modified sequence
MDLVLKRCLLHLAVIGALLAVGATKVPRNQDWLGVSRQLRTKAWNRQLYPEWTEAQRLDCWRGGQVSLKVSNDGPTLIGANASFSIALNFPGSQKVLPDGQVIWVNNTIINGSQVWGGQPVYPQETDDACIFPDGGPCPSGSWSQKRSFVYVWKTWGQYWQVLGGPVSGLSIGTGRAMLGTHTMEVTVYHRRGSRSYVPLAHSSSAFTITDQVPFSVSVSQLRALDGGNKHFLRNQPLTFALQLHDPSGYLAEADLSYTWDFGDSSGTLISRALVVTHTYLEPGPVTAQVVLQAAIPLTSCGSSPVPGTTDGHRPTAEAPNTTAGQVPTTEVVGTTPGQAPTAEPSGTTSVQVPTTEVISTAPVQMPTAESTGMTPEKVPVSEVMGTTLAEMSTPEATGMTPAEVSIVVLSGTTAAQVTTTEWVETTARELPIPEPEGPDASSIMSTESITGSLGPLLDGTATLRLVKRQVPLDCVLYRYGSFSVTLDIVQGIESAEILQAVPSGEGDAFELTVSCQGGLPKEACMEISSPGCQPPAQRLCQPVLPSPACQLVLHQILKGGSGTYCLNVSLADTNSLAVVSTQLIMPVPGILLTGQEAGLGQVPLIVGILLVLMAVVLASLIYRRRLMKQDFSVPQLPHSSSHWLRLPRIFCSCPIGENSPLLSGQQV

SEQ ID NO: 334677 - DNA, 2007 bp, Artificial Sequence
  derived and/or modified sequence
atggacctggtcctgaaacgatgtctgttgcacttagcggtcattggagccctcctggccgtcggtgctactaaggtccctcggaatcaggactggctcggcgtttcacgacagcttcggaccaaggcatggaatcgacaactataccctgagtggacggaggcacagcgcctggactgctggaggggcggacaagttagcctcaaggtgtccaacgacggcccaacgttgattggcgctaatgctagctttagtatcgctctgaatttcccaggctcccaaaaggtgcttcccgacggacaggtgatttgggttaataatacaatcatcaacggcgatcaggtttggggagggcaacccgtgtatcctcaagagacagacgacgcctgtatcttccccgacggtggaccctgcccatctgggtcttggtctcaaaaaaggagcttcgtttacgtctggaaaacgtggggtcagtactggcaagtgctcggcggacctgtcagcggcctaagtattggtaccggcagggcgatgctcgggacacatacaatggaagtgacggtgtaccatagacggggaagccgaagctatgtgccgctggctcactcctcttcagcgtttaccattactgaccaggttcctttttcagtgtccgtctctcagctacgtgcactggatggcggaaataagcattttttacgcaatcagcccctgactttcgccctccagctacatgacccgtctgggtatctcgcagaggcggacttgtcctatacctgggactttggggattcgtcaggaacattaatctcacgagccttagtcgtgactcatacttaccttgagccgggacccgtgaccgcgcaggtcgtgctgcaagctgctatccctctgacctcatgtggttcctcgccagtgcccggtaccactgacggccaccgtcctacagccgaagccccaaacaccactgctgggcaggtgccgacaacagaggtggtgggcacaacccccggacaggccccaaccgccgagccctctgggaccaccagcgtgcaagttccaacaaccgaagtcattagcacagccccagtgcagatgcccacagccgaatccaccggtatgacaccagaaaaagttccggtgtcagaagtgatggggactactctggcggaaatgtccaccccggaggcaactggtatgactcctgctgaggtatccattgtagtgttgagcggaactaccgctgcccaggtcactaccactgagtgggttgaaactactgctagagagctaccaattcccgaacctgaggggcctgatgcgagctccatcatgagtaccgagtccattaccgggtcgcttggccctctgctggacgggaccgcaaccctccgcttagttaagcggcaagtcccactggattgcgtgctgtatagatacggtagcttcagcgtaacattagacatcgttcagggcatagaatcagctgaaatccttcaagccgtaccgtctggagagggggacgcttttgaactgactgtttcctgtcagggcggtctccccaaggaagcatgtatggaaatttcatcacccggttgtcaaccaccagctcaaagactgtgtcagccagtcctcccttctcccgcatgccagcttgtccttcaccagatcctgaaaggaggcagtggaacctattgcctcaatgtttctcttgctgataccaattctctggcagtcgtatcaacccagctgatcatgcccgtgccgggaatcctgttgactggacaggaggcaggactggggcaagttccacttattgtcgggatcctcctggtgctgatggctgtggtgctcgcatctctgatatatagaaggcgcctcatgaaacaggacttttccgtcccacagttgcctcactcgtcttcacattggttaaggctccctagaatattctgctcgtgccctatcggcgagaatagcccactgctgagtgggcaacaggtgtag

SEQ ID NO: 334678 - DNA, 2007 bp, Artificial Sequence
  derived and/or modified sequence
atggacctggtgttgaagcggtgtttgctccacctggccgtgattggagccttgctcgcagttggagccactaaggtccccaggaaccaggactggctgggagtgtcccgccagctccgcaccaaggcctggaaccggcagctgtatcccgagtggacggaagctcagaggctggattgttggcgcggtggacaggtgtcgctgaaggtgtctaacgatggaccgaccttgatcggagctaacgcctcgttcagcatcgcactgaatttccctgggtcccagaaagtgctgccggatggccaggttatatgggtgaataacacaatcatcaacgggagccaggtttggggaggtcagcctgtgtaccctcaagaaaccgacgatgcctgtatatttccagatggtggaccatgcccctccggaagttggtcccagaagagatcgttcgtatacgtgtggaaaacctgggggcagtattggcaagtactaggtggcccagtcagtggtttatcgatcggaaccgggcgagcaatgctcggaacacacacgatggaggtgaccgtctaccaccggagaggatctcgcagctacgtcccgctcgctcacagcagcagtgccttcaccataacagaccaggttcccttcagcgtctctgtcagccaactgcgagcccttgatggaggaaataagcactttctgcgcaatcagcccctcacctttgctctgcagttgcacgacccatctgggtatctcgcggaagcagatctctcctatacgtgggatttcggtgacagtagcggaaccctcataagtcgagccctagtagtgactcacacttacctggagcccggacccgttacagcccaggtggtgctgcaggctgctattcccttaacttcttgtgggtcatcaccagtgcccggtaccaccgatggacaccgccctaccgccgaagccccaaatacgactgccggtcaagtgcccacaactgaagtcgtgggaaccaccccaggccaggcacccacagcggagccaagtggaaccacatctgtgcaggtcccgaccaccgaggtgatctcaaccgctccggtccagatgcccactgccgaatccactggtatgactcccgaaaaggtgcctgtgagtgaggttatgggaaccaccctggctgaaatgagcacgcctgaagcaacaggcatgacacccgcagaggtatctattgtggttctgtcaggcactaccgccgcacaggtcaccaccacggaatgggtagaaactacggccagggagcttcctatccccgagccggagggcccagacgcttcttccattatgtctaccgaaagcatcacaggctccctgggaccgctccttgacggtaccgccactctaaggctggtcaagcggcaggtgcctttagattgtgtactgtaccggtacgggtccttctccgtgaccttggatatcgtgcaggggatagagtccgccgagatcctgcaggcagtgccgtccggagagggtgacgcctttgagctcacagtgagttgtcagggaggtttgcccaaggaagcctgcatggagatctctagcccaggttgccagccaccggctcagcgcctgtgtcagcccgtgctcccttcccccgcatgtcagttagtcctgcaccagatcttaaaaggagggagtggaacctactgtttgaacgtgtcgctggccgacacaaatagtctggcagtcgtctcgactcagctgatcatgcctgtgccgggtatcctcctcactggacaggaagccggtctgggtcaagtgccgctgatagtgggcatcctcttagttctgatggccgtggtgttggctagtctgatctaccggaggcggctaatgaagcaggatttctcagtgccacagctgccccattcatcgagtcactggcttagacttccgcgaatcttttgcagttgcccaatcggagaaaactctcccttactcagtggtcagcaagtatag

SEQ ID NO: 334679 - DNA, 2007 bp, Artificial Sequence
  derived and/or modified sequence
atggatttggtgctcaagcgctgtctgctgcatttggccgtaatcggcgctctgttggcggtgggagctaccaaagttccaagaaatcaggactggctcggtgtgagcagacaactcaggacaaaagcttggaacaggcagctgtaccctgagtggacagaagctcagaggctggattgctggaggggaggccaggtgagcctgaaagtctctaatgatgggccaacacttattggtgccaacgctagtttttctattgcgttaaattttccaggtagccagaaagttcttcctgacggacaggtgatttgggtgaataacactattatcaatggagatcaggtgtggggtggacagcccgtttatccacaggagacagacgatgcatgcatcttccccgatgggggaccctgtcctagtggcagctggagtcaaaagaggagtttcgtgtatgtttggaagacctgggggcagtattggcaagtgctgggcggccctgtttccggacttagcataggaaccggtagagccatgctgggcacccacacaatggaagtgacagtgtatcacagaagaggctcccggagctacgtccctctggctcacagcagttcagcctttaccattaccgaccaggtccccttctctgtcagtgtctcacagctccgcgcgctggacggaggaaataagcatttcctgagaaaccaaccgctaacctttgctttacagctccacgatccatctggctacctggccgaagcagatctttcctacacttgggattttggtgatagctccggcacgcttatctcacgggccctcgtggtcacccatacttacctcgaacccgggccagtgactgcccaggttgttttgcaagccgctatccctcttacatcctgcggcagttcacctgttccagggactacagacggtcacagacccacagccgaggcacctaacaccacagcaggacaggttccgaccacggaggtcgtcggcactactcccggtcaggccccaaccgcagagccctcagggactacgtcagtgcaggttccaacgaccgaagtgatttcaactgctccagtgcaaatgccaacagccgagtccaccggtatgacaccagaaaaagttcctgtaagtgaggtcatggggactacgttagccgagatgtccacccccgaggccacaggcatgacacccgccgaggtaagtattgtggtgctttcaggaaccaccgctgctcaggttacaaccaccgaatgggtggagacaacagctcgagaactgccgatacccgaacccgagggtcctgacgcttcttccatcatgtccacagagagtattaccggctctctcggtcctctgctggatgggactgccaccctccgcctggtcaaacgccaagtccccctggactgcgtcttatatcgctacggttcttttagcgtgactctggatatcgtgcagggcattgaatctgccgagattctccaagctgtcccctccggcgaaggtgacgccttcgagctaactgtgagttgtcaaggtggcctaccgaaagaagcttgcatggaaattagtagtcctggatgccagccacccgcacagcggctgtgccaacctgtgctcccttctccagcctgccagctggtgcttcatcaaatcctgaaaggcggtagtggaacatattgcttgaatgttagcctggctgacaccaactcattggccgtcgttagcacccagctgattatgcccgtgcccggcattctgttaacgggtcaggaggccggcctagggcaggtacccctgatcgtgggcatccttctcgttctcatggccgtcgtgctggcttcactgatttaccgcaggagactgatgaaacaggacttctccgtgccacaacttccacattctagctctcactggttacggctgcctagaatattttgtagttgcccgattggtgagaactcccctcttctgtctggacagcaggtgtag

SEQ ID NO: 334680 - DNA, 2007 bp, Artificial Sequence
  derived and/or modified sequence
atggaccttgtcctcaagcggtgtctactccaccttgcagtcattggagcgttgcttgcagtaggcgcaaccaaggtgcccaggaaccaggattggctcggggtgtcccgccaactgcgaaccaaggcttggaacaggcagctgtacccggagtggacagaagcccagaggctggactgttggcgtggcggccaggtgtcgttaaaggtgagcaacgacggaccaacactgataggtgccaacgcctccttctcgatcgctctaaactttccaggcagccagaaagttctgccagatggacaggtgatttgggttaataatacgatcatcaacgggagccaggtgtggggtggacaacccgtgtacccccaagagactgatgatgcctgcattttccctgatggaggcccttgcccaagcggatcttggagccaaaaacgcagcttcgtctatgtttggaaaacttggggccagtactggcaggtgctcggaggccctgtgagcggcttgtccatagggaccggccgcgctatgctgggcactcacacaatggaggtcaccgtttatcaccggcgaggcagtagatcttatgtcccactggcccattcaagctcagcctttaccataaccgatcaagtgcccttctccgtctcggtgtctcagttacgggcattggatggaggcaataagcacttcttgaggaaccagccactgacttttgcacttcaattacatgatccatcaggatacctggccgaagccgatctctcgtacacttgggattttggcgacagcagtggaacactgatctcaagagcattagtggttactcacacttacctggagcccggccccgtgaccgcacaggtagtattgcaggccgctattcccctaactagctgtggtagcagtcccgttcccggaacgaccgacgggcatcgacctaccgcggaagcacccaataccacggcaggccaggtgcccacaactgaggtcgtcggtacaactcctggacaggctcccaccgcggagccctctggcaccacgagcgtccaggtgccaactacggaagtcatcagtactgcacctgtacaaatgcccaccgcggaatccactggtatgactccagaaaaagtccctgtgtccgaggtaatgggtactacgctagcggagatgtctacgcccgaggccactggaatgacccctgccgaggtgtcaattgtggtcctgtccggtaccactgctgcacaggtcacaaccacagaatgggttgaaacaacagcccgagaactgcctattcccgagcctgaagggcctgacgcgtcaagcatcatgtctaccgagagcatcacgggaagtctgggcccactactggacgggacggcaacactgcggcttgtgaaacggcaggtgccgctcgattgcgtgctgtacaggtacggctccttctcggtaacactggacatcgtgcagggaatagagtctgctgagatcctgcaggccgtcccctcaggcgaaggggacgctttcgaactgactgtctcctgccaaggcggcttgccaaaagaagcctgcatggaaattagttcccctggctgccaaccacctgctcagcgcttgtgccagcccgtcctaccttcacccgcctgtcagcttgtcttgcatcagatcttgaagggcggtagtggaacgtactgtcttaatgtgtccctggccgacacgaattctcttgccgttgtttcaacacagttaattatgcctgtgcctggtatcttgctcacgggccaggaagcgggattaggacaggttcctctcattgtcggcatactgctagtgctgatggccgtcgtactggcaagccttatttaccgcagaagacttatgaaacaggacttcagcgtcccacaacttcctcactctagctcacactggctcagattgcctcggattttttgctcgtgtcccatcggagagaattcaccactgctttcagggcaacaagtgtag

SEQ ID NO: 334681 - DNA, 2007 bp, Artificial Sequence
  derived and/or modified sequence
atggatctcgtacttaaacgatgcttgctgcatctggctgtgatcggtgccttattggcagtgggggccacaaaagtgcctcgaaatcaagattggttaggcgtgtcacgccaactgcgcaccaaagcatggaatcgtcagctttatcctgaatggaccgaagcccagaggctcgactgctggaggggtggccaagtgtccttgaaggtgtccaacgatggtcccacactgatcggcgccaacgccagttttagcattgccttaaattttcccggaagtcaaaaagtgctccccgatggccaggtaatctgggtgaacaatacaatcataaacggcgaccaagtctggggaggacagcctgtgtatcctcaggagacagatgatgcttgtatattccctgacggcggcccatgtccatcaggaagctggtctcagaagaggagctttgtatatgtgtggaaaacatgggggcagtactggcaggtcctcgggggacccgtgtccggcctgagcattggtacaggtagagccatgcttgggactcacaccatggaagtcacagtctaccatagaagaggcagccgtagctatgtaccacttgcacattcttcttcagcattcactatcacagatcaggtgcccttctccgtgtctgtgagccaacttcgggcccttgacggaggaaacaagcattttttacgcaaccagccactaacttttgccttgcaattacatgacccctctggctacctggcagaagcagatttatcatacacttgggacttcggtgactcgtccggaaccttgatctcaagggctcttgtcgtgacacatacataccttgaacccggtcccgtcacagcacaggtcgttcttcaggccgccataccgctcacctcatgcggcagttcacctgttccagggactacagacggtcacagacccacagccgaggcacctaacaccacagcaggacaggttccgaccacggaggtcgtcggcactactcccggtcaggccccaaccgcagagccctcagggactacgtcagtgcaggttccaacgaccgaagtgatttcaactgctccagtgcaaatgccaacagccgagtccaccggtatgacaccagaaaaagttcctgtaagtgaggtcatggggactacgttagccgagatgtccacccccgaggccacaggcatgacacccgcagaggtgtctatagttgtactgagtggaacgacagcagcacaggtgacgacgaccgagtgggtagaaacaacagctcgagaacttccaatcccggagccagaaggtcccgacgcatcgagcataatgagtaccgagtcgattacaggcagcctaggcccgcttctggatggaactgctactttgagattggtaaaacgtcaggtgccgctagactgcgtcctgtataggtatggctccttcagcgttacactggatatagtgcaaggcatagaatccgccgagatccttcaggccgtgccgtctggtgaaggagacgccttcgagttgacagtcagttgtcagggaggacttcctaaagaagcctgtatggagatctcctctcctggttgtcagccgcctgcgcaaagactgtgtcagcctgtactgccctctcctgcctgccagctggtgctacatcaaatccttaagggtggcagcggcacctattgcctaaatgtttctcttgccgatacgaatagtctggcagtagtctccacacagctcatcatgcctgtgccgggaatccttctcactggccaagaagccggactcggacaagtaccactgatcgttggcatcctcctagtactgatggccgtcgtcctcgcaagcctgatctataggcgtcgcttaatgaaacaggactttagcgtacctcagttgcctcacagcagctcacactggctaaggcttccacgaatcttttgttcatgtcctataggagagaattctccactattaagtggacagcaagtgtag

SEQ ID NO: 334682 - DNA, 2127 bp, Artificial Sequence
  derived and/or modified sequence
ggaagaacacaatggatctggtgctaaaaagatgccttcttcatttggctgtgataggtgctttgctggctgtgggggctacaaaagtacccagaaaccaggactggcttggtgtctcaaggcaactcagaaccaaagcctggaacaggcagctgtatccagagtggacagaagcccagagacttgactgctggagaggtggtcaagtgtccctcaaggtcagtaatgatgggcctacactgattggtgcaaatgcctccttctctattgccttgaacttccctggaagccaaaaggtattgccagatgggcaggttatctgggtcaacaataccatcatcaatgggagccaggtgtggggaggacagccagtgtatccccaggaaactgacgatgcctgcatcttccctgatggtggaccttgcccatctggctcttggtctcagaagagaagctttgtttatgtctggaagacctggggccaatactggcaagttctagggggcccagtgtctgggctgagcattgggacaggcagggcaatgctgggcacacacaccatggaagtgactgtctaccatcgccggggatcccggagctatgtgcctcttgctcattccagctcagccttcaccattactgaccaggtgcctttctccgtgagcgtgtcccagttgcgggccttggatggagggaacaagcacttcctgagaaatcagcctctgacctttgccctccagctccatgaccccagtggctatctggctgaagctgacctctcctacacctgggactttggagacagtagtggaaccctgatctctcgggcacttgtggtcactcatacttacctggagcctggcccagtcactgcccaggtggtcctgcaggctgccattcctctcacctcctgtggctcctccccagttccaggcaccacagatgggcacaggccaactgcagaggcccctaacaccacagctggccaagtgcctactacagaagttgtgggtactacacctggtcaggcgccaactgcagagccctctggaaccacatctgtgcaggtgccaaccactgaagtcataagcactgcacctgtgcagatgccaactgcagagagcacaggtatgacacctgagaaggtgccagtttcagaggtcatgggtaccacactggcagagatgtcaactccagaggctacaggtatgacacctgcagaggtatcaattgtggtgctttctggaaccacagctgcacaggtaacaactacagagtgggtggagaccacagctagagagctacctatccctgagcctgaaggtccagatgccagctcaatcatgtctacggaaagtattacaggttccctgggccccctgctggatggtacagccaccttaaggctggtgaagagacaagtccccctggattgtgttctgtatcgatatggttccttttccgtcaccctggacattgtccagggtattgaaagtgccgagatcctgcaggctgtgccgtccggtgagggggatgcatttgagctgactgtgtcctgccaaggcgggctgcccaaggaagcctgcatggagatctcatcgccagggtgccagccccctgcccagcggctgtgccagcctgtgctacccagcccagcctgccagctggttctgcaccagatactgaagggtggctcggggacatactgcctcaatgtgtctctggctgataccaacagcctggcagtggtcagcacccagcttatcatgcctgtgcctgggattcttctcacaggtcaagaagcaggccttgggcaggttccgctgatcgtgggcatcttgctggtgttgatggctgtggtccttgcatctctgatatataggcgcagacttatgaagcaagacttctccgtaccccagttgccacatagcagcagtcactggctgcgtctaccccgcatcttctgctcttgtcccattggtgagaacagccccctcctcagtgggcagcaggtctgagtactctcatatgatgctgtgattttcctggagttgacagaaacacctatatttcccccagtcttccctgggagactactattaactgaaataaatactcagagcctga

SEQ ID NO: 334683 - DNA, 2007 bp, Artificial Sequence
  derived and/or modified sequence
atggatctcgtattgaaacgctgcttgctgcacttggccgtaattggtgccttacttgcagtcggagctactaaagtaccgcggaatcaggattggcttggggtttctagacagctccgaacaaaggcctggaatcggcagttgtacccagaatggaccgaggcacaacgccttgactgttggcgcggcggacaggtgtcgctgaaggtctctaatgacggaccgacactcattggggcgaacgcttcgttttctatcgctctcaatttcccgggcagccagaaagttctgcctgacggccaagtaatttgggtaaacaataccatcattaacggatctcaggtttggggcggacaacctgtttatccccaggaaacagatgacgcttgcatctttcctgatgggggcccttgtccaagcgggtcctggtctcagaagcgttccttcgtctacgtgtggaagacttggggacagtattggcaggttttgggaggtccagtcagtgggctgtcaatcggaactggaagagcaatgctgggaacccatactatggaagtcaccgtgtatcacagacgtgggagtcgctcttacgtgcctctggctcactcgtcctccgccttcaccattacggaccaagtgcccttcagcgtaagcgtctcccagctccgtgctctcgatgggggaaataaacacttcctcaggaaccagccacttacctttgcccttcagctgcatgatccctctggctatttagccgaagccgacctgtcttacacgtgggactttggtgactctagcggtactctcatttcaagagctctggtagtgactcatacatatctggaaccagggcctgtcactgcccaagtggtgctgcaggccgccatccccctgacatcctgcggcagcagtccagttcctggaacaaccgatggccatcgacctaccgcagaggccccaaatactactgccgggcaggtgccaacaacagaggtcgtcggaacaactcccggccaagccccaacagctgagccctctggtaccacctccgtgcaagttccaactacagaggtgatctctacagctcccgttcaaatgccaaccgcggaatctaccgggatgactccagaaaaggtccccgtgtctgaggtgatgggcaccactctggcagaaatgtctacccccgaagccactggcatgaccccagccgaggtgtctatcgtggtgctgtccggaacgactgcagcccaagtgaccacgacagagtgggtggagactacagctcgcgagttacctattccagaaccagaaggccctgacgcgtcctctattatgagtacagagagcatcactgggtccttgggacctctgttagacggcactgctacattaagattggtcaaacgtcaggtgcccctcgactgtgtcctgtatcgatatggttccttctcagtaaccctggatatagtgcaaggaatcgagtccgctgaaatcctccaggcggtcccttctggcgaaggcgatgccttcgagctcactgttagctgtcaaggcggcctccctaaagaggcttgtatggagataagctctccaggatgtcagcctcccgcccagagactgtgccaacctgtcctccccagccccgcctgtcagctcgttttgcaccaaattctcaaagggggcagtgggacttattgtttgaatgtgagccttgccgataccaacagtttggccgttgtgtccacccaattgattatgcccgtacccggaatcctcctcaccggacaggaagctggtttgggacaagtgcctcttattgtaggtatcctactcgtgctcatggccgtagtgctcgcctcattaatttatcgcagaagactaatgaaacaggacttttccgtgccgcagttgccccactcaagctcccattggctacgcttacctcgaattttctgcagttgtcctatcggcgagaactccccgcttttatcgggacagcaggtctag

SEQ ID NO: 334684 - DNA, 2007 bp, Artificial Sequence
  derived and/or modified sequence
atggacctggtgctgaagagatgcctgctgcacctggccgtgatcggcgccctgctggccgtgggcgccaccaaggtgcccagaaaccaggactggctgggcgtgagcagacagctgagaaccaaggcctggaacagacagctgtaccccgagtggaccgaggcccagagactggactgctggagaggcggccaggtgagcctgaaggtgagcaacgacggccccaccctgatcggcgccaacgccagcttcagcatcgccctgaacttccccggcagccagaaggtgctgcccgacggccaggtgatctgggtgaacaacaccatcatcaacggcgaccaggtgtggggcggccagcccgtgtacccccaggagaccgacgacgcctgcatcttccccgacggcggcccctgccccagcggcagctggagccagaagagaagcttcgtgtacgtgtggaagacctggggccagtactggcaggtgctgggcggccccgtgagcggcctgagcatcggcaccggcagagccatgctgggcacccacaccatggaggtgaccgtgtaccacagaagaggcagcagaagctacgtgcccctggcccacagcagcagcgccttcaccatcaccgaccaggtgcccttcagcgtgagcgtgagccagctgagagccctggacggcggcaacaagcacttcctgagaaaccagcccctgaccttcgccctgcagctgcacgaccccagcggctacctggccgaggccgacctgagctacacctgggacttcggcgacagcagcggcaccctgatcagcagagccctggtggtgacccacacctacctggagcccggccccgtgaccgcccaggtggtgctgcaggccgccatccccctgaccagctgcggcagcagccccgtgcccggcaccaccgacggccacagacccaccgccgaggcccccaacaccaccgccggccaggtgcccaccaccgaggtggtgggcaccacccccggccaggcccccaccgccgagcccagcggcaccaccagcgtgcaggtgcccaccaccgaggtgatcagcaccgcccccgtgcagatgcccaccgccgagagcaccggcatgacccccgagaaggtgcccgtgagcgaggtgatgggcaccaccctggccgagatgagcacccccgaggccaccggcatgacccccgccgaggtgagcatcgtggtgctgagcggcaccaccgccgcccaggtgaccaccaccgagtgggtggagaccaccgccagagagctgcccatccccgagcccgagggccccgacgccagcagcatcatgagcaccgagagcatcaccggcagcctgggccccctgctggacggcaccgccaccctgagactggtgaagagacaggtgcccctggactgcgtgctgtacagatacggcagcttcagcgtgaccctggacatcgtgcagggcatcgagagcgccgagatcctgcaggccgtgcccagcggcgagggcgacgccttcgagctgaccgtgagctgccagggcggcctgcccaaggaggcctgcatggagatcagcagccccggctgccagccccccgcccagagactgtgccagcccgtgctgcccagccccgcctgccagctggtgctgcaccagatcctgaagggcggcagcggcacctactgcctgaacgtgagcctggccgacaccaacagcctggccgtggtgagcacccagctgatcatgcccgtgcccggcatcctgctgaccggccaggaggccggcctgggccaggtgcccctgatcgtgggcatcctgctggtgctgatggccgtggtgctggccagcctgatctacagaagaagactgatgaagcaggacttcagcgtgccccagctgccccacagcagcagccactggctgagactgcccagaatcttctgcagctgccccatcggcgagaacagccccctgctgagcggccagcaggtgtag

SEQ ID NO: 334685 - DNA, 2007 bp, Artificial Sequence
  derived and/or modified sequence
atggacctggtgctgaagagatgcctgctgcacctggccgtgatcggcgccctgctggccgtgggcgccaccaaggtgcccagaaaccaggactggctgggcgtgagcagacagctgagaaccaaggcctggaacagacagctgtaccccgagtggaccgaggcccagagactggactgctggagaggcggccaggtgagcctgaaggtgagcaacgacggccccaccctgatcggcgccaacgccagcttcagcatcgccctgaacttccccggcagccagaaggtgctgcccgacggccaggtgatctgggtgaacaacaccatcatcaacggcagccaggtgtggggcggccagcccgtgtacccccaggagaccgacgacgcctgcatcttccccgacggcggcccctgccccagcggcagctggagccagaagagaagcttcgtgtacgtgtggaagacctggggccagtactggcaggtgctgggcggccccgtgagcggcctgagcatcggcaccggcagagccatgctgggcacccacaccatggaggtgaccgtgtaccacagaagaggcagcagaagctacgtgcccctggcccacagcagcagcgccttcaccatcaccgaccaggtgcccttcagcgtgagcgtgagccagctgagagccctggacggcggcaacaagcacttcctgagaaaccagcccctgaccttcgccctgcagctgcacgaccccagcggctacctggccgaggccgacctgagctacacctgggacttcggcgacagcagcggcaccctgatcagcagagccctggtggtgacccacacctacctggagcccggccccgtgaccgcccaggtggtgctgcaggccgccatccccctgaccagctgcggcagcagccccgtgcccggcaccaccgacggccacagacccaccgccgaggcccccaacaccaccgccggccaggtgcccaccaccgaggtggtgggcaccacccccggccaggcccccaccgccgagcccagcggcaccaccagcgtgcaggtgcccaccaccgaggtgatcagcaccgcccccgtgcagatgcccaccgccgagagcaccggcatgacccccgagaaggtgcccgtgagcgaggtgatgggcaccaccctggccgagatgagcacccccgaggccaccggcatgacccccgccgaggtgagcatcgtggtgctgagcggcaccaccgccgcccaggtgaccaccaccgagtgggtggagaccaccgccagagagctgcccatccccgagcccgagggccccgacgccagcagcatcatgagcaccgagagcatcaccggcagcctgggccccctgctggacggcaccgccaccctgagactggtgaagagacaggtgcccctggactgcgtgctgtacagatacggcagcttcagcgtgaccctggacatcgtgcagggcatcgagagcgccgagatcctgcaggccgtgcccagcggcgagggcgacgccttcgagctgaccgtgagctgccagggcggcctgcccaaggaggcctgcatggagatcagcagccccggctgccagccccccgcccagagactgtgccagcccgtgctgcccagccccgcctgccagctggtgctgcaccagatcctgaagggcggcagcggcacctactgcctgaacgtgagcctggccgacaccaacagcctggccgtggtgagcacccagctgatcatgcccgtgcccggcatcctgctgaccggccaggaggccggcctgggccaggtgcccctgatcgtgggcatcctgctggtgctgatggccgtggtgctggccagcctgatctacagaagaagactgatgaagcaggacttcagcgtgccccagctgccccacagcagcagccactggctgagactgcccagaatcttctgcagctgccccatcggcgagaacagccccctgctgagcggccagcaggtgtag

SEQ ID NO: 334686 - DNA, 2007 bp, Artificial Sequence
  derived and/or modified sequence
atggatctggtgttaaagagatgtcttctgcacctagccgttatcggggctcttctagctgttggagccacaaaagtccctcgtaatcaagactggttgggtgtgtcaaggcagctgcgcacaaaggcctggaatcgccaattgtatcctgagtggactgaggcacagagattagactgctggcgcggcggtcaggtgtcattgaaggtatcaaatgatgggccaacactcattggtgctaacgccagtttctcaattgctctaaatttccctgggagtcagaaagttttgcccgatggccaggtcatctgggttaataatacaattattaatggggatcaggtttggggcggacagccagtctaccctcaagagaccgacgatgcttgtatcttcccagatggagggccctgtccatcgggcagctggagtcagaagagaagttttgtatatgtgtggaaaacctggggccagtactggcaggtgctgggcggacccgttagcggactgtccatcggcacaggaagagctatgctcggaacccatacaatggaggtgactgtatatcaccgccgtgggagcaggtcttacgtacccctagcacattccagttccgcattcactattaccgatcaggtaccgtttagcgtgagcgtgagtcaacttagagccctggacggaggaaacaaacatttcctgcgaaatcaacccctcacctttgctcttcagctgcatgatcccagcggatatctagctgaagcagacttatcatacacttgggacttcggcgattcatcaggcacccttattagtcgtgcgctggtcgtaacgcacacgtacttagagcctgggccagtaactgcgcaggttgttcttcaggcggcaattcctttaacaagctgcggcagctcacccgtgcccgggaccactgacgggcacaggcccaccgccgaggcacctaacacaaccgccgggcaggtccccactacggaggtagtgggaactacccccggccaggcacccacagcggaaccttccgggactacctctgtccaggtacccaccacagaagtgatctccactgcaccggtccagatgcctacagccgagtcaaccggtatgactcccgagaaagtgccagtttcagaggtcatgggcacaaccttagcggagatgtccacacctgaagctacaggcatgacacccgcggaggtgagcattgtggtgctttcagggacgactgctgctcaggtcaccaccacagaatgggtggaaacaaccgcacgcgagctaccgataccggagcctgaaggcccagacgccagctctataatgagcaccgagagcattactggctcccttggtccactgttggacggcaccgccacattgcgactagtgaagcggcaggtgcccctggactgcgtgctttacagatacggctctttttcagtgactttagacattgtgcagggcattgagagcgctgagattctccaggccgttccatcaggtgagggcgatgcgttcgagctgaccgttagttgtcagggcggactgcccaaggaggcctgtatggagatcagctcccctggttgccagccccctgcccagaggctatgtcagcctgtgctcccctctccagcctgtcagcttgtcctgcatcaaattcttaagggcgggagtgggacatattgtctgaacgtgtctttggccgacacaaactctcttgccgtggtatcaacacagctcatcatgccagtccctggcattctcctgacaggacaggaggcaggactgggtcaggtaccccttattgttgggattctgttggttctgatggcagtagtgctggctagtttaatctatcggaggagactaatgaagcaggatttttctgtgccacagctgccccattcctcctcccattggctaaggcttcctaggattttttgttcttgccctatcggcgaaaacagtccccttctttctggccagcaggtgtag

SEQ ID NO: 334687 - DNA, 2007 bp, Artificial Sequence
  derived and/or modified sequence
atggacctggtgctgaagaggtgtctgcttcatctggctgtcattggggccctgctagccgtgggcgccacaaaggtgccccgcaaccaggattggctcggggtgagccgccaattgcgtacgaaagcttggaacagacagctgtaccccgagtggacagaggcccagcgactagactgttggaggggggggcaggtttctcttaaggtgtctaacgatggacctaccttgatcggcgcaaacgctagcttctccattgctctcaatttccctggatcacagaaagtgctcccggatggtcaagttatttgggttaataacaccattatcaatggctcacaagtctgggggggccagcccgtgtatccacaggaaactgacgacgcttgtatctttcccgatggtggtccatgcccatcaggtagctggtcccagaagagatcgttcgtatatgtgtggaaaacttggggccagtactggcaggttctgggtggccctgtgtccggactcagcatagggacaggccgggctatgctcggcacacatacaatggaggtgacggtgtaccacagacggggctcgagaagctatgttccattggcccatagttcatccgctttcacaatcactgatcaggtgcccttcagcgtctccgtgtctcagttacgggccttagatggcggaaataagcactttcttcgcaaccaacctctgactttcgctctacagttacacgatccctcgggctacctggctgaagccgatctcagctatacctgggattttggcgattcctcaggaaccttgatctctagggccctggtggttacccacacgtacctggagcccggacctgtgacagcccaggtggttctgcaagctgctataccccttacaagctgtgggagttcaccagtgcctggtactacggacggacatcgccccaccgccgaggcacccaacaccaccgccggtcaggtcccaaccaccgaagtggtgggcacaaccccgggccaggcccccactgccgagccgtcaggcacaacttcggtccaggtgcctaccaccgaagttatttctactgcaccagtgcaaatgcccactgcagagtctactgggatgacacctgagaaggtgcccgtgtctgaagttatggggaccacactcgcagagatgagtacacctgaggctactggtatgactcctgccgaggtcagcatcgtggttctatccggaacgaccgcagcacaggtaactactaccgaatgggtagaaactacagctcgcgaattaccaatacctgagcccgagggacccgatgcttcatcaattatgagcaccgaatcgatcaccgggtcccttgggcccctcctagacggaacggctacactgcggctcgtgaagcggcaggttccactagattgcgtactgtatcgttatggcagcttctccgtgactcttgacatcgtccaaggtatcgagagcgccgaaattctgcaggcagtacctagcggagagggcgatgcattcgagcttacagttagctgccagggcgggctccctaaggaggcctgcatggagataagttcacctggctgtcagcctcctgctcagcggctctgccagcccgtgctcccctcccctgcctgccagctggtgttacaccagatcctcaagggtgggtctggtacatattgcctgaatgtgagtttggcagacaccaacagcttagccgtcgtcagcacacaactgatcatgccagtgccaggaatccttctcacaggacaggaggccgggttgggacaggtgccactgatcgtgggcattctgttggttctcatggctgtagtactggcatccctgatttacaggaggcgactgatgaagcaggatttttctgttccacaactgccccacagttcttcacactggctcagacttccaagaattttttgcagctgccctattggcgaaaactccccactactgtcgggccaacaagtgtag

SEQ ID NO: 334688 - DNA, 2203 bp, Artificial Sequence
  derived and/or modified sequence
agcccagcgctcctccccgcaaatgatcccgccccaggggcctatcccagtccccccagtgcctttggttgctggagggaagaacacaatggatctggtgctaaaaagatgccttcttcatttggctgtgataggtgctttgctggctgtgggggctacaaaagtacccagaaaccaggactggcttggtgtctcaaggcaactcagaaccaaagcctggaacaggcagctgtatccagagtggacagaagcccagagacttgactgctggagaggtggtcaagtgtccctcaaggtcagtaatgatgggcctacactgattggtgcaaatgcctccttctctattgccttgaacttccctggaagccaaaaggtattgccagatgggcaggttatctgggtcaacaataccatcatcaatggtgaccaggtgtggggaggacagccagtgtatccccaggaaactgacgatgcctgcatcttccctgatggtggaccttgcccatctggctcttggtctcagaagagaagctttgtttatgtctggaagacctggggccaatactggcaagttctagggggcccagtgtctgggctgagcattgggacaggcagggcaatgctgggcacacacaccatggaagtgactgtctaccatcgccggggatcccggagctatgtgcctcttgctcattccagctcagccttcaccattactgaccaggtgcctttctccgtgagcgtgtcccagttgcgggccttggatggagggaacaagcacttcctgagaaatcagcctctgacctttgccctccagctccatgaccccagtggctatctggctgaagctgacctctcctacacctgggactttggagacagtagtggaaccctgatctctcgggcacttgtggtcactcatacttacctggagcctggcccagtcactgcccaggtggtcctgcaggctgccattcctctcacctcctgtggctcctccccagttccaggcaccacagatgggcacaggccaactgcagaggcccctaacaccacagctggccaagtgcctactacagaagttgtgggtactacacctggtcaggcgccaactgcagagccctctggaaccacatctgtgcaggtgccaaccactgaagtcataagcactgcacctgtgcagatgccaactgcagagagcacaggtatgacacctgagaaggtgccagtttcagaggtcatgggtaccacactggcagagatgtcaactccagaggctacaggtatgacacctgcagaggtatcaattgtggtgctttctggaaccacagctgcacaggtaacaactacagagtgggtggagaccacagctagagagctacctatccctgagcctgaaggtccagatgccagctcaatcatgtctacggaaagtattacaggttccctgggccccctgctggatggtacagccaccttaaggctggtgaagagacaagtccccctggattgtgttctgtatcgatatggttccttttccgtcaccctggacattgtccagggtattgaaagtgccgagatcctgcaggctgtgccgtccggtgagggggatgcatttgagctgactgtgtcctgccaaggcgggctgcccaaggaagcctgcatggagatctcatcgccagggtgccagccccctgcccagcggctgtgccagcctgtgctacccagcccagcctgccagctggttctgcaccagatactgaagggtggctcggggacatactgcctcaatgtgtctctggctgataccaacagcctggcagtggtcagcacccagcttatcatgcctgtgcctgggattcttctcacaggtcaagaagcaggccttgggcaggttccgctgatcgtgggcatcttgctggtgttgatggctgtggtccttgcatctctgatatataggcgcagacttatgaagcaagacttctccgtaccccagttgccacatagcagcagtcactggctgcgtctaccccgcatcttctgctcttgtcccattggtgagaacagccccctcctcagtgggcagcaggtctgagtactctcatatgatgctgtgattttcctggagttgacagaaacacctatatttcccccagtcttccctgggagactactattaactgaaataaatactcagagcctg

SEQ ID NO: 334689 - DNA, 2007 bp, Artificial Sequence
  derived and/or modified sequence
atggacctggtgctgaagcgctgcctgctgcacctggccgtgattggagccctgctggccgtgggcgccaccaaggtgcccaggaaccaggactggctgggcgtgtcccggcagctgcggaccaaggcctggaaccggcagctgtacccagagtggacagaggcccagaggctggactgctggaggggcggccaggtgtccctgaaggtgtccaatgatggccccaccctcatcggggccaatgccagcttcagcatcgccctgaacttccctggcagccagaaggtgctgcctgatggccaggtgatctgggtgaacaacaccatcatcaatggagaccaggtgtggggcggccagcctgtgtacccccaggagacagatgatgcctgcatcttcccagatggcggcccctgccccagcggctcctggagccagaagaggagctttgtgtatgtgtggaagacctggggccagtactggcaggtgctgggcggccctgtgtctggcctgagcatcggcaccggccgggccatgctgggcacccacaccatggaggtgacagtgtaccacagaagaggcagccgctcctatgtgcccctggcccacagcagcagcgccttcaccatcacagaccaggtgcccttctctgtgtctgtgtcccagctgcgggccctggatggcggcaacaagcacttcctgaggaaccagcccctgacctttgccctgcagctgcatgaccccagcggctacctggccgaggccgacctgagctacacctgggactttggagacagcagcggcaccctcatcagccgggccctggtggtgacccacacctacctggagcccggccctgtgacagcccaggtggtgctgcaggccgccatccccctgaccagctgtggcagcagccctgtgcccggcaccacagatggccaccggcccacagctgaggcccccaacaccacagctggccaggtgcccaccacagaggtggtgggcaccaccccaggccaggcccccacagctgagcccagcggcaccacctctgtgcaggtgcccaccacagaggtgatcagcacagcccctgtgcagatgcccacagctgagagcacaggcatgaccccagagaaggtgcctgtgtctgaggtgatgggcaccaccctggccgagatgagcaccccagaggccaccggcatgaccccagctgaggtgtccatcgtggtgctgagcggcaccacagctgcccaggtgaccaccacagagtgggtggagaccacagcccgggagctgcccatccctgagcctgagggcccagatgccagcagcatcatgagcacagagagcatcaccggcagcctgggccccctgctggatggaacagccaccctgcggctggtgaagaggcaggtgcccctggactgtgtgctgtaccgctatggcagcttctctgtgaccctggacatcgtgcagggcattgaatctgctgagatcctgcaggccgtgcccagcggggagggagatgcctttgagctgactgtgtcctgccagggcggcctgcccaaggaggcctgcatggagatcagcagccctggctgccagcccccagcccagaggctgtgccagcctgtgctgcccagccctgcctgccagctggtgctgcaccagatcctgaagggcggcagcggcacctactgcctgaatgtgtccctggccgacaccaacagcctggccgtggtgtccacccagctgatcatgcctgtgcccggcatcctgctgaccggccaggaggccggcctgggccaggtgcccctcatcgtgggcatcctgctggtgctgatggctgtggtgctggccagcctcatctacagaagaaggctgatgaagcaggacttctctgtgccccagctgccccacagcagcagccactggctgcggctgccccgcatcttctgcagctgccccatcggggagaacagccccctgctgagcggccagcaggtgtag

SEQ ID NO: 334690 - DNA, 2007 bp, Artificial Sequence
  derived and/or modified sequence
atggacctggtgctgaagcgctgcctgctgcacctggccgtgattggagccctgctggccgtgggcgccaccaaggtgcccaggaaccaggactggctgggcgtgtcccggcagctgcggaccaaggcctggaaccggcagctgtacccagagtggacagaggcccagaggctggactgctggaggggcggccaggtgtccctgaaggtgtccaatgatggccccaccctcatcggggccaatgccagcttcagcatcgccctgaacttccctggcagccagaaggtgctgcctgatggccaggtgatctgggtgaacaacaccatcatcaatggcagccaggtgtggggcggccagcctgtgtacccccaggagacagatgatgcctgcatcttcccagatggcggcccctgccccagcggctcctggagccagaagaggagctttgtgtatgtgtggaagacctggggccagtactggcaggtgctgggcggccctgtgtctggcctgagcatcggcaccggccgggccatgctgggcacccacaccatggaggtgacagtgtaccacagaagaggcagccgctcctatgtgcccctggcccacagcagcagcgccttcaccatcacagaccaggtgcccttctctgtgtctgtgtcccagctgcgggccctggatggcggcaacaagcacttcctgaggaaccagcccctgacctttgccctgcagctgcatgaccccagcggctacctggccgaggccgacctgagctacacctgggactttggagacagcagcggcaccctcatcagccgggccctggtggtgacccacacctacctggagcccggccctgtgacagcccaggtggtgctgcaggccgccatccccctgaccagctgtggcagcagccctgtgcccggcaccacagatggccaccggcccacagctgaggcccccaacaccacagctggccaggtgcccaccacagaggtggtgggcaccaccccaggccaggcccccacagctgagcccagcggcaccacctctgtgcaggtgcccaccacagaggtgatcagcacagcccctgtgcagatgcccacagctgagagcacaggcatgaccccagagaaggtgcctgtgtctgaggtgatgggcaccaccctggccgagatgagcaccccagaggccaccggcatgaccccagctgaggtgtccatcgtggtgctgagcggcaccacagctgcccaggtgaccaccacagagtgggtggagaccacagcccgggagctgcccatccctgagcctgagggcccagatgccagcagcatcatgagcacagagagcatcaccggcagcctgggccccctgctggatggaacagccaccctgcggctggtgaagaggcaggtgcccctggactgtgtgctgtaccgctatggcagcttctctgtgaccctggacatcgtgcagggcattgaatctgctgagatcctgcaggccgtgcccagcggggagggagatgcctttgagctgactgtgtcctgccagggcggcctgcccaaggaggcctgcatggagatcagcagccctggctgccagcccccagcccagaggctgtgccagcctgtgctgcccagccctgcctgccagctggtgctgcaccagatcctgaagggcggcagcggcacctactgcctgaatgtgtccctggccgacaccaacagcctggccgtggtgtccacccagctgatcatgcctgtgcccggcatcctgctgaccggccaggaggccggcctgggccaggtgcccctcatcgtgggcatcctgctggtgctgatggctgtggtgctggccagcctcatctacagaagaaggctgatgaagcaggacttctctgtgccccagctgccccacagcagcagccactggctgcggctgccccgcatcttctgcagctgccccatcggggagaacagccccctgctgagcggccagcaggtgtag

SEQ ID NO: 334691 - DNA, 2007 bp, Artificial Sequence
  derived and/or modified sequence
atggacctggtgctgaagcggtgcctgctgcacctggccgtgatcggggccttgctggcagttggcgctactaaggtgccccgcaatcaggattggctgggcgtctctcggcagttacggactaaggcttggaaccgacagctttaccctgagtggaccgaggctcagcgcttggattgctggagaggcggccaggtgagcctgaaggtgtccaatgatggcccaacactcatcggtgccaatgcctccttttccattgcactcaattttcctgggtcccagaaggtcttacctgacgggcaggtaatttgggtgaacaatacgatcattaacggagatcaggtgtggggcggccagcccgtgtacccccaggagacagatgacgcttgtatatttccagatggaggtccctgcccatcagggagctggtcgcagaagcgtagcttcgtgtatgtgtggaagacttgggggcaatactggcaggtacttgggggccctgtctcaggactttcgattggaactgggagggccatgcttgggacccacacaatggaggtaacggtttatcacagacgcggatcccgcagttacgttccattggcacatagctcctccgcctttactattaccgaccaggtgccattttcagtatctgtgagccagctaagagctctggacggggggaacaaacactttctgcgaaatcagcccctcacctttgcactccagctgcatgatccaagcgggtatctggccgaggcagacctgagctatacctgggatttcggcgattctagcgggaccctgatctcaagggccctggtagttacccacacctacctcgaacccggacctgtgaccgcacaggttgtcctgcaggccgctattccactcacaagctgcggatcaagtccggttcctggcaccactgatggtcatagacctacagcagaagctcctaatacaaccgccgggcaggtgcctacaacggaagttgtgggtactaccccaggtcaggctccaacagctgaacctagcggaaccacttccgtacaggtgccaactactgaagtgatatccaccgcgcccgtccagatgccaaccgccgagtctaccgggatgacaccagaaaaggtacccgtgtcggaagtgatggggacaaccctggctgaaatgtctaccccagaggccaccgggatgactccagctgaagtaagcatcgtggtgctatcggggaccaccgccgcacaagtgaccacaacagaatgggtagaaaccacagcacgcgagctgccgatcccggaaccagagggccccgatgccagcagtatcatgagcacagagtccattacaggctcgttaggccccctgttagacggcactgccactctgcggctagtcaagcggcaggtgccactggactgcgttctctaccgctacggctcattcagcgtcactctggatatagtgcagggcatcgagtccgccgagattctacaggccgtgcctagcggtgagggtgatgcctttgaactaaccgtgtcttgccaaggggggcttccaaaagaagcatgcatggaaatcagttcgccaggatgtcagcctcccgcccaacggctttgccagcctgtattgccatcaccagcatgccagctggtgctgcaccagattcttaaaggcggatccgggacttactgcctgaatgtatccctggcggacacgaactccctagccgtggtctctacacagttaatcatgcccgtgcccggtatcctgctgaccgggcaggaggcaggtctcggacaagtaccactgattgtgggcattctgttggtgcttatggcagttgtcctggcttcactaatctatcgccgacgactcatgaaacaggacttctcagtaccgcagttaccacactctagtagccattggttgcgactcccccgtatattctgtagttgtccgatcggtgaaaactctccgctgctgtctgggcagcaggtctag

SEQ ID NO: 334692 - DNA, 2007 bp, Artificial Sequence
  derived and/or modified sequence
atggacctggtgctgaagcggtgcctgctgcacctggccgtgatcggcgcactactcgctgtcggcgccacaaaagttccccgtaatcaggattggttgggggttagtagacaactcaggacaaaggcctggaatcggcagttgtatccggaatggacagaggcccagaggctcgattgctggaggggtggccaggtatcgctcaaggttagcaacgacggcccaaccctgattggtgcaaacgcatcatttagcatcgcgcttaattttcccggctcccagaaggtgcttcctgacggccaagtgatctgggtgaacaacaccataattaacggttcgcaagtttgggggggtcagccagtgtatccacaggagacagatgacgcttgcatcttccccgacggtggtccatgccccagtggcagttggtcccagaaaaggtccttcgtgtacgtttggaagacatggggacagtattggcaggtactaggaggccccgtgtctggcctcagcataggaacaggacgggcaatgttagggacacacaccatggaggtcacagtctaccataggcgagggagtcgtagctacgtccctctggcccacagcagttcagcgtttacaatcacagatcaggttcccttttcggtgagtgtgtctcagctgagggcccttgacggagggaacaagcacttcttgagaaaccaaccccttacctttgcgctgcagctgcacgatccaagcggctacctggccgaagcagatctcagctatacttgggactttggggactccagtggtacattaattagccgggccctggtggtgacccacacttacctcgagccaggcccagtgactgcacaggtcgtcttgcaagcagcaatccctttgacatcctgtggcagctctccagtcccaggcacaaccgacgggcatcggccaaccgcagaggccccgaatactacggcagggcaggtccccacaaccgaagtagtggggacgacccctgggcaggctccaacagccgagccttccggtactacaagcgtgcaggtccctaccacagaggtgatcagtacagcacccgtccagatgcccaccgccgaaagtacaggaatgactccggaaaaggtgccggtatcagaagtgatgggtacaacccttgccgagatgtcaacccctgaagccactggcatgacacctgcggaggtttctatcgtggtgctctccggcaccaccgcagctcaggtcacgacaaccgaatgggtggagaccactgccagagagctgccaatacccgaacccgaggggcccgatgctagctccattatgagtactgagagcattaccgggtctctggggcctctcttagatggtactgctaccctgcggctcgttaagcgacaggtgcccctggattgtgtgctttatcggtacgggtcctttagcgtcacactggacatcgtccaaggaatcgaatcggcggaaatcctccaggccgtcccttcaggtgagggcgatgccttcgaactcacagtatcctgccaaggcgggcttcctaaggaagcttgtatggaaatctcctcccccgggtgtcagccacccgcacaaagactgtgccaaccggtcctgcctagcccggcatgccagctggtgctgcatcaaattttgaaaggtgggtctggaacctattgccttaatgtgtctctggccgacacaaacagcctggccgttgtgtccacacaactgattatgcctgtgcccggcattcttttgaccggacaggaagcgggactcgggcaggtgcctctgattgtgggcattctgctggtgcttatggccgtcgtactcgcatccttaatctatcgtcggcggctgatgaagcaggatttcagtgtcccccagctgcctcactcatctagccattggcttcggcttccaagaatcttttgcagctgtccgatcggcgagaacagcccactcctttccggacaacaggtttag

SEQ ID NO: 334693 - RNA, 2007 nt, Artificial Sequence
  derived and/or modified sequence
auggauuuggugcucaagcgcugucugcugcauuuggccguaaucggcgcucuguuggcggugggagcuaccaaaguuccaagaaaucaggacuggcucggugugagcagacaacucaggacaaaagcuuggaacaggcagcuguacccugaguggacagaagcucagaggcuggauugcuggaggggaggccaggugagccugaaagucucuaaugaugggccaacacuuauuggugccaacgcuaguuuuucuauugcguuaaauuuuccagguagccagaaaguucuuccugacggacaggugauuugggugaauaacacuauuaucaauggagaucaggugugggguggacagcccguuuauccacaggagacagacgaugcaugcaucuuccccgaugggggacccuguccuaguggcagcuggagucaaaagaggaguuucguguauguuuggaagaccugggggcaguauuggcaagugcugggcggcccuguuuccggacuuagcauaggaaccgguagagccaugcugggcacccacacaauggaagugacaguguaucacagaagaggcucccggagcuacgucccucuggcucacagcaguucagccuuuaccauuaccgaccagguccccuucucugucagugucucacagcuccgcgcgcuggacggaggaaauaagcauuuccugagaaaccaaccgcuaaccuuugcuuuacagcuccacgauccaucuggcuaccuggccgaagcagaucuuuccuacacuugggauuuuggugauagcuccggcacgcuuaucucacgggcccucguggucacccauacuuaccucgaacccgggccagugacugcccagguuguuuugcaagccgcuaucccucuuacauccugcggcaguucaccuguuccagggacuacagacggucacagacccacagccgaggcaccuaacaccacagcaggacagguuccgaccacggaggucgucggcacuacucccggucaggccccaaccgcagagcccucagggacuacgucagugcagguuccaacgaccgaagugauuucaacugcuccagugcaaaugccaacagccgaguccaccgguaugacaccagaaaaaguuccuguaagugaggucauggggacuacguuagccgagauguccacccccgaggccacaggcaugacacccgccgagguaaguauuguggugcuuucaggaaccaccgcugcucagguuacaaccaccgaauggguggagacaacagcucgagaacugccgauacccgaacccgaggguccugacgcuucuuccaucauguccacagagaguauuaccggcucucucgguccucugcuggaugggacugccacccuccgccuggucaaacgccaagucccccuggacugcgucuuauaucgcuacgguucuuuuagcgugacucuggauaucgugcagggcauugaaucugccgagauucuccaagcuguccccuccggcgaaggugacgccuucgagcuaacugugaguugucaagguggccuaccgaaagaagcuugcauggaaauuaguaguccuggaugccagccacccgcacagcggcugugccaaccugugcucccuucuccagccugccagcuggugcuucaucaaauccugaaaggcgguaguggaacauauugcuugaauguuagccuggcugacaccaacucauuggccgucguuagcacccagcugauuaugcccgugcccggcauucuguuaacgggucaggaggccggccuagggcagguaccccugaucgugggcauccuucucguucucauggccgucgugcuggcuucacugauuuaccgcaggagacugaugaaacaggacuucuccgugccacaacuuccacauucuagcucucacugguuacggcugccuagaauauuuuguaguugcccgauuggugagaacuccccucuucugucuggacagcagguguag

SEQ ID NO: 334694 - RNA, 2007 nt, Artificial Sequence
  derived and/or modified sequence
auggaccuuguccucaagcggugucuacuccaccuugcagucauuggagcguugcuugcaguaggcgcaaccaaggugcccaggaaccaggauuggcucggggugucccgccaacugcgaaccaaggcuuggaacaggcagcuguacccggaguggacagaagcccagaggcuggacuguuggcguggcggccaggugucguuaaaggugagcaacgacggaccaacacugauaggugccaacgccuccuucucgaucgcucuaaacuuuccaggcagccagaaaguucugccagauggacaggugauuuggguuaauaauacgaucaucaacgggagccaggugugggguggacaacccguguacccccaagagacugaugaugccugcauuuucccugauggaggcccuugcccaagcggaucuuggagccaaaaacgcagcuucgucuauguuuggaaaacuuggggccaguacuggcaggugcucggaggcccugugagcggcuuguccauagggaccggccgcgcuaugcugggcacucacacaauggaggucaccguuuaucaccggcgaggcaguagaucuuaugucccacuggcccauucaagcucagccuuuaccauaaccgaucaagugcccuucuccgucucggugucucaguuacgggcauuggauggaggcaauaagcacuucuugaggaaccagccacugacuuuugcacuucaauuacaugauccaucaggauaccuggccgaagccgaucucucguacacuugggauuuuggcgacagcaguggaacacugaucucaagagcauuagugguuacucacacuuaccuggagcccggccccgugaccgcacagguaguauugcaggccgcuauuccccuaacuagcugugguagcagucccguucccggaacgaccgacgggcaucgaccuaccgcggaagcacccaauaccacggcaggccaggugcccacaacugaggucgucgguacaacuccuggacaggcucccaccgcggagcccucuggcaccacgagcguccaggugccaacuacggaagucaucaguacugcaccuguacaaaugcccaccgcggaauccacugguaugacuccagaaaaagucccuguguccgagguaauggguacuacgcuagcggagaugucuacgcccgaggccacuggaaugaccccugccgaggugucaauugugguccuguccgguaccacugcugcacaggucacaaccacagaauggguugaaacaacagcccgagaacugccuauucccgagccugaagggccugacgcgucaagcaucaugucuaccgagagcaucacgggaagucugggcccacuacuggacgggacggcaacacugcggcuugugaaacggcaggugccgcucgauugcgugcuguacagguacggcuccuucucgguaacacuggacaucgugcagggaauagagucugcugagauccugcaggccguccccucaggcgaaggggacgcuuucgaacugacugucuccugccaaggcggcuugccaaaagaagccugcauggaaauuaguuccccuggcugccaaccaccugcucagcgcuugugccagcccguccuaccuucacccgccugucagcuugucuugcaucagaucuugaagggcgguaguggaacguacugucuuaaugugucccuggccgacacgaauucucuugccguuguuucaacacaguuaauuaugccugugccugguaucuugcucacgggccaggaagcgggauuaggacagguuccucucauugucggcauacugcuagugcugauggccgucguacuggcaagccuuauuuaccgcagaagacuuaugaaacaggacuucagcgucccacaacuuccucacucuagcucacacuggcucagauugccucggauuuuuugcucgugucccaucggagagaauucaccacugcuuucagggcaacaaguguag

SEQ ID NO: 334695 - RNA, 2007 nt, Artificial Sequence
  derived and/or modified sequence
auggaucucguacuuaaacgaugcuugcugcaucuggcugugaucggugccuuauuggcagugggggccacaaaagugccucgaaaucaagauugguuaggcgugucacgccaacugcgcaccaaagcauggaaucgucagcuuuauccugaauggaccgaagcccagaggcucgacugcuggagggguggccaaguguccuugaagguguccaacgauggucccacacugaucggcgccaacgccaguuuuagcauugccuuaaauuuucccggaagucaaaaagugcuccccgauggccagguaaucugggugaacaauacaaucauaaacggcgaccaagucuggggaggacagccuguguauccucaggagacagaugaugcuuguauauucccugacggcggcccauguccaucaggaagcuggucucagaagaggagcuuuguauauguguggaaaacaugggggcaguacuggcagguccucgggggacccguguccggccugagcauugguacagguagagccaugcuugggacucacaccauggaagucacagucuaccauagaagaggcagccguagcuauguaccacuugcacauucuucuucagcauucacuaucacagaucaggugcccuucuccgugucugugagccaacuucgggcccuugacggaggaaacaagcauuuuuuacgcaaccagccacuaacuuuugccuugcaauuacaugaccccucuggcuaccuggcagaagcagauuuaucauacacuugggacuucggugacucguccggaaccuugaucucaagggcucuugucgugacacauacauaccuugaacccggucccgucacagcacaggucguucuucaggccgccauaccgcucaccucaugcggcaguucaccuguuccagggacuacagacggucacagacccacagccgaggcaccuaacaccacagcaggacagguuccgaccacggaggucgucggcacuacucccggucaggccccaaccgcagagcccucagggacuacgucagugcagguuccaacgaccgaagugauuucaacugcuccagugcaaaugccaacagccgaguccaccgguaugacaccagaaaaaguuccuguaagugaggucauggggacuacguuagccgagauguccacccccgaggccacaggcaugacacccgcagaggugucuauaguuguacugaguggaacgacagcagcacaggugacgacgaccgaguggguagaaacaacagcucgagaacuuccaaucccggagccagaaggucccgacgcaucgagcauaaugaguaccgagucgauuacaggcagccuaggcccgcuucuggauggaacugcuacuuugagauugguaaaacgucaggugccgcuagacugcguccuguauagguauggcuccuucagcguuacacuggauauagugcaaggcauagaauccgccgagauccuucaggccgugccgucuggugaaggagacgccuucgaguugacagucaguugucagggaggacuuccuaaagaagccuguauggagaucuccucuccugguugucagccgccugcgcaaagacugugucagccuguacugcccucuccugccugccagcuggugcuacaucaaauccuuaaggguggcagcggcaccuauugccuaaauguuucucuugccgauacgaauagucuggcaguagucuccacacagcucaucaugccugugccgggaauccuucucacuggccaagaagccggacucggacaaguaccacugaucguuggcauccuccuaguacugauggccgucguccucgcaagccugaucuauaggcgucgcuuaaugaaacaggacuuuagcguaccucaguugccucacagcagcucacacuggcuaaggcuuccacgaaucuuuuguucauguccuauaggagagaauucuccacuauuaaguggacagcaaguguag

SEQ ID NO: 334696 - RNA, 2007 nt, Artificial Sequence
  derived and/or modified sequence
auggaucucguauugaaacgcugcuugcugcacuuggccguaauuggugccuuacuugcagucggagcuacuaaaguaccgcggaaucaggauuggcuugggguuucuagacagcuccgaacaaaggccuggaaucggcaguuguacccagaauggaccgaggcacaacgccuugacuguuggcgcggcggacaggugucgcugaaggucucuaaugacggaccgacacucauuggggcgaacgcuucguuuucuaucgcucucaauuucccgggcagccagaaaguucugccugacggccaaguaauuuggguaaacaauaccaucauuaacggaucucagguuuggggcggacaaccuguuuauccccaggaaacagaugacgcuugcaucuuuccugaugggggcccuuguccaagcggguccuggucucagaagcguuccuucgucuacguguggaagacuuggggacaguauuggcagguuuugggagguccagucagugggcugucaaucggaacuggaagagcaaugcugggaacccauacuauggaagucaccguguaucacagacgugggagucgcucuuacgugccucuggcucacucguccuccgccuucaccauuacggaccaagugcccuucagcguaagcgucucccagcuccgugcucucgaugggggaaauaaacacuuccucaggaaccagccacuuaccuuugcccuucagcugcaugaucccucuggcuauuuagccgaagccgaccugucuuacacgugggacuuuggugacucuagcgguacucucauuucaagagcucugguagugacucauacauaucuggaaccagggccugucacugcccaaguggugcugcaggccgccaucccccugacauccugcggcagcaguccaguuccuggaacaaccgauggccaucgaccuaccgcagaggccccaaauacuacugccgggcaggugccaacaacagaggucgucggaacaacucccggccaagccccaacagcugagcccucugguaccaccuccgugcaaguuccaacuacagaggugaucucuacagcucccguucaaaugccaaccgcggaaucuaccgggaugacuccagaaaagguccccgugucugaggugaugggcaccacucuggcagaaaugucuacccccgaagccacuggcaugaccccagccgaggugucuaucguggugcuguccggaacgacugcagcccaagugaccacgacagaguggguggagacuacagcucgcgaguuaccuauuccagaaccagaaggcccugacgcguccucuauuaugaguacagagagcaucacuggguccuugggaccucuguuagacggcacugcuacauuaagauuggucaaacgucaggugccccucgacuguguccuguaucgauaugguuccuucucaguaacccuggauauagugcaaggaaucgaguccgcugaaauccuccaggcggucccuucuggcgaaggcgaugccuucgagcucacuguuagcugucaaggcggccucccuaaagaggcuuguauggagauaagcucuccaggaugucagccucccgcccagagacugugccaaccuguccuccccagccccgccugucagcucguuuugcaccaaauucucaaagggggcagugggacuuauuguuugaaugugagccuugccgauaccaacaguuuggccguuguguccacccaauugauuaugcccguacccggaauccuccucaccggacaggaagcugguuugggacaagugccucuuauuguagguauccuacucgugcucauggccguagugcucgccucauuaauuuaucgcagaagacuaaugaaacaggacuuuuccgugccgcaguugccccacucaagcucccauuggcuacgcuuaccucgaauuuucugcaguuguccuaucggcgagaacuccccgcuuuuaucgggacagcaggucuag

SEQ ID NO: 334697 - protein, 626 aa, Artificial Sequence
  derived and/or modified sequence
MDLVLKRCLLHLAVIGALLAVGATKVPRNQDWLGVSRQLRTKAWNRQLYPEWTEAQRLDCWRGGQVSLKVSNDGPTLIGANASFSIALNFPGSQKVLPDGQVIWVNNTIINGDQVWGGQPVYPQETDDACIFPDGGPCPSGSWSQKRSFVYVWKTWGQYWQVLGGPVSGLSIGTGRAMLGTHTMEVTVYHRRGSRSYVPLAHSSSAFTITDQVPFSVSVSQLRALDGGNKHFLRNQPLTFALQLHDPSGYLAEADLSYTWDFGDSSGTLISRALVVTHTYLEPGPVTAQVVLQAAIPLTSCGSSPVPGTTDGHRPTAEAPNTTAGQVPTTEVVGTTPGQAPTAEPSGTTSVQVPTTEVISTAPVQMPTAESTAAQVTTTEWVETTARELPIPEPEGPDASSIMSTESITGSLGPLLDGTATLRLVKRQVPLDCVLYRYGSFSVTLDIVQGIESAEILQAVPSGEGDAFELTVSCQGGLPKEACMEISSPGCQPPAQRLCQPVLPSPACQLVLHQILKGGSGTYCLNVSLADTNSLAVVSTQLIMPVPGILLTGQEAGLGQVPLIVGILLVLMAVVLASLIYRRRLMKQDFSVPQLPHSSSHWLRLPRIFCSCPIGENSPLLSGQQV

SEQ ID NO: 334698 - DNA, 1881 bp, Artificial Sequence
  derived and/or modified sequence
atggatttggtcttaaagcggtgcctactgcaccttgccgtgataggagctttgttagccgtgggtgctacaaaggtccctcggaaccaagactggttgggagtgtctcggcaattgcggaccaaagcatggaatcggcaactctatccagagtggacagaagcccagcgtctggattgttggcgcggtggacaggttagtctgaaagtgtctaatgacggtcccaccctgatcggcgctaacgccagcttttctatcgctctgaatttccccggttctcaaaaagtgctacctgatggacaggtaatctgggtgaacaataccattatcaatggtgatcaggtgtggggcggacagcccgtctaccctcaggagaccgacgacgcttgtattttcccggacggaggcccttgtccaagtgggagctggtcgcaaaaacgatctttcgtctacgtttggaagacatgggggcagtactggcaagttttgggtggcccagtttctggcttgtcaatcgggaccggcagagccatgctgggcactcatacaatggaggtcacggtgtaccaccggagagggtcccgctcatacgtccctctggcgcactcaagtagtgctttcacaatcactgatcaagtgcccttttccgtcagcgtgagccagctgcgagccctggacggtggaaataaacattttctgagaaaccagccattgacctttgccttacagctgcacgatccctctggatatttagcggaggctgatctgtcttacacatgggattttggagatagcagtggcactctcatctcaagggcgctggtcgtcacccacacttatctggaacccggaccagttacagctcaggttgttcttcaggcagctatcccgctgaccagctgtggcagctcccccgtgcctgggacaaccgacggccatcgacctactgcagaggcgccaaacaccactgcaggacaggttcctaccaccgaagtggtgggaacaacccctggacaagccccaaccgccgaaccttccgggactacatccgtgcaggtcccaaccactgaggtgatttccacagccccagtgcaaatgccaacggccgagtccaccgccgctcaagtgaccactaccgagtgggtggaaacaaccgcccgagagttgcccatccctgaacccgagggccctgatgctagttccattatgagcacagagagtattactggaagcctcggcccattgctggatggaacagccactctgagattggtgaagcgacaggtcccattagactgtgtgctgtatcgctacggaagtttttcagtgaccctagacatcgtgcaaggaattgagagcgccgagatcctccaggccgtcccaagtggtgagggcgacgccttcgaattgacggtgtcgtgtcaggggggtctccccaaggaggcttgcatggagatcagttcccccggttgtcaacctccagcccaaagactctgccagcccgtgctgcccagcccagcctgtcaactggtactgcaccagatactcaaagggggtagtggcacctactgccttaacgtgtccctggctgacacaaacagcctcgctgtagtctcaactcagctgataatgccggtgcctggaatcctgctcactgggcaggaggccggacttgggcaagttcctctaatagtaggcattttgctagttctcatggctgttgttctcgcctccctgatttaccggcgtcgccttatgaagcaggacttcagcgtcccgcaactaccccacagctccagccattggctgaggctccctcgtatattctgttcctgtcccattggtgagaatagtcctctcctgtctggacaacaggtgtag

SEQ ID NO: 334699 - DNA, 1881 bp, Artificial Sequence
  derived and/or modified sequence
atggacctagttcttaagcggtgcctgctgcacctggccgtgatcggagctcttcttgctgtgggcgcgacaaaagtgccaagaaaccaggactggttgggagtatctcggcagcttagaaccaaggcttggaaccggcagctctacccagagtggacagaagcgcaaagattagactgttggagagggggacaagtctcgctgaaagtcagtaatgatggccctacattaattggcgctaacgcctccttctctatcgcactgaattttccagggtcccaaaaggttctgccagacgggcaggttatttgggttaataacactattatcaacggcgaccaggtgtggggcggtcagcctgtctatccacaggaaacggacgacgcttgtattttcccagacggcggcccctgcccttctggctcttggagtcagaagcgtagctttgtctatgtttggaagacctggggacaatactggcaggtgctaggcggacctgtgagcggcctgtccatcggaaccggccgggccatgcttggcacacatacaatggaagttaccgtctatcaccggcgaggctctcggagttatgtgcccctagcgcacagtagctcagcgtttactatcaccgaccaagtgcccttttccgtgtccgttagccagctgcgggccctggatggaggaaacaagcatttcctgaggaatcagcccctgactttcgctttgcagctgcacgatcctagtggatatctcgccgaagccgacctgtcctacacatgggatttcggagatagcagcggaacactaatcagcagggccctggtcgtgacacacacttaccttgaacctgggcctgtgactgcccaggtggtgctgcaagcagcaattccccttactagttgcggctcctctccagtgccaggaactactgatggccacagaccgactgccgaagcccctaatactactgccggccaagtccccacaactgaggtggtcgggaccacacccggccaggcccctactgctgagccttccggaaccaccagcgtccaggtccctacgacagaggtaatctcaaccgcccctgtgcagatgccaaccgcggaatcaactgcagcccaagttactacaaccgaatgggtggagaccactgctcgtgagcttcccattccagagcccgaaggtccggatgcttctagcataatgtcaacggaatcaattacagggtctctgggtccactgcttgacggaactgcgacccttcggctggtgaagcgtcaggtgccactggattgtgtcttgtacagatatggtagtttcagtgtgacattggatatagtgcaagggatagagtctgctgagatcctgcaagcagtcccatccggcgaaggggacgcatttgagctcacggtgtcctgtcaaggggggctgccaaaagaagcctgtatggagatctcatcacccggatgccaaccaccagcacaacgtctgtgtcagcctgtcttaccatcccccgcatgccaacttgtgttgcaccaaatcctcaagggtggcagcggcacatactgcttgaacgtgagcctggcagacaccaattcgctcgccgtcgtcagcacccagctgattatgcctgtgccaggcatcttgttgaccggtcaagaggccggactcggacaggttcctcttattgtcgggattctcctcgtactgatggcggtggtgttggcttccttgatctatcgccgcaggttaatgaagcaagattttagcgtaccacaactgccacactcttccagccattggctgcgcctgcctcgcatcttctgttcctgtcctattggcgaaaactctccactgcttagcggccagcaggtgtag

SEQ ID NO: 334700 - DNA, 1881 bp, Artificial Sequence
  derived and/or modified sequence
atggaccttgtgctgaaaagatgccttctccatctggcagttatcggcgcactgctggctgtcggcgccaccaaagtgcccagaaaccaggattggctaggcgtttctagacaactcaggacaaaagcctggaaccgacagctgtaccccgagtggacggaggcccaaagacttgattgttggcgcggtggacaagtaagccttaaggtgtctaacgatggccccactctgataggtgctaatgcctcgtttagtatcgccctcaactttccaggctcacagaaagtgctccctgacggtcaggttatatgggttaataataccatcattaatggcgaccaggtgtggggaggccagcccgtatacccacaagaaaccgacgacgcgtgcattttcccagacggcggtccatgccctagtggatcctggtcacagaagcggagttttgtctacgtatggaagacctggggtcagtactggcaggtactcggtggccctgtgagtggtctttctatcggaaccggacgtgccatgctgggaacacacaccatggaggtaactgtctatcatcgaagagggagccggtcctacgtgcctctcgctcattcatcatcggcatttactataaccgatcaggtcccattcagcgttagcgtttcacagttacgcgctcttgacggtggcaataagcattttctgagaaatcagcctttgacgttcgctttgcagctgcatgacccctcaggctacctcgccgaagcagatctaagttatacgtgggatttcggagactcatccggcacactcatctctagagcactggtcgtaacccatacatacctggagccaggtcccgtcaccgctcaggtggttcttcaggctgctatccccttaacttcttgcggctcctctccagtgccaggaactactgatggccacagaccgactgccgaagcccctaatactactgccggccaagtccccacaactgaggtggtcgggaccacacccggccaggcccctactgctgagccttccggaaccaccagcgtccaggtccctacgacagaggtaatctcaaccgcccctgtgcagatgccaaccgcggaatcaactgcagcccaagttactacaaccgaatgggtggagaccactgctcgtgagcttcccattccagagcccgaaggtccggatgcttcttccataatgtcaacagaatcaatcactggtagtctgggtcctttactggacggtaccgcaacccttcgtctggttaagcgccaggtgccactggactgtgtgctttataggtatggctcgttctccgtgactctggatatcgtccagggaattgaatccgctgaaatcttacaggcagtgccaagtggggaaggcgatgctttcgaactgacagtctcctgccaaggtggcctcccgaaagaagcctgcatggaaatttcttcacccggatgccagccgcccgcccagaggctgtgtcagccagtgctcccatcccccgcatgtcagcttgttctgcaccaaatactcaaaggcgggtccggcacatactgtctgaatgtaagtcttgcagacactaactcccttgccgtcgtgtctactcagttaataatgcccgtacccggcatcttgctgactggccaagaagcgggactgggccaggtccctctaatcgtggggatccttctggtgttaatggctgtggtactggctagcctgatatatcggcggcggctcatgaagcaggacttttctgttcctcaactgccccacagtagtagccattggctcagattaccacgaatcttttgctcctgccctattggcgaaaacagcccattactatctggacaacaagtgtag

SEQ ID NO: 334701 - DNA, 2077 bp, Artificial Sequence
  derived and/or modified sequence
agcccagcgctcctccccgcaaatgatcccgccccaggggcctatcccagtccccccagtgcctttggttgctggagggaagaacacaatggatctggtgctaaaaagatgccttcttcatttggctgtgataggtgctttgctggctgtgggggctacaaaagtacccagaaaccaggactggcttggtgtctcaaggcaactcagaaccaaagcctggaacaggcagctgtatccagagtggacagaagcccagagacttgactgctggagaggtggtcaagtgtccctcaaggtcagtaatgatgggcctacactgattggtgcaaatgcctccttctctattgccttgaacttccctggaagccaaaaggtattgccagatgggcaggttatctgggtcaacaataccatcatcaatggtgaccaggtgtggggaggacagccagtgtatccccaggaaactgacgatgcctgcatcttccctgatggtggaccttgcccatctggctcttggtctcagaagagaagctttgtttatgtctggaagacctggggccaatactggcaagttctagggggcccagtgtctgggctgagcattgggacaggcagggcaatgctgggcacacacaccatggaagtgactgtctaccatcgccggggatcccggagctatgtgcctcttgctcattccagctcagccttcaccattactgaccaggtgcctttctccgtgagcgtgtcccagttgcgggccttggatggagggaacaagcacttcctgagaaatcagcctctgacctttgccctccagctccatgaccccagtggctatctggctgaagctgacctctcctacacctgggactttggagacagtagtggaaccctgatctctcgggcacttgtggtcactcatacttacctggagcctggcccagtcactgcccaggtggtcctgcaggctgccattcctctcacctcctgtggctcctccccagttccaggcaccacagatgggcacaggccaactgcagaggcccctaacaccacagctggccaagtgcctactacagaagttgtgggtactacacctggtcaggcgccaactgcagagccctctggaaccacatctgtgcaggtgccaaccactgaagtcataagcactgcacctgtgcagatgccaactgcagagagcacagctgcacaggtaacaactacagagtgggtggagaccacagctagagagctacctatccctgagcctgaaggtccagatgccagctcaatcatgtctacggaaagtattacaggttccctgggccccctgctggatggtacagccaccttaaggctggtgaagagacaagtccccctggattgtgttctgtatcgatatggttccttttccgtcaccctggacattgtccagggtattgaaagtgccgagatcctgcaggctgtgccgtccggtgagggggatgcatttgagctgactgtgtcctgccaaggcgggctgcccaaggaagcctgcatggagatctcatcgccagggtgccagccccctgcccagcggctgtgccagcctgtgctacccagcccagcctgccagctggttctgcaccagatactgaagggtggctcggggacatactgcctcaatgtgtctctggctgataccaacagcctggcagtggtcagcacccagcttatcatgcctgtgcctgggattcttctcacaggtcaagaagcaggccttgggcaggttccgctgatcgtgggcatcttgctggtgttgatggctgtggtccttgcatctctgatatataggcgcagacttatgaagcaagacttctccgtaccccagttgccacatagcagcagtcactggctgcgtctaccccgcatcttctgctcttgtcccattggtgagaacagccccctcctcagtgggcagcaggtctgagtactctcatatgatgctgtgattttcctggagttgacagaaacacctatatttcccccagtcttccctgggagactactattaactgaaataaatactcagagcctg

SEQ ID NO: 334702 - DNA, 1881 bp, Artificial Sequence
  derived and/or modified sequence
atggacctggtgctgaagagatgcctgctgcacctggccgtgatcggcgccctgctggccgtgggcgccaccaaggtgcccagaaaccaggactggctgggcgtgagcagacagctgagaaccaaggcctggaacagacagctgtaccccgagtggaccgaggcccagagactggactgctggagaggcggccaggtgagcctgaaggtgagcaacgacggccccaccctgatcggcgccaacgccagcttcagcatcgccctgaacttccccggcagccagaaggtgctgcccgacggccaggtgatctgggtgaacaacaccatcatcaacggcgaccaggtgtggggcggccagcccgtgtacccccaggagaccgacgacgcctgcatcttccccgacggcggcccctgccccagcggcagctggagccagaagagaagcttcgtgtacgtgtggaagacctggggccagtactggcaggtgctgggcggccccgtgagcggcctgagcatcggcaccggcagagccatgctgggcacccacaccatggaggtgaccgtgtaccacagaagaggcagcagaagctacgtgcccctggcccacagcagcagcgccttcaccatcaccgaccaggtgcccttcagcgtgagcgtgagccagctgagagccctggacggcggcaacaagcacttcctgagaaaccagcccctgaccttcgccctgcagctgcacgaccccagcggctacctggccgaggccgacctgagctacacctgggacttcggcgacagcagcggcaccctgatcagcagagccctggtggtgacccacacctacctggagcccggccccgtgaccgcccaggtggtgctgcaggccgccatccccctgaccagctgcggcagcagccccgtgcccggcaccaccgacggccacagacccaccgccgaggcccccaacaccaccgccggccaggtgcccaccaccgaggtggtgggcaccacccccggccaggcccccaccgccgagcccagcggcaccaccagcgtgcaggtgcccaccaccgaggtgatcagcaccgcccccgtgcagatgcccaccgccgagagcaccgccgcccaggtgaccaccaccgagtgggtggagaccaccgccagagagctgcccatccccgagcccgagggccccgacgccagcagcatcatgagcaccgagagcatcaccggcagcctgggccccctgctggacggcaccgccaccctgagactggtgaagagacaggtgcccctggactgcgtgctgtacagatacggcagcttcagcgtgaccctggacatcgtgcagggcatcgagagcgccgagatcctgcaggccgtgcccagcggcgagggcgacgccttcgagctgaccgtgagctgccagggcggcctgcccaaggaggcctgcatggagatcagcagccccggctgccagccccccgcccagagactgtgccagcccgtgctgcccagccccgcctgccagctggtgctgcaccagatcctgaagggcggcagcggcacctactgcctgaacgtgagcctggccgacaccaacagcctggccgtggtgagcacccagctgatcatgcccgtgcccggcatcctgctgaccggccaggaggccggcctgggccaggtgcccctgatcgtgggcatcctgctggtgctgatggccgtggtgctggccagcctgatctacagaagaagactgatgaagcaggacttcagcgtgccccagctgccccacagcagcagccactggctgagactgcccagaatcttctgcagctgccccatcggcgagaacagccccctgctgagcggccagcaggtgtag

SEQ ID NO: 334703 - DNA, 1881 bp, Artificial Sequence
  derived and/or modified sequence
atggacttagtcctgaagagatgcttactgcacctcgccgtgattggagccttgctggccgtgggcgcaaccaaagtcccgcggaatcaagactggctaggagtaagccggcagttgcgcacaaaagcctggaaccgccaactgtacccagaatggactgaagcacagcggctcgattgctggagaggcgggcaagtgtcacttaaggtcagcaatgacgggccaacgcttatcggtgcaaatgcgagtttctccatcgctctgaattttcctggctcccaaaaagttcttccagacggacaggtaatatgggtcaacaatacaatcatcaacggcgatcaggtttggggtggccagccggtctatccacaagaaacggacgacgcctgtatctttccagacggaggcccgtgcccctctggctcatggagccagaagcgctcctttgtgtatgtatggaagacttggggccagtactggcaggtcctgggaggacctgtttctggtctgtctatcggaactgggcgagccatgctggggactcacacaatggaagttacagtttatcaccgtaggggcagtcggtcgtatgttcctctcgcacattccagctccgcatttacaattaccgatcaggtgccattctccgtgagcgtcagccagctaagggccctggatggcggcaataaacactttctgaggaatcagcccttaacctttgctctgcagttgcacgacccttcaggttacttggctgaggctgatctgagttatacgtgggatttcggcgatagctcaggtaccctgatctccagggcccttgtcgtgacacatacctacctcgagccgggccctgtgactgcccaggtagtgctccaagccgccattccattgacatcttgcggttccagcccagtaccgggcacaaccgatggccatcgaccaacagcggaggctccgaacacaactgcaggtcaggtgccaaccacagaagtggtaggcacgacaccgggacaggccccaacggccgagccaagcgggaccacaagcgttcaggtgcctaccaccgaagtaatcagcactgcccctgtgcagatgccaaccgccgagtccaccgccgcccaagtgacaactacggagtgggtggaaactaccgctcgggaactccctataccggaaccagaggggcccgatgccagctccattatgagcactgagagcattaccggcagtctgggaccgctgttggacggtacagccactctgaggttggttaagcgccaggtgcccctcgactgcgtgctctacagatacggctccttttcagtgacactggacattgtgcaggggatcgagtctgccgaaatcctgcaggcggttccctcaggtgagggggatgcctttgaacttacagtatcctgtcagggcgggctccccaaggaagcttgcatggagatttcttccccaggctgtcagccgccagcacagagattatgtcaacctgtactgccaagtcctgcttgccagctggtgctccatcagatcctgaaaggcggaagcggcacgtattgcttgaacgtctctctggctgatactaactctcttgctgtggtgtcaacacagctgatcatgcctgtcccagggattctgctgacaggccaggaggccggcctggggcaggttcctctcatcgtgggcattctacttgtcctcatggccgtggtgctcgccagtttaatctataggcgccgcttaatgaagcaggatttcagtgtgcctcagctccctcacagctcaagccattggttgaggctccctagaatattttgttcatgtcccatcggtgaaaactcccctcttctctccggacagcaggtgtag

SEQ ID NO: 334704 - DNA, 1881 bp, Artificial Sequence
  derived and/or modified sequence
atggacctggtgctgaagcgctgcctgctgcacctggccgtgattggagccctgctggccgtgggcgccaccaaggtgcccaggaaccaggactggctgggcgtgtcccggcagctgcggaccaaggcctggaaccggcagctgtacccagagtggacagaggcccagaggctggactgctggaggggcggccaggtgtccctgaaggtgtccaatgatggccccaccctcatcggggccaatgccagcttcagcatcgccctgaacttccctggcagccagaaggtgctgcctgatggccaggtgatctgggtgaacaacaccatcatcaatggagaccaggtgtggggcggccagcctgtgtacccccaggagacagatgatgcctgcatcttcccagatggcggcccctgccccagcggctcctggagccagaagaggagctttgtgtatgtgtggaagacctggggccagtactggcaggtgctgggcggccctgtgtctggcctgagcatcggcaccggccgggccatgctgggcacccacaccatggaggtgacagtgtaccacagaagaggcagccgctcctatgtgcccctggcccacagcagcagcgccttcaccatcacagaccaggtgcccttctctgtgtctgtgtcccagctgcgggccctggatggcggcaacaagcacttcctgaggaaccagcccctgacctttgccctgcagctgcatgaccccagcggctacctggccgaggccgacctgagctacacctgggactttggagacagcagcggcaccctcatcagccgggccctggtggtgacccacacctacctggagcccggccctgtgacagcccaggtggtgctgcaggccgccatccccctgaccagctgtggcagcagccctgtgcccggcaccacagatggccaccggcccacagctgaggcccccaacaccacagctggccaggtgcccaccacagaggtggtgggcaccaccccaggccaggcccccacagctgagcccagcggcaccacctctgtgcaggtgcccaccacagaggtgatcagcacagcccctgtgcagatgcccacagctgagagcacagctgcccaggtgaccaccacagagtgggtggagaccacagcccgggagctgcccatccctgagcctgagggcccagatgccagcagcatcatgagcacagagagcatcaccggcagcctgggccccctgctggatggaacagccaccctgcggctggtgaagaggcaggtgcccctggactgtgtgctgtaccgctatggcagcttctctgtgaccctggacatcgtgcagggcattgaatctgctgagatcctgcaggccgtgcccagcggggagggagatgcctttgagctgactgtgtcctgccagggcggcctgcccaaggaggcctgcatggagatcagcagccctggctgccagcccccagcccagaggctgtgccagcctgtgctgcccagccctgcctgccagctggtgctgcaccagatcctgaagggcggcagcggcacctactgcctgaatgtgtccctggccgacaccaacagcctggccgtggtgtccacccagctgatcatgcctgtgcccggcatcctgctgaccggccaggaggccggcctgggccaggtgcccctcatcgtgggcatcctgctggtgctgatggctgtggtgctggccagcctcatctacagaagaaggctgatgaagcaggacttctctgtgccccagctgccccacagcagcagccactggctgcggctgccccgcatcttctgcagctgccccatcggggagaacagccccctgctgagcggccagcaggtgtag

SEQ ID NO: 334705 - DNA, 1881 bp, Artificial Sequence
  derived and/or modified sequence
atggacctggtgctgaagcggtgcctgctgcacctggccgtgatcggggctctactcgcagttggggctaccaaagtacccaggaatcaagactggcttggggtatcacgtcagctgcggacaaaagcatggaataggcaactttatcccgaatggacagaggcccagcgcctggattgttggcgaggcgggcaggtgagtctcaaagtcagcaatgatggccctacacttatcggcgccaatgcctcgttttctatcgccttaaatttccccggtagccagaaagtgctgcccgacggccaggtcatttgggttaacaacaccatcatcaacggggatcaggtgtggggaggtcaacctgtgtatccacaggagaccgacgacgcctgtatttttcccgatggtggaccatgtcccagtgggtcttggtcacaaaagcggtcttttgtgtacgtgtggaagacctggggacagtattggcaggtcctgggaggcccagtatcaggccttagtatcgggaccggcagagctatgctcggtactcataccatggaggtgaccgtgtatcataggaggggcagtaggtcatacgttcctttagcgcacagctcctctgcgtttacgataacggaccaagtgcccttttctgtgtcagtgtctcagctacgagccctggacgggggcaacaagcacttccttcgcaatcagccccttacttttgctcttcagctacacgatcctagcggttatctcgcggaggccgatctgtcgtacacatgggattttggtgactcttccggcaccctgatctctcgggcccttgttgttacacatacatatctagaacccggccccgtcactgcccaggtagttttacaggcggccattcccttgacaagctgcgggtcttcacctgtccctggaactacggatggtcatcggccaacggccgaggctccaaatacaaccgccgggcaggtgcctacaacggaggtcgtgggaaccacccccggacaggcccctacggctgaacccagcggtacaacttccgtccaggtacccactacagaagtgatctctacagcgccggtccagatgcctacagctgagagtactgccgcacaggtgactaccacagaatgggtggaaactacagctcgcgaattgcccattcccgagcctgaagggcctgatgcttcatcgatcatgtccaccgaatccatcaccgggtcgcttggccctctgctggacgggacagctacattgaggctggtgaagcgtcaggtgcctttagattgcgtgctgtatcgttatgggtccttttcggtgacactggatattgtccaaggaatcgaaagtgcagagatcttacaggccgtgccctccggcgagggcgacgcatttgaacttaccgtgtcttgtcagggaggtctgcccaaggaggcttgcatggagataagttctcctggttgtcagcctcccgcacaaaggctgtgtcaaccggtgctgccttctcccgcttgtcagctcgttttacatcagatacttaagggcgggagtgggacctactgcttgaacgtcagtctcgcggacactaattctctggctgtcgtctcaacacagctaataatgcctgtgcccggcatcttactgaccggccaggaagccggactgggacaagtccccctgattgtgggaattctccttgtcctgatggcagtggttctggcatccctgatctatcggcggcggctgatgaagcaggatttctcggtcccccagctgccccactcttcctcccattggctgagattaccccgaattttctgctcgtgccccattggcgaaaactcaccactgttatctggtcagcaggtctag

SEQ ID NO: 334706 - RNA, 1881 nt, Artificial Sequence
  derived and/or modified sequence
auggaccuaguucuuaagcggugccugcugcaccuggccgugaucggagcucuucuugcugugggcgcgacaaaagugccaagaaaccaggacugguugggaguaucucggcagcuuagaaccaaggcuuggaaccggcagcucuacccagaguggacagaagcgcaaagauuagacuguuggagagggggacaagucucgcugaaagucaguaaugauggcccuacauuaauuggcgcuaacgccuccuucucuaucgcacugaauuuuccagggucccaaaagguucugccagacgggcagguuauuuggguuaauaacacuauuaucaacggcgaccagguguggggcggucagccugucuauccacaggaaacggacgacgcuuguauuuucccagacggcggccccugcccuucuggcucuuggagucagaagcguagcuuugucuauguuuggaagaccuggggacaauacuggcaggugcuaggcggaccugugagcggccuguccaucggaaccggccgggccaugcuuggcacacauacaauggaaguuaccgucuaucaccggcgaggcucucggaguuaugugccccuagcgcacaguagcucagcguuuacuaucaccgaccaagugcccuuuuccguguccguuagccagcugcgggcccuggauggaggaaacaagcauuuccugaggaaucagccccugacuuucgcuuugcagcugcacgauccuaguggauaucucgccgaagccgaccuguccuacacaugggauuucggagauagcagcggaacacuaaucagcagggcccuggucgugacacacacuuaccuugaaccugggccugugacugcccagguggugcugcaagcagcaauuccccuuacuaguugcggcuccucuccagugccaggaacuacugauggccacagaccgacugccgaagccccuaauacuacugccggccaaguccccacaacugagguggucgggaccacacccggccaggccccuacugcugagccuuccggaaccaccagcguccaggucccuacgacagagguaaucucaaccgccccugugcagaugccaaccgcggaaucaacugcagcccaaguuacuacaaccgaauggguggagaccacugcucgugagcuucccauuccagagcccgaagguccggaugcuucuagcauaaugucaacggaaucaauuacagggucucuggguccacugcuugacggaacugcgacccuucggcuggugaagcgucaggugccacuggauugugucuuguacagauaugguaguuucagugugacauuggauauagugcaagggauagagucugcugagauccugcaagcagucccauccggcgaaggggacgcauuugagcucacgguguccugucaaggggggcugccaaaagaagccuguauggagaucucaucacccggaugccaaccaccagcacaacgucugugucagccugucuuaccaucccccgcaugccaacuuguguugcaccaaauccucaaggguggcagcggcacauacugcuugaacgugagccuggcagacaccaauucgcucgccgucgucagcacccagcugauuaugccugugccaggcaucuuguugaccggucaagaggccggacucggacagguuccucuuauugucgggauucuccucguacugauggcggugguguuggcuuccuugaucuaucgccgcagguuaaugaagcaagauuuuagcguaccacaacugccacacucuuccagccauuggcugcgccugccucgcaucuucuguuccuguccuauuggcgaaaacucuccacugcuuagcggccagcagguguag

SEQ ID NO: 334707 - RNA, 1881 nt, Artificial Sequence
  derived and/or modified sequence
auggaccuugugcugaaaagaugccuucuccaucuggcaguuaucggcgcacugcuggcugucggcgccaccaaagugcccagaaaccaggauuggcuaggcguuucuagacaacucaggacaaaagccuggaaccgacagcuguaccccgaguggacggaggcccaaagacuugauuguuggcgcgguggacaaguaagccuuaaggugucuaacgauggccccacucugauaggugcuaaugccucguuuaguaucgcccucaacuuuccaggcucacagaaagugcucccugacggucagguuauauggguuaauaauaccaucauuaauggcgaccagguguggggaggccagcccguauacccacaagaaaccgacgacgcgugcauuuucccagacggcgguccaugcccuaguggauccuggucacagaagcggaguuuugucuacguauggaagaccuggggucaguacuggcagguacucgguggcccugugaguggucuuucuaucggaaccggacgugccaugcugggaacacacaccauggagguaacugucuaucaucgaagagggagccgguccuacgugccucucgcucauucaucaucggcauuuacuauaaccgaucaggucccauucagcguuagcguuucacaguuacgcgcucuugacgguggcaauaagcauuuucugagaaaucagccuuugacguucgcuuugcagcugcaugaccccucaggcuaccucgccgaagcagaucuaaguuauacgugggauuucggagacucauccggcacacucaucucuagagcacuggucguaacccauacauaccuggagccaggucccgucaccgcucaggugguucuucaggcugcuauccccuuaacuucuugcggcuccucuccagugccaggaacuacugauggccacagaccgacugccgaagccccuaauacuacugccggccaaguccccacaacugagguggucgggaccacacccggccaggccccuacugcugagccuuccggaaccaccagcguccaggucccuacgacagagguaaucucaaccgccccugugcagaugccaaccgcggaaucaacugcagcccaaguuacuacaaccgaauggguggagaccacugcucgugagcuucccauuccagagcccgaagguccggaugcuucuuccauaaugucaacagaaucaaucacugguagucuggguccuuuacuggacgguaccgcaacccuucgucugguuaagcgccaggugccacuggacugugugcuuuauagguauggcucguucuccgugacucuggauaucguccagggaauugaauccgcugaaaucuuacaggcagugccaaguggggaaggcgaugcuuucgaacugacagucuccugccaagguggccucccgaaagaagccugcauggaaauuucuucacccggaugccagccgcccgcccagaggcugugucagccagugcucccaucccccgcaugucagcuuguucugcaccaaauacucaaaggcggguccggcacauacugucugaauguaagucuugcagacacuaacucccuugccgucgugucuacucaguuaauaaugcccguacccggcaucuugcugacuggccaagaagcgggacugggccaggucccucuaaucguggggauccuucugguguuaauggcugugguacuggcuagccugauauaucggcggcggcucaugaagcaggacuuuucuguuccucaacugccccacaguaguagccauuggcucagauuaccacgaaucuuuugcuccugcccuauuggcgaaaacagcccauuacuaucuggacaacaaguguag

SEQ ID NO: 334708 - DNA, 692 bp, Artificial Sequence
  derived and/or modified sequence
gaaagtgtctgttcttgtcttttgttcacttttcaaaggggctgtttatttttcatattctgagactccagcaggatgtcttatcaacagcagcagtgcaagcagccctgccagccacctcctgtgtgccccacgccaaagtgcccagagccatgtccacccccgaagtgccctgagccctgcccaccaccaaagtgtccacagccctgcccacctcagcagtgccagcaaaaatgtcctcctgtgacaccttccccaccctgccagccaaagtgtccacccaagagcaagtaacagcttcagaattcatcaggagcatgaaaggataaggataattggctcaccttgttccacagcttcacctgcatcttctcatcaaagcctaccatggatacacagttagcttctttcctcttagccagtgatctgcccatgatgatccctgatagcaaaaggtttcctttctgaggctgccatattgccactgtccaggtggagactgagaaaggaagtcctcagcagtgtcagttcccagagctttggaagaaggaccagcagctctgtccctgggaaccatcaaaaaatgctgttgatgttttctgtgtctgtctgtcacctgggcatgggcttctaacacctgtgcaattgtcacttttctttcactccctgaataaaatatctttgcatacgta

SEQ ID NO: 334709 - DNA, 456 bp, Artificial Sequence
  derived and/or modified sequence
atggacctggtgctgaagcggtgcctgctgcacctggccgtgatcggcgccctcttagccgtaggggctactaaggtgccaaggaatcaagactggctgggagtgtcccgccaactgcgtacaaaagcatggaatcgacagctgtatccagagtggaccgaagctcagcgcctggattgttggcggggcggccaagtgagtcttaaggtgtcgaacgatggcccgacactgatcggggctaacgcctccttctctatcgccctcaatttcccaggatcacagaaggtgctgcccgatgggcaggtcatctgggtgaacaatacaattataaacgggagccaggtgtggggcgggcaaccagtgtatccccaagagaccgacgatgcatgcatatttcccgatggcggaccgtgcccaagcggaagctggagtcaaaaaagatcttttgtttactag

SEQ ID NO: 334710 - DNA, 456 bp, Artificial Sequence
  derived and/or modified sequence
atggacctcgtgctgaagcgctgtctgttacatttggctgttatcggcgcactgttggctgtgggtgctaccaaagtgcccaggaaccaggattggctgggggtcagccgacagctacggacaaaggcctggaatcgtcagctgtatcccgagtggaccgaggctcagcgactagactgctggaggggcggtcaagtttccctgaaggtgtcaaacgacgggccaacactgattggagccaatgccagcttttccattgcgctcaactttcccggtagccaaaaagttctgcctgatggccaggttatctgggtgaacaatacgatcataaacgggtctcaagtgtgggggggacagcctgtttaccctcaagagaccgatgacgcctgtatctttccagatggagggccttgtccttctggtagttggtcgcaaaagagatctttcgtgtactag

SEQ ID NO: 334711 - DNA, 456 bp, Artificial Sequence
  derived and/or modified sequence
atggatctcgtcctcaagcggtgtttgctccacctcgctgtgataggcgcgctgctcgcggtcggtgccaccaaagtgcctcgaaatcaggactggctgggcgtcagtcgccagttacgcaccaaagcatggaataggcaactgtatcccgaatggacagaagcccagagactggattgttggagaggcgggcaagtgtcactcaaagtttccaacgatggccctacattgattggtgcaaacgcgagtttcagcattgcattaaactttccaggctctcagaaagttctacctgacggccaggtgatttgggttaacaatactatcattaacggatcacaggtatgggggggccagcctgtgtacccccaggagacagacgacgcgtgtatcttccccgatggaggaccttgtccaagtggcagctggtctcagaaacgctcattcgtgtactag

SEQ ID NO: 334712 - DNA, 456 bp, Artificial Sequence
  derived and/or modified sequence
atggatctcgtcctcaagcggtgtttgctccacctcgctgtgataggcgcgctgctcgcggtcggtgccaccaaagtgcctcgaaatcaggactggctgggcgtcagtcgccagttacgcaccaaagcatggaataggcaactgtatcccgaatggacagaagcccagagactggattgttggagaggcgggcaagtgtcactcaaagtttccaacgatggccctacattgattggtgcaaacgcgagtttcagcattgcattaaactttccaggctctcagaaagttctacctgacggccaggtgatatgggtaaataatacgatcataaatggaagtcaagtatggggaggccagcccgtctatccacaagaaacagacgacgcatgtatattccctgatggtggtccatgcccgagcggtagctggtcccagaagcggtcttttgtgtattag

SEQ ID NO: 334713 - DNA, 568 bp, Artificial Sequence
  derived and/or modified sequence
aagtttggttcttgggggctagacaagtttcttccccggtggggcggctgaacactcttcccaagggcctatcccagtccccccagtgcctttggttgctggagggaagaacacaatggatctggtgctaaaaagatgccttcttcatttggctgtgataggtgctttgctggctgtgggggctacaaaagtacccagaaaccaggactggcttggtgtctcaaggcaactcagaaccaaagcctggaacaggcagctgtatccagagtggacagaagcccagagacttgactgctggagaggtggtcaagtgtccctcaaggtcagtaatgatgggcctacactgattggtgcaaatgcctccttctctattgccttgaacttccctggaagccaaaaggtattgccagatgggcaggttatctgggtcaacaataccatcatcaatgggagccaggtgtggggaggacagccagtgtatccccaggaaactgacgatgcctgcatcttccctgatggtggaccttgcccatctggctcttggtctcagaagagaagctttgtttat

SEQ ID NO: 334714 - DNA, 456 bp, Artificial Sequence
  derived and/or modified sequence
atggacctggtgctgaagagatgcctgctgcacctggccgtgatcggcgccctgctggccgtgggcgccaccaaggtgcccagaaaccaggactggctgggcgtgagcagacagctgagaaccaaggcctggaacagacagctgtaccccgagtggaccgaggcccagagactggactgctggagaggcggccaggtgagcctgaaggtgagcaacgacggccccaccctgatcggcgccaacgccagcttcagcatcgccctgaacttccccggcagccagaaggtgctgcccgacggccaggtgatctgggtgaacaacaccatcatcaacggcagccaggtgtggggcggccagcccgtgtacccccaggagaccgacgacgcctgcatcttccccgacggcggcccctgccccagcggcagctggagccagaagagaagcttcgtgtactag

SEQ ID NO: 334715 - DNA, 456 bp, Artificial Sequence
  derived and/or modified sequence
atggatctggtgctgaaacgttgtctactccatctcgcagtgattggagccctgctggccgtgggggccactaaagtgcccaggaatcaggattggctcggtgtgtcacgccagctccgcactaaagcttggaaccggcagctttatccagagtggacagaggcacagcgtcttgactgttggcgcggcggacaggtgagtctcaaagtcagcaacgacggccccacactaatcggcgctaacgcgagcttctcaatagctctcaatttccctgggagccagaaggtgcttcccgatgggcaagttatctgggttaataatactattattaatggctctcaggtctggggaggccaaccggtatatccacaggaaaccgatgatgcttgcatatttcccgacggaggaccctgtccgagtggctcgtggtcccaaaagagatcttttgtatattag

SEQ ID NO: 334716 - DNA, 456 bp, Artificial Sequence
  derived and/or modified sequence
atggacctggtgctgaagcgctgcctgctgcacctggccgtgattggagccctgctggccgtgggcgccaccaaggtgcccaggaaccaggactggctgggcgtgtcccggcagctgcggaccaaggcctggaaccggcagctgtacccagagtggacagaggcccagaggctggactgctggaggggcggccaggtgtccctgaaggtgtccaatgatggccccaccctcatcggggccaatgccagcttcagcatcgccctgaacttccctggcagccagaaggtgctgcctgatggccaggtgatctgggtgaacaacaccatcatcaatggcagccaggtgtggggcggccagcctgtgtacccccaggagacagatgatgcctgcatcttcccagatggcggcccctgccccagcggctcctggagccagaagaggagctttgtgtactag

SEQ ID NO: 334717 - RNA, 456 nt, Artificial Sequence
  derived and/or modified sequence
auggaucucguccucaagcgguguuugcuccaccucgcugugauaggcgcgcugcucgcggucggugccaccaaagugccucgaaaucaggacuggcugggcgucagucgccaguuacgcaccaaagcauggaauaggcaacuguaucccgaauggacagaagcccagagacuggauuguuggagaggcgggcaagugucacucaaaguuuccaacgauggcccuacauugauuggugcaaacgcgaguuucagcauugcauuaaacuuuccaggcucucagaaaguucuaccugacggccaggugauuuggguuaacaauacuaucauuaacggaucacagguaugggggggccagccuguguacccccaggagacagacgacgcguguaucuuccccgauggaggaccuuguccaaguggcagcuggucucagaaacgcucauucguguacuag

SEQ ID NO: 334718 - RNA, 456 nt, Artificial Sequence
  derived and/or modified sequence
auggaucucguccucaagcgguguuugcuccaccucgcugugauaggcgcgcugcucgcggucggugccaccaaagugccucgaaaucaggacuggcugggcgucagucgccaguuacgcaccaaagcauggaauaggcaacuguaucccgaauggacagaagcccagagacuggauuguuggagaggcgggcaagugucacucaaaguuuccaacgauggcccuacauugauuggugcaaacgcgaguuucagcauugcauuaaacuuuccaggcucucagaaaguucuaccugacggccaggugauauggguaaauaauacgaucauaaauggaagucaaguauggggaggccagcccgucuauccacaagaaacagacgacgcauguauauucccugauggugguccaugcccgagcgguagcuggucccagaagcggucuuuuguguauuag

SEQ ID NO: 334719 - protein, 369 aa, Artificial Sequence
  derived and/or modified sequence
MAASDTERDGLAPEKTSPDRDKKKEQSEVSVSPRASKHHYSRSRSRSRERKRKSDNEGRKHRSRSRSKEGRRHESKDKSSKKHKSEEHNDKEHSSDKGRERLNSSENGEDRHKRKERKSSRGRSHSRSRSRERRHRSRSRERKKSRSRSRERKKSRSRSRERKKSRSRSRERKRRIRSRSRSRSRHRHRTRSRSRTRSRSRDRKKRIEKPRRFSRSLSRTPSPPPFRGRNTAMDAQEALARRLERAKKLQEQREKEMVEKQKQQEIAAAAAATGGSVLNVAALLASGTQVTPQIAMAAQMAALQAKALAETGIAVPSYYNPAAVNPMKFAEQEKKRKMLWQGKKEGFIPNYLEIMGKIEFWKQGQNVKF

SEQ ID NO: 334720 - DNA, 1305 bp, Artificial Sequence
  derived and/or modified sequence
atggccgccagcgacaccgagagagacggcctggcccccgagaagaccagccccgacagagacaagaagaaggagcagagcgaggtgagcgtgagccccagagccagcaagcaccactacagcagaagcagaagcagaagcagagagagaaagagaaagagcgacaacgagggcagaaagcacagaagcagaagcagaagcaaggagggcagaagacacgagagcaaggacaagagcagcaagaagcacaagagcgaggagcacaacgacaaggagcacagcagcgacaagggcagagagagactgaacagcagcgagaacggcgaggacagacacaagagaaaggagagaaagagcagcagaggcagaagccacagcagaagcagaagcagagagagaagacacagaagcagaagcagagagagaaagaagagcagaagcagaagcagagagagaaagaagagcagaagcagaagcagagagagaaagaagagcagaagcagaagcagagagagaaagagaagaatcagaagcagaagcagaagcagaagcagacacagacacagaaccagaagcagaagcagaaccagaagcagaagcagagacagaaagaagagaatcgagaagcccagaagattcagcagaagcctgagcagaacccccagccccccccccttcagaggcagaaacaccgccatggacgcccaggaggccctggccagaagactggagagagccaagaagctgcaggagcagagagagaaggagatggtggagaagcagaagcagcaggagatcgccgccgccgccgccaccggcggcagcgtgctgaacgtggccgccctgctggccagcggcacccaggtgaccccccagatcgccatggccgcccagatggccgccctgcaggccaaggccctggccgagaccggcatcgccgtgcccagctactacaaccccgccgccgtgaaccccatgaagttcgccgagcaggagaagaagagaaagatgctgtggcagggcaagaaggagggcgacaagagccagagcgccgagatctgggagaagctgaacttcggcaacaaggaccagaacgtgaagttcagaaagctgatgggcatcaagagcgaggacgaggccggctgcagcagcgtggacgaggagagctacaagaccctgaagcagcaggaggaggtgttcagaaacctggacgcccagtacgagatggccagaagccagacccacacccagagaggcatgggcctgggcttcaccagcagcatgagaggcatggacgccgtgtag

SEQ ID NO: 334721 - DNA, 1161 bp, Artificial Sequence
  derived and/or modified sequence
atgaaggaggagaacaccggcgccggcgccgaggccaagagaaccaacttcttcctgaagcagggcagaagacacgagagcaaggacaagagcagcaagaagcacaagagcgaggagcacaacgacaaggagcacagcagcgacaagggcagagagagactgaacagcagcgagaacggcgaggacagacacaagagaaaggagagaaagagcagcagaggcagaagccacagcagaagcagaagcagagagagaagacacagaagcagaagcagagagagaaagaagagcagaagcagaagcagagagagaaagaagagcagaagcagaagcagagagagaaagaagagcagaagcagaagcagagagagaaagagaagaatcagaagcagaagcagaagcagaagcagacacagacacagaaccagaagcagaagcagaaccagaagcagaagcagagacagaaagaagagaatcgagaagcccagaagattcagcagaagcctgagcagaacccccagccccccccccttcagaggcagaaacaccgccatggacgcccaggaggccctggccagaagactggagagagccaagaagctgcaggagcagagagagaaggagatggtggagaagcagaagcagcaggagatcgccgccgccgccgccaccggcggcagcgtgctgaacgtggccgccctgctggccagcggcacccaggtgaccccccagatcgccatggccgcccagatggccgccctgcaggccaaggccctggccgagaccggcatcgccgtgcccagctactacaaccccgccgccgtgaaccccatgaagttcgccgagcaggagaagaagagaaagatgctgtggcagggcaagaaggagggcgacaagagccagagcgccgagatctgggagaagctgaacttcggcaacaaggaccagaacgtgaagttcagaaagctgatgggcatcaagagcgaggacgaggccggctgcagcagcgtggacgaggagagctacaagaccctgaagcagcaggaggaggtgttcagaaacctggacgcccagtacgagatggccagaagccagacccacacccagagaggcatgggcctgggcttcaccagcagcatgagaggcatggacgccgtgtag

SEQ ID NO: 334722 - DNA, 1110 bp, Artificial Sequence
  derived and/or modified sequence
atggccgccagcgacaccgagagagacggcctggcccccgagaagaccagccccgacagagacaagaagaaggagcagagcgaggtgagcgtgagccccagagccagcaagcaccactacagcagaagcagaagcagaagcagagagagaaagagaaagagcgacaacgagggcagaaagcacagaagcagaagcagaagcaaggagggcagaagacacgagagcaaggacaagagcagcaagaagcacaagagcgaggagcacaacgacaaggagcacagcagcgacaagggcagagagagactgaacagcagcgagaacggcgaggacagacacaagagaaaggagagaaagagcagcagaggcagaagccacagcagaagcagaagcagagagagaagacacagaagcagaagcagagagagaaagaagagcagaagcagaagcagagagagaaagaagagcagaagcagaagcagagagagaaagaagagcagaagcagaagcagagagagaaagagaagaatcagaagcagaagcagaagcagaagcagacacagacacagaaccagaagcagaagcagaaccagaagcagaagcagagacagaaagaagagaatcgagaagcccagaagattcagcagaagcctgagcagaacccccagccccccccccttcagaggcagaaacaccgccatggacgcccaggaggccctggccagaagactggagagagccaagaagctgcaggagcagagagagaaggagatggtggagaagcagaagcagcaggagatcgccgccgccgccgccgccaccggcggcagcgtgctgaacgtggccgccctgctggccagcggcacccaggtgaccccccagatcgccatggccgcccagatggccgccctgcaggccaaggccctggccgagaccggcatcgccgtgcccagctactacaaccccgccgccgtgaaccccatgaagttcgccgagcaggagaagaagagaaagatgctgtggcagggcaagaaggagggcttcatccccaactacctggagatcatgggcaagatcgagttctggaagcagggccagaacgtgaagttctag

SEQ ID NO: 334723 - DNA, 1305 bp, Artificial Sequence
  derived and/or modified sequence
atggccgcctccgacaccgagcgggatggcttggctcccgaaaagacaagccccgaccgcgataagaaaaaagagcaaagcgaggtgtctgtgtcaccaagggcatccaaacaccattactccagaagtcgaagcagaagcagagaacggaagcgaaaatctgacaacgaggggagaaagcatcgtagccggtcacggtccaaggagggacgtagacacgaaagtaaggacaagtcaagcaagaaacacaaaagcgaagagcacaacgataaggagcactccagtgataagggaagggagagactgaatagtagcgagaatggcgaagatcgtcataagaggaaggaaagaaaatcatcacgagggcgatcccactcccgctcacgatctcgagagcgccgtcaccgttcgcgtagcagggagagaaaaaagtcgagatcacggagccgcgaaagaaagaaaagcagaagccggagccgagaaagaaagaagtctcggtctcgatctcgggaacgcaagcggcggattcgcagtcgatccaggtctaggagccgccatcgccatcggacaagaagtcgcagtaggacacgttccagaagtcgtgacaggaagaaaaggatcgaaaagccaaggcgattctccagaagcctgtcaaggacaccatctcccccacctttcaggggtaggaacacggccatggacgcacaggaggcactggctcgaagattagagagggcgaagaaactgcaggagcagagggagaaagaaatggtggagaaacagaaacagcaggagattgccgccgccgccgcaaccgggggcagcgtcctaaatgtggcagcactgctcgcgtcagggacacaggtgacacctcagattgctatggccgcacaaatggctgcccttcaagcaaaggcattggctgagactgggatcgccgtgccatcctattacaacccggcagccgtaaatcctatgaaattcgctgaacaggaaaagaagcgcaagatgctgtggcaggggaagaaagagggcgacaagagtcagagtgccgagatttgggagaagctgaacttcggcaacaaggatcagaacgtgaagtttcgcaaactgatggggatcaaaagcgaggacgaagctggatgtagtagcgtggatgaggagagttataagaccctgaaacaacaggaagaagtcttccggaatctggacgctcagtacgagatggcaagaagtcaaactcacacacagcgggggatgggactcgggttcacttctagcatgcgcgggatggacgctgtgtag

SEQ ID NO: 334724 - DNA, 1161 bp, Artificial Sequence
  derived and/or modified sequence
atgaaggaggagaacacaggcgctggggctgaagccaaaaggaccaacttctttctgaagcagggcagacgacatgagagtaaagataaatcctcaaagaagcataagagcgaagaacacaacgacaaggagcattcctcggataaaggcagggagagactgaacagctctgaaaacggggaggatcgacacaaacgtaaggagcgaaagagttccagagggcgatcacatagccggagtcgctcgagggagaggcgacatcgatctcgaagccgcgagcgcaagaagtcgcggagtagatccagggagcgcaaaaaatcaagatcacgttcacgcgaacgaaaaaagtcgcggagcagaagtcgggaacgaaaacgcaggatcagatcccgttctcgttcacggtctaggcacagacacaggacccgatctagaagtcgtactaggtctagatcccgggatcgcaaaaagcgcatcgaaaagccacgcagattctccagatctctaagcagaacaccaagtccaccacccttcagagggcgcaacactgccatggatgcacaagaggccttggctcggaggctggagcgcgctaaaaaactccaagaacagagggagaaggagatggttgaaaaacagaagcaacaagaaatcgctgccgctgctgctacgggggggagcgtacttaatgtcgccgccctgctggcctccggcactcaagtgactccacagattgcaatggcagcccagatggcagcacttcaagctaaagctctcgcagaaactggaattgccgtcccaagctactacaatcctgcagcagtgaatcccatgaaattcgccgaacaggaaaagaagagaaagatgctctggcagggcaagaaggaaggggataaatcccagagcgcagaaatctgggagaaacttaatttcggcaacaaggaccaaaatgttaaatttcggaagctgatggggatcaaatccgaagacgaagcaggctgcagttcggtagatgaagagagctacaagaccctgaaacagcaggaggaggtgttcagaaaccttgacgcccagtatgaaatggcccgctcacaaacccatacacagaggggcatgggcctgggcttcacatcatccatgaggggcatggacgctgtttag

SEQ ID NO: 334725 - DNA, 1110 bp, Artificial Sequence
  derived and/or modified sequence
atggcagcttcagacaccgagcgagatggactggccccggagaagactagccctgaccgagataaaaaaaaggaacagtccgaggtttccgtcagtccgagagccagcaagcaccactacagtcgatctaggagcagaagccgagagcgaaaaagaaagtccgataacgaaggtaggaagcatcgtagccgatcaagatctaaggaaggacggcgacacgagtctaaagataagtcatccaagaaacataaaagtgaagagcacaacgacaaagagcactcctccgataagggccgcgagcgccttaattcctccgagaatggggaagacaggcacaagagaaaggagcgtaaatcatcccgaggcagaagccatagcagatcacggtctagggagcggagacaccgcagccggagtagagagcggaagaaatcccggagccgctccagagaacgcaagaagtcccggtcgcgatcaagagagcgcaagaaatcaagatcccggtcacgtgaacgcaaaaggagaatacggagcaggagccggtccaggtccaggcacagacaccggacaaggtcccggtcccggacaagaagcagatctagagatcgtaaaaagagaattgagaaaccccgccggttctcaagatctctgagccgcacacccagccctccaccattcagaggaaggaataccgccatggacgcccaggaagccttggcaagaagacttgagagagcaaaaaaactgcaggaacaacgtgagaaagaaatggtggaaaaacaaaaacagcaggaaattgctgccgccgctgccgctacaggcgggagtgttttgaatgtggctgccctgttggcatcgggaactcaggtaacaccacagattgcaatggccgcacaaatggcggctctgcaagccaaagctctcgctgaaaccggcatcgctgtgccaagctattacaaccccgcggcagtaaatccgatgaagttcgccgagcaggaaaaaaagcgtaagatgctgtggcaagggaagaaggagggcttcataccaaactacctcgaaatcatggggaagatcgaattttggaagcagggacagaacgtcaagttctag

SEQ ID NO: 334726 - DNA, 1305 bp, Artificial Sequence
  derived and/or modified sequence
atggccgccagtgacacagaaagagatggcctggcccctgagaagaccagcccagaccgggacaagaagaaggagcagagcgaggtgtctgtgagcccccgggccagcaagcaccactacagccgcagccgcagccgcagccgggagaggaagaggaagagtgacaatgaaggaaggaagcacaggagccgcagccgcagcaaggagggcagaagacatgagagcaaggacaagagcagcaagaagcacaagtctgaggagcacaatgacaaggagcacagcagtgacaagggccgggagcggctgaacagcagtgaaaatggagaagatagacacaagaggaaggagaggaagagcagccggggccgcagccacagccgcagccgcagccgggagaggaggcacaggagccgcagccgggagaggaagaagagccgcagccgcagccgggagaggaagaagagccgcagccgcagccgggagaggaagaagagccgcagccgcagccgggagaggaagaggcgcatccgcagccgcagccgcagccgcagccgccaccgccacaggaccaggagccgcagcaggaccaggagccgcagccgggacaggaagaagagaattgagaagccccggcgcttcagccgcagcctgagcaggacccccagccccccacccttccggggcaggaacacagccatggatgcccaggaggccctggcccggcggctggagcgggccaagaagctgcaggagcagcgggagaaggagatggtggagaagcagaagcagcaggagattgctgctgctgctgccaccggcggctctgtgctgaatgtggccgccctgctggccagcggcacccaggtgaccccccagatcgccatggccgcccagatggccgccctgcaggccaaggccctggccgagaccggcattgctgtgcccagctactacaacccagctgctgtgaaccccatgaagtttgctgagcaggagaagaagaggaagatgctgtggcagggcaagaaggagggggacaagagccagagcgctgagatctgggagaagctgaactttggaaacaaggaccagaatgtgaagttcaggaagctgatgggcatcaagtcagaagatgaggccggctgcagctctgtggatgaggagagctacaagaccctgaagcagcaggaggaggtgttcaggaacctggatgcccagtatgagatggcccggagccagacccacacccagaggggcatgggcctgggcttcaccagctccatgaggggcatggatgctgtgtag

SEQ ID NO: 334727 - DNA, 1161 bp, Artificial Sequence
  derived and/or modified sequence
atgaaggaggagaacacaggagctggagctgaggccaagaggaccaacttcttcctgaagcagggcagaagacatgagagcaaggacaagagcagcaagaagcacaagtctgaggagcacaatgacaaggagcacagcagtgacaagggccgggagcggctgaacagcagtgaaaatggagaagatagacacaagaggaaggagaggaagagcagccggggccgcagccacagccgcagccgcagccgggagaggaggcacaggagccgcagccgggagaggaagaagagccgcagccgcagccgggagaggaagaagagccgcagccgcagccgggagaggaagaagagccgcagccgcagccgggagaggaagaggcgcatccgcagccgcagccgcagccgcagccgccaccgccacaggaccaggagccgcagcaggaccaggagccgcagccgggacaggaagaagagaattgagaagccccggcgcttcagccgcagcctgagcaggacccccagccccccacccttccggggcaggaacacagccatggatgcccaggaggccctggcccggcggctggagcgggccaagaagctgcaggagcagcgggagaaggagatggtggagaagcagaagcagcaggagattgctgctgctgctgccaccggcggctctgtgctgaatgtggccgccctgctggccagcggcacccaggtgaccccccagatcgccatggccgcccagatggccgccctgcaggccaaggccctggccgagaccggcattgctgtgcccagctactacaacccagctgctgtgaaccccatgaagtttgctgagcaggagaagaagaggaagatgctgtggcagggcaagaaggagggggacaagagccagagcgctgagatctgggagaagctgaactttggaaacaaggaccagaatgtgaagttcaggaagctgatgggcatcaagtcagaagatgaggccggctgcagctctgtggatgaggagagctacaagaccctgaagcagcaggaggaggtgttcaggaacctggatgcccagtatgagatggcccggagccagacccacacccagaggggcatgggcctgggcttcaccagctccatgaggggcatggatgctgtgtag

SEQ ID NO: 334728 - DNA, 1110 bp, Artificial Sequence
  derived and/or modified sequence
atggccgccagtgacacagaaagagatggcctggcccctgagaagaccagcccagaccgggacaagaagaaggagcagagcgaggtgtctgtgagcccccgggccagcaagcaccactacagccgcagccgcagccgcagccgggagaggaagaggaagagtgacaatgaaggaaggaagcacaggagccgcagccgcagcaaggagggcagaagacatgagagcaaggacaagagcagcaagaagcacaagtctgaggagcacaatgacaaggagcacagcagtgacaagggccgggagcggctgaacagcagtgaaaatggagaagatagacacaagaggaaggagaggaagagcagccggggccgcagccacagccgcagccgcagccgggagaggaggcacaggagccgcagccgggagaggaagaagagccgcagccgcagccgggagaggaagaagagccgcagccgcagccgggagaggaagaagagccgcagccgcagccgggagaggaagaggcgcatccgcagccgcagccgcagccgcagccgccaccgccacaggaccaggagccgcagcaggaccaggagccgcagccgggacaggaagaagagaattgagaagccccggcgcttcagccgcagcctgagcaggacccccagccccccacccttccggggcaggaacacagccatggatgcccaggaggccctggcccggcggctggagcgggccaagaagctgcaggagcagcgggagaaggagatggtggagaagcagaagcagcaggagattgctgctgctgctgctgccactggaggctctgtgctgaatgtggccgccctgctggccagcggcacccaggtgaccccccagatcgccatggccgcccagatggccgccctgcaggccaaggccctggccgagactggaattgctgtgcccagctactacaacccagctgctgtgaaccccatgaagtttgctgagcaggagaagaagaggaagatgctgtggcagggcaagaaggagggcttcatccccaactacctggagatcatgggcaagattgagttctggaagcagggccagaatgtgaagttctag

SEQ ID NO: 334729 - DNA, 1305 bp, Artificial Sequence
  derived and/or modified sequence
atggccgccagcgacaccgagcgggacggcctggcccccgagaagacttcgcccgacagagacaagaagaaagagcagtcagaagtgtccgtttcccctcgcgctagtaagcaccattattctaggagcaggagcagatctagggaacgaaaacgtaagtccgacaacgagggtaggaagcaccggtctaggtctaggtctaaggagggccgaaggcatgagagcaaggacaaaagttccaagaaacacaaaagtgaggaacacaacgataaagagcactcctccgacaagggacgagagcgactgaactccagtgaaaacggggaagatcgccataaaaggaaagaacggaaaagttcccgtgggcggtctcactcccggtcacgttcaagagagcgccggcatcggagcaggagccgcgagcgcaaaaagtccaggagccggtctagagagagaaagaagtcgcgctctagatctagagagcggaagaaaagtcgcagtcgttcccgcgaaaggaaaaggaggataaggagcaggtcacggtcccgaagcagacaccgccatcggactagatcgcgttctcggacccgctcgcggagtagggatagaaaaaagagaattgagaaaccaagacgcttctctcggtcgctgagtaggaccccatctcccccaccatttcggggaagaaacaccgccatggatgcacaagaggccctcgcccggagactggagcgggctaaaaagctgcaggaacagcgcgagaaggagatggtggaaaagcagaaacaacaagaaatcgcagctgccgccgcaactggcggctctgtcctcaacgtcgcagcgctgctggcctccggcactcaggtcacaccacagattgctatggccgctcaaatggctgccctgcaggcaaaagcactcgccgaaactggcattgccgtgccgagctattataatccggctgctgttaatcccatgaaatttgcggaacaggagaagaagaggaaaatgctttggcaggggaagaaggagggggataaaagtcagagtgccgagatttgggaaaaactgaattttggtaataaggaccaaaacgtgaagttcaggaaactcatgggaatcaagtctgaagacgaggccggctgcagcagcgtggatgaagaaagctacaagaccttgaaacaacaggaggaagtgtttcgcaatttggatgcccagtatgagatggccagaagtcagacacacacacagcgcggcatgggtctgggttttacatctagcatgcgcgggatggatgccgtgtag

SEQ ID NO: 334730 - DNA, 1161 bp, Artificial Sequence
  derived and/or modified sequence
atgaaggaggagaacaccggcgccggcgccgaggccaagcggaccaatttctttttgaaacaggggcgcagacacgaatccaaggacaaaagcagtaagaagcacaagtctgaagagcataatgacaaagaacattcttcagataaggggcgggagcgcctgaacagtagcgagaacggagaggatagacataagcgaaaggagaggaagtcctctaggggacgctcgcattcacgctccagatcacgagagaggcggcacagatctcgttccagggagaggaagaaatcgcgatctcgtagtcgcgagaggaagaaatctaggtcccggtctcgtgagagaaagaaatcaaggtcccggagtagagagaggaaacgacggattaggagcagatcccggtcacgttccagacaccggcatcgaaccagatccagatcacgaactcgaagcagaagtagagacaggaagaaacgtatcgagaagccacggcgtttctcccgctcgctcagcaggacaccctccccacctccattccggggtagaaacacagccatggatgcccaggaggccttagcaagacgattagaaagagccaaaaagctgcaggagcaaagagagaaagaaatggtcgagaaacagaagcagcaagaaattgctgcagccgcggctactggcggcagcgtgctcaatgtggcagctctgctggcttctggcacccaggtaacaccacagatcgctatggccgcccagatggctgccttgcaggcgaaagccctggcagaaaccggtatcgccgtgccgagctactataaccccgccgccgtgaatccaatgaagtttgcagaacaagagaaaaaacgcaagatgctctggcaaggaaagaaagaaggcgataaatcacagagcgctgaaatctgggagaagttgaatttcgggaacaaggatcagaacgtgaagttccgcaagctgatggggatcaagtctgaggacgaagccggttgtagtagcgttgacgaggagagttacaaaacgctgaagcaacaagaagaggtttttcggaatttggatgcccagtatgaaatggctcgcagccagactcacacccagagaggtatggggctgggcttcacctccagcatgcgggggatggacgcagtgtag

SEQ ID NO: 334731 - DNA, 1110 bp, Artificial Sequence
  derived and/or modified sequence
atggccgccagcgacaccgagcgggacggcctggcccccgagaagaccagcccagatcgcgataagaaaaaagagcaatctgaggtctctgtgtctcctagggcctccaaacaccattacagcaggtctagaagtagatccagggagcgcaaacgtaaatcagataatgagggtagaaaacatcggagccgcagtcgctcgaaggaaggacgccgccatgaatcaaaggataagagttcaaaaaagcacaagagcgaggagcacaacgataaagaacacagtagcgataaagggagggaaaggcttaactctagcgaaaatggagaagaccgacacaaaaggaaggagagaaaatctagccggggccggagccattcgcgctctcgaagcagagagaggcgacacagaagccggtcccgcgaaagaaaaaagtcacgcagtcggagccgcgagaggaaaaagtccagaagccgtagccgcgaacgcaaaaagtcgagatcccgctccagagaacgcaagagaaggattagatccagatctaggagccggagtaggcaccggcacaggacacggagcagaagccgaaccagaagcaggtccagagaccggaaaaagaggatcgagaaaccaaggaggttctctcgtagcctctccagaaccccatcaccgcctccttttaggggtaggaacacggcaatggatgcacaggaggccttggcacgcaggcttgagcgggccaagaagttacaggagcaacgcgaaaaggagatggttgagaagcaaaaacaacaggaaatcgctgcagctgcggccgctactggcggctcggtgctgaacgtcgctgctctgcttgcttcaggcactcaggtgacaccacaaatagctatggcggcgcaaatggctgcacttcaggccaaagcactagcagaaacagggatagccgtgccttcttactacaatccagcggcggttaatccaatgaagtttgccgagcaggaaaaaaagcggaagatgctgtggcaaggaaaaaaggagggatttattcccaactaccttgagattatgggcaaaattgaattctggaagcagggacaaaacgtgaaattctag

SEQ ID NO: 334732 - DNA, 2285 bp, Artificial Sequence
  derived and/or modified sequence
agctgtgcgacgcgccgggcctcctcgcctttgtgccatccgggtctctcgcgcgagcgatttagtctgaggcgaagcttcggagcggccggtactgttgaaagcgacaagtggaggcgccgctctagcggccgggactctgaactatggcggctagtgatacagagcgagatggactagccccagaaaagacatcaccagatagagataagaaaaaagagcagtcagaagtatctgtttctcctagagcttcaaaacatcattattcaagatcacgatcaaggtcaagagaaagaaaacgaaagtcagataatgaaggaagaaaacacaggagccggagcagaagcaaagagggaagaagacatgaatccaaagataaatcctctaagaaacataagtctgaggaacataatgacaaagaacattcttctgataaaggaagagagcgactaaattcatctgaaaatggtgaggacaggcacaaacgcaaagaaagaaagtcatcaagaggcagaagtcactcaagatctaggtctcgtgaaagacgccatcgtagtagaagcagggagcggaagaagtctcgatccaggagtagggagcggaagaaatcgagatccagaagcagagagaggaagaaatcgagatccagaagcagggaaagaaaacggcggatcaggtctcgttcccgctcaagatcaagacacaggcataggactagaagcaggagtaggacaaggagtaggagtcgagatagaaagaagagaattgaaaagccgagaagatttagcagaagtttaagccggactccaagtccacctcccttcagaggcagaaacacagcaatggatgcacaggaagctttagctagaaggttggaaagggcaaagaaattacaagaacagcgagaaaaggaaatggttgaaaaacaaaaacaacaagaaatagctgcagctgcagctactggaggttctgttctcaatgttgctgccctgttggcatcaggaacacaagtaacacctcagatagccatggcagctcagatggcagccctgcaagctaaagctttggcagagacaggaatagctgttcctagctactataacccagccgctgttaatccaatgaaatttgctgaacaagagaaaaaaaggaaaatgctttggcagggcaagaaagaaggggacaaatcccaatctgctgaaatatgggaaaaattgaattttggaaacaaggaccaaaatgtcaaatttaggaaattgatgggtattaagagtgaagatgaagctggatgtagctcagttgatgaagaaagttacaagactctgaagcagcaggaagaagtatttcgaaatttagatgctcagtatgaaatggcaagatcacaaacccacacacaaagaggaatgggtttgggtttcacatcttcaatgcgaggaatggatgcagtttgaaaatgatcacacttgtaaagtttgggacttatagacttcttgttctgatgtcacgtccttgttcaccaaacagctagcactctagcttgcatgggtgttgcattgactttaatttattgaaaaatacaaatttttgtaaatatcagatcagtgatactggtgttagtgttgtaatcaggttaaacccacttccattaaacttgacaggactatagaaggataatattttttagttcatgaattctacttttcaaatatataaaagctgcaggtggggataaaatctcatacatggattttttcgtgtccgctgtcttgtgtacttttgtacttaaccttgtacagttattttcatctcttgaaacatgaaagaaatgttatgtagatgttctttagaagatctggccatttggtacataatccagcacagataagctgggtggtaatgataataaaaatggttttctcaaaactggtgttaatttaagttacctgggatgtttctttgaatttgttttatagtttctgtagcatttggcaattgctgttagaaaacactagctagaaatcccctccccaccaccctttttaaggccagttaactatactacagtcaataccgtggtgagcaaaaatgtaaaaggtggaaggagaaaacttactaaaatagtatgttttcctattataagggacagacttggtattcagtatttgtcaaatattacatgtgttattcaggagatagattaatgcattaaagggatgtaagcacttttattttaataaagtgccttataacaagttctttgcatgctttttgctcattatcccttt

SEQ ID NO: 334733 - DNA, 1305 bp, Artificial Sequence
  derived and/or modified sequence
atggctgctagtgacactgagcgagacgggctcgcccctgagaagactagccctgatagggacaagaagaaggaacagtctgaggtgagcgtaagtcctcgggcttccaaacaccattactcacgatcaagaagcagatcacgtgagcggaaaagaaaatccgataatgaggggagaaagcataggagtagatcgcgcagtaaagagggaaggcgacacgaatccaaggacaagtcctccaagaagcataagtcagaggaacacaacgacaaggaacactctagtgataaggggagggagaggctcaactcttctgaaaatggagaagacagacataagaggaaagagaggaagtctagtcgcggtcgttctcacagcaggtctcgatcccgggaacgaaggcatagaagtagatcaagggagcgaaaaaaatcacggagccggtccagagagcggaaaaagagccgcagccgcagccgtgaacgtaagaagtcccggtcccgcagcagagaaagaaagcgcaggatacggagtcgctcacggtcaaggtctaggcatagacatagaactaggtcgcgatctcggacccgctctagatcacgggacaggaagaagagaatcgagaagcccaggcggtttagtcggagtctgagccgcaccccaagtccacctcccttccgcggtcggaacaccgctatggacgcccaggaggcgcttgcccgacgtctggagcgggctaaaaagcttcaggagcagcgagaaaaagagatggttgaaaaacaaaaacagcaggaaatagcagcagctgccgctacagggggaagtgtccttaatgtggctgccctcctcgcatcaggcacgcaggtcactccacagatcgccatggcagcccagatggccgctttgcaggccaaggctctggctgagacaggtatcgctgtcccaagctattataaccccgctgctgtcaaccccatgaagttcgccgaacaggaaaagaagaggaaaatgctgtggcaaggcaagaaggagggggataagagccagagtgccgagatctgggagaaactcaattttggcaataaagaccagaacgtgaaattccggaagcttatgggtattaagagcgaggatgaagccggttgctcttccgtggatgaggaaagttataaaaccttgaaacaacaagaagaggtgttccgcaacttggatgcccagtatgagatggccaggagtcagacacacacccagaggggaatgggcctgggtttcacctctagtatgcggggtatggacgccgtctag

SEQ ID NO: 334734 - DNA, 1161 bp, Artificial Sequence
  derived and/or modified sequence
atgaaggaggaaaatacgggtgcgggtgcggaggccaaacgaacaaattttttcctcaagcaggggaggcggcatgagagcaaggacaagtctagcaaaaagcacaagtcagaggagcacaacgataaagaacattctagtgacaagggtagggaaaggcttaactctagcgagaatggggaagacaggcacaagcgcaaagaaaggaaaagctctaggggaagaagccatagccgctcacgctctagggaacgccgtcatcggtcacgctcccgggaaaggaagaaaagccggtctcgatcaagagagaggaagaagtcacggtcgcgctcccgtgagcgcaaaaaatctagatcaaggtctagggagcgaaaacgacgaattaggagccgttcacgctcacggtctcggcaccgccaccgcaccagaagccgcagcagaacgcgcagccggtccagggatcgaaagaaacgaattgagaagccacggaggttcagcaggtcattgtcccgtacaccgagtccacccccatttagaggacgtaacaccgctatggatgctcaggaagcgctggcacggagactggagcgtgcgaaaaagcttcaggagcagcgggagaaggagatggtagagaagcagaagcaacaggaaattgccgcagccgcagcaaccggaggcagtgttttgaacgtggccgcactgctggcttctgggactcaggttactcctcaaatcgctatggcagcccaaatggctgcgctgcaggccaaggctctggccgagacagggattgccgtgcccagctattacaacccggcagcggtaaatcctatgaagtttgctgagcaggagaagaagaggaagatgctttggcagggcaaaaaggagggtgataaaagccagagcgctgagatctgggagaaattaaattttggaaataaggaccaaaacgtaaagttcagaaagttaatgggcatcaagtctgaagacgaagctggttgttcaagcgtggacgaggaaagttacaaaactcttaagcagcaggaggaggtctttagaaacctggacgcccagtacgaaatggctcgctcacagacacatactcagcgcggaatgggcctgggattcacttcatctatgcgcggaatggatgcggtgtag

SEQ ID NO: 334735 - DNA, 1110 bp, Artificial Sequence
  derived and/or modified sequence
atggctgcttctgacacagagagggacggcttggccccagagaagacatcccccgatcgcgataaaaagaaggaacagtctgaggtgagcgtgtctccccgagccagcaaacaccactatagtagaagtcgaagtcgcagtagagagaggaaaagaaaatcagacaatgagggtagaaagcatcgaagtcgatcaaggtcgaaggagggcagaagacacgaatctaaagataagagcagcaagaagcataagtcagaagagcacaacgacaaagaacattcttctgataaaggtcgggagcgccttaatagctctgaaaatggagaagatcggcacaaacggaaggagaggaaaagtagtcggggacggtcacattcaaggtctcggagtcgggagagacggcacaggtcgcggagccgagagcgcaagaaatccaggtcccggtcccgagagaggaaaaaatcgcgatcccgttccagagagcgcaaaaagtccaggtctcggagtagggagaggaaacgacggatcagaagccgcagccgatcgcgctctcgacatcgccatcgcacccggagcaggagccgcacacggtctcgctctagggacaggaaaaagagaattgaaaagccacgacggttctcccggtcccttagccggacaccatcaccccctccgtttcgcggaagaaatactgcaatggatgcacaggaggcactcgcaaggagactcgaacgtgctaagaaattgcaggaacagcgcgagaaagaaatggtggagaaacagaagcagcaagaaattgccgcagcggctgccgctactggaggaagcgtactcaacgtcgccgcactgttggcatccgggacacaagtcaccccacaaatcgcgatggctgcccagatggccgcactgcaagcgaaagctctcgctgaaaccggcatcgctgtaccaagttactacaatcctgctgccgtgaatcccatgaaattcgcagagcaggaaaaaaaacgaaagatgctgtggcagggcaaaaaggaggggttcatccccaactatctggagatcatggggaagatcgagttctggaagcaggggcagaacgtgaagttttag

SEQ ID NO: 334736 - DNA, 2274 bp, Artificial Sequence
  derived and/or modified sequence
agctgtgcgacgcgccgggcctcctcgcctttgtgccatccgggtctctcgcgcgagcgatttagtctgaggcgaagcttcggagcggccggtactgttgaaagcgacaagtggaggcgccgctctagcggccgggactctgaactatggcggctagtgatacagagcgagatggactagccccagaaaagacatcaccagatagagataagaaaaaagagcagtcagaagtatctgtttctcctagagcttcaaaacatcattattcaagatcacgatcaaggtcaagagaaagaaaacgaaagtcagataatgaaggaagaaaacacaggagccggagcagaagcaaagagaaccaacttcttcttaaaacagggaagaagacatgaatccaaagataaatcctctaagaaacataagtctgaggaacataatgacaaagaacattcttctgataaaggaagagagcgactaaattcatctgaaaatggtgaggacaggcacaaacgcaaagaaagaaagtcatcaagaggcagaagtcactcaagatctaggtctcgtgaaagacgccatcgtagtagaagcagggagcggaagaagtctcgatccaggagtagggagcggaagaaatcgagatccagaagcagagagaggaagaaatcgagatccagaagcagggaaagaaaacggcggatcaggtctcgttcccgctcaagatcaagacacaggcataggactagaagcaggagtaggacaaggagtaggagtcgagatagaaagaagagaattgaaaagccgagaagatttagcagaagtttaagccggactccaagtccacctcccttcagaggcagaaacacagcaatggatgcacaggaagctttagctagaaggttggaaagggcaaagaaattacaagaacagcgagaaaaggaaatggttgaaaaacaaaaacaacaagaaatagctgcagctgcagctactggaggttctgttctcaatgttgctgccctgttggcatcaggaacacaagtaacacctcagatagccatggcagctcagatggcagccctgcaagctaaagctttggcagagacaggaatagctgttcctagctactataacccagccgctgttaatccaatgaaatttgctgaacaagagaaaaaaaggaaaatgctttggcagggcaagaaagaaggggacaaatcccaatctgctgaaatatgggaaaaattgaattttggaaacaaggaccaaaatgtcaaatttaggaaattgatgggtattaagagtgaagatgaagctggatgtagctcagttgatgaagaaagttacaagactctgaagcagcaggaagaagtatttcgaaatttagatgctcagtatgaaatggcaagatcacaaacccacacacaaagaggaatgggtttgggtttcacatcttcaatgcgaggaatggatgcagtttgaaaatgatcacacttgtaaagtttgggacttatagacttcttgttctgatgtcacgtccttgttcaccaaacagctagcactctagcttgcatgggtgttgcattgactttaatttattgaaaaatacaaatttttgtaaatatcagatcagtgatactggtgttagtgttgtaatcaggttaaacccacttccattaaacttgacaggactatagaaggataatattttttagttcatgaattctacttttcaaatatataaaagctgcaggtggggataaaatctcatacatggattttttcgtgtccgctgtcttgtgtacttttgtacttaaccttgtacagttattttcatctcttgaaacatgaaagaaatgttatgtagatgttctttagaagatctggccatttggtacataatccagcacagataagctgggtggtaatgataataaaaatggttttctcaaaactggtgttaatttaagttacctgggatgtttctttgaatttgttttatagtttctgtagcatttggcaattgctgttagaaaacactagctagaaatcccctccccaccaccctttttaaggccagttaactatactacagtcaataccgtggtgagcaaaaatgtaaaaggtggaaggagaaaacttactaaaatagtatgttttcctattataagggacagacttggtattcagtatttgtcaaatattacatgtgttattcaggagatagattaatgcattaaagggatgtaagcacttttattttaataaagtgccttataacaa

SEQ ID NO: 334737 - DNA, 1253 bp, Artificial Sequence
  derived and/or modified sequence
agctgtgcgacgcgccgggcctcctcgcctttgtgccatccgggtctctcgcgcgagcgatttagtctgaggcgaagcttcggagcggccggtactgttgaaagcgacaagtggaggcgccgctctagcggccgggactctgaactatggcggctagtgatacagagcgagatggactagccccagaaaagacatcaccagatagagataagaaaaaagagcagtcagaagtatctgtttctcctagagcttcaaaacatcattattcaagatcacgatcaaggtcaagagaaagaaaacgaaagtcagataatgaaggaagaaaacacaggagccggagcagaagcaaagagggaagaagacatgaatccaaagataaatcctctaagaaacataagtctgaggaacataatgacaaagaacattcttctgataaaggaagagagcgactaaattcatctgaaaatggtgaggacaggcacaaacgcaaagaaagaaagtcatcaagaggcagaagtcactcaagatctaggtctcgtgaaagacgccatcgtagtagaagcagggagcggaagaagtctcgatccaggagtagggagcggaagaaatcgagatccagaagcagagagaggaagaaatcgagatccagaagcagggaaagaaaacggcggatcaggtctcgttcccgctcaagatcaagacacaggcataggactagaagcaggagtaggacaaggagtaggagtcgagatagaaagaagagaattgaaaagccgagaagatttagcagaagtttaagccggactccaagtccacctcccttcagaggcagaaacacagcaatggatgcacaggaagctttagctagaaggttggaaagggcaaagaaattacaagaacagcgagaaaaggaaatggttgaaaaacaaaaacaacaagaaatagctgcagcagctgcagctactggaggttctgttctcaatgttgctgccctgttggcatcaggaacacaagtaacacctcagatagccatggcagctcagatggcagccctgcaagctaaagctttggcagagacaggaatagctgttcctagctactataacccagccgctgttaatccaatgaaatttgctgaacaagagaaaaaaaggaaaatgctttggcagggcaagaaagaagggtttattcctaattatcttgaaataatgggaaaaattgaattttggaaacaaggacaaaatgtcaaattt

SEQ ID NO: 334738 - protein, 253 aa, Artificial Sequence
  derived and/or modified sequence
MRKMGVKKGDRVVGYLPNSEHAVEAMLAAASIGAIWSSTSPDFGVNGVLDRFSQIQPKLIFSVEAVVYNGKEHNHMEKLQQVVKGLPDLKKVVVIPYVSSRENIDLSKIPNSVFLDDFLATGTSEQAPQLEFEQLPFSHPLFIMFSSGTTGAPKCMVHSAGGTLIQHLKEHLLHGNMTSSDILLCYTTVGWMMWNWMVSLLATGAAMVLYDGSPLVPTPNVLWDLVDRIGYLGSWRLLQNQPQDRGHRHAWPE

SEQ ID NO: 334739 - DNA, 762 bp, Artificial Sequence
  derived and/or modified sequence
atgagaaagatgggcgtgaaaaaaggggatagggtggtgggctatctccctaatagcgagcacgccgtcgaggccatgcttgcagcagctagtattggcgccatctggtccagtactagtccggactttggtgtcaacggagtgctggatcggttctcgcagattcagcccaaattgatcttcagtgtcgaagcggtggtctataatgggaaggagcacaaccatatggagaaactgcagcaggttgtaaagggccttccagatttaaagaaggtcgtagtcataccctacgtgtcttccagggagaacattgacctctcaaaaatcccgaattctgtgttcctggacgacttcctggccacagggacaagcgagcaggccccccaactggagttcgaacagttgccattttctcacccgctctttatcatgttctctagcggcaccaccggggcccctaagtgtatggtacatagtgccggagggacgctcatccagcatctgaaagagcacctgctgcacggaaatatgacaagcagcgatatactgctgtgttataccaccgttggatggatgatgtggaactggatggtgtccctccttgccaccggcgcagccatggttctttatgacggcagccctctcgtgcctacccccaacgtcctgtgggaccttgtagaccgaataggatatctgggctcatggaggttactgcagaatcagccccaagacagagggcaccgccatgcctggccagagtag

SEQ ID NO: 334740 - DNA, 762 bp, Artificial Sequence
  derived and/or modified sequence
atgaggaagatgggcgtgaagaagggggacagagtggtgggctacctgcccaacagcgagcacgctgtggaggccatgctggccgccgccagcatcggggccatctggagcagcaccagcccagactttggagtgaatggagtgctggaccgcttcagccagatccagcccaagctgatcttctctgtggaggccgtggtgtacaacgggaaggagcacaaccacatggagaagctgcagcaggtggtgaagggcctgcctgacctgaagaaggtggtggtgatcccctacgtgagcagccgggagaacatcgacctgagcaagatccccaacagcgtcttcctggatgacttcctggccaccggcaccagcgagcaggccccccagctggagtttgagcagctgcccttcagccaccccctcttcatcatgttcagcagcggcaccaccggggcccccaagtgcatggtgcacagcgctgggggcaccctcatccagcacctgaaggagcacctgctgcacggcaacatgaccagcagtgacatcctgctgtgctacaccaccgtgggctggatgatgtggaactggatggtgtccctgctggccactggagctgccatggtgctgtatgatggcagccccctggtgcccacccccaacgtgctgtgggacctggtggacagaattggctacctgggctcctggaggctgctgcagaaccagccccaggaccggggccacagacatgcctggccagagtag

SEQ ID NO: 334741 - DNA, 762 bp, Artificial Sequence
  derived and/or modified sequence
atgcggaagatgggcgtgaagaagggcgaccgggtggtgggctacttgcctaacagcgagcatgctgtggaggcaatgctggccgccgcctcaatcggcgcaatctggtcctcaacctcccccgactttggtgtgaatggcgttttggaccggttttctcaaatccagcctaagctgattttttctgtggaggccgtggtttacaacggcaaagaacacaaccacatggagaaattgcagcaagtggtgaaagggctacctgatcttaagaaagttgtggtgattccatacgtgtcctctcgcgagaacatcgatctgtccaagatcccaaatagcgtctttctggacgactttcttgcaaccggtacatctgagcaggccccccagcttgaatttgagcagctgcccttcagccacccactgtttatcatgttttccagcggaacgactggtgcacctaagtgcatggtacacagcgccggggggacactcattcagcacctgaaagagcacttgttacatggtaatatgacttcctctgacattttgttgtgctacaccacagtgggctggatgatgtggaactggatggtctcgctgctggcaaccggcgcggctatggtgctgtacgacggttcgcctctggtgcctacgcccaacgtcctttgggacttagtggaccgcatcggctacctggggtcctggaggctcctgcagaaccagcctcaggatcgcgggcacagacacgcctggccggaatag

SEQ ID NO: 334742 - DNA, 762 bp, Artificial Sequence
  derived and/or modified sequence
atgagaaaaatgggtgtgaagaagggcgacagagtcgtcgggtatttgcccaacagcgaacacgccgtggaggcaatgttagccgctgcttcaataggcgcaatctggtctagtacttccccagacttcggggtcaacggcgtgcttgacaggttttcacagatccagccaaagctgatattctcagtggaagccgtggtttataatggtaaggagcataaccacatggagaaattgcagcaggttgtaaagggtctgccggacctaaaaaaagtcgtggtgattccttacgtctcttctagggaaaatatcgatctttccaagattcccaattcagtttttttagacgatttcctagccactggtacatctgagcaggccccacagctggagttcgagcagctcccttttagtcaccccctttttattatgttctcatcaggcaccaccggagctccaaagtgtatggtgcatagcgctggcggtactttgatacagcatctgaaggaacacctactgcatggaaatatgacaagtagcgatatacttttatgctatactaccgtgggctggatgatgtggaattggatggtctctctcctggccaccggtgcagcaatggtgttgtacgatggctcccccttggtgcccactccaaatgtactctgggacttggtcgaccgaattggatacctggggagttggcgactgctgcagaatcagccgcaggaccgcggtcaccgccatgcctggcctgaatag

SEQ ID NO: 334743 - DNA, 762 bp, Artificial Sequence
  derived and/or modified sequence
atgagaaagatgggcgtgaagaagggcgacagagtggtgggctacctgcccaacagcgagcacgccgtggaggccatgctggccgccgccagcatcggcgccatctggagcagcaccagccccgacttcggcgtgaacggcgtgctggacagattcagccagatccagcccaagctgatcttcagcgtggaggccgtggtgtacaacggcaaggagcacaaccacatggagaagctgcagcaggtggtgaagggcctgcccgacctgaagaaggtggtggtgatcccctacgtgagcagcagagagaacatcgacctgagcaagatccccaacagcgtgttcctggacgacttcctggccaccggcaccagcgagcaggccccccagctggagttcgagcagctgcccttcagccaccccctgttcatcatgttcagcagcggcaccaccggcgcccccaagtgcatggtgcacagcgccggcggcaccctgatccagcacctgaaggagcacctgctgcacggcaacatgaccagcagcgacatcctgctgtgctacaccaccgtgggctggatgatgtggaactggatggtgagcctgctggccaccggcgccgccatggtgctgtacgacggcagccccctggtgcccacccccaacgtgctgtgggacctggtggacagaatcggctacctgggcagctggagactgctgcagaaccagccccaggacagaggccacagacacgcctggcccgagtag

SEQ ID NO: 334744 - protein, 778 aa, Artificial Sequence
  derived and/or modified sequence
MDEMTAVVKIEKGVGGNNGGNGNGGGAFSQARSSSTGSSSSTGGGGQESQPSPLALLAATCSRIESPNENSNNSQGPSQSGGTGELDLTATQLSQGANGWQIISSSSGATPTSKEQSGSSTNGSNGSESSKNRTVSGGQYVVAAAPNLQNQQVLTGLPGVMPNIQYQVIPQFQTVDGQQLQFAATGAQVQQDGSGQIQIIPGANQQIITNRGSGGNIIAAMPNLLQQAVPLQGLANNVLSGQTQYVTNVPVALNGNITLLPVNSVSAATLTPSSQAVTISSSGSQESGSQPVTSGTTISSASLVSSQASSSSFFTNANSYSTTTTTSNMGIMNFTTSGSSGTNSQGQTPQRVSGLQGSDALNIQQNQTSGGSLQAGQQKEGEQNQQTQQQQILIQPQLVQGGQALQALQAAPLSGQTFTTQAISQETLQNLQLQAVPNSGPIIIRTPTVGPNGQVSWQTLQLQNLQVQNPQAQTITLAPMQGVSLGQTSSSNTTLTPIASAASIPAGTVTVNAAQLSSMPGLQTINLSALGTSGIQVHPIQGLPLAIANAPGDHGAQLGLHGAGGDGIHDDTAGGEEGENSPDAQPQAGRRTRREACTCPYCKDSEGRGSGDPGKKKQHICHIQGCGKVYGKTSHLRAHLRWHTGERPFMCTWSYCGKRFTRSDELQRHKRTHTGEKKFACPECPKRFMRSDHLSKHIKTHQNKKGGPGVALSVGTLPLDSGAGSEGSGTATPSALITTNMVAMEAICPEGIARLANSGINVMQVADLQSINISGNGF

SEQ ID NO: 334745 - DNA, 2655 bp, Artificial Sequence
  derived and/or modified sequence
acaggtgagcttgacctcacagccacacaactttcacagggtgccaatggctggcagatcatctcttcctcctctggggctacccctacctcaaaggaacagagtggcagcagtaccaatggcagcaatggcagtgagtcttccaagaatcgcacagtctctggtgggcagtatgttgtggctgccgctcccaacttacagaaccagcaagttctgacaggactacctggagtgatgcctaatattcagtatcaagtaatcccacagttccagaccgttgatgggcaacagctgcagtttgctgccactggggcccaagtgcagcaggatggttctggtcaaatacagatcataccaggtgcaaaccaacagattatcacaaatcgaggaagtggaggcaacatcattgctgctatgccaaacctactccagcaggctgtccccctccaaggcctggctaataatgtactctcaggacagactcagtatgtgaccaatgtaccagtggccctgaatgggaacatcaccttgctacctgtcaacagcgtttctgcagctaccttgactcccagctctcaggcagtcacgatcagcagctctgggtcccaggagagtggctcacagcctgtcacctcagggactaccatcagttctgccagcttggtatcatcacaagccagttccagctcctttttcaccaatgccaatagctactcaactactactaccaccagcaacatgggaattatgaactttactaccagtggatcatcagggaccaactctcaaggccagacaccccagagggtcagtgggctacaggggtctgatgctctgaacatccagcaaaaccagacatctggaggctcattgcaagcaggccagcaaaaagaaggagagcaaaaccagcagacacagcagcaacaaattcttatccagcctcagctagttcaagggggacaggccctccaggccctccaagcagcaccattgtcagggcagacctttacaactcaagccatctcccaggaaaccctccagaacctccagcttcaggctgttccaaactctggtcccatcatcatccggacaccaacagtggggcccaatggacaggtcagttggcagactctacagctgcagaacctccaagttcagaacccacaagcccaaacaatcaccttagccccaatgcagggtgtttccttggggcagaccagcagcagcaacaccactctcacacccattgcctcagctgcttccattcctgctggcacagtcactgtgaatgctgctcaactctcctccatgccaggcctccagaccattaacctcagtgcattgggtacttcaggaatccaggtgcacccaattcaaggcctgccgttggctatagcaaatgccccaggtgatcatggagctcagcttggtctccatggggctggtggtgatggaatacatgatgacacagcaggtggagaggaaggagaaaacagcccagatgcccaaccccaagccggtcggaggacccggcgggaagcatgcacctgcccctactgtaaagacagtgaaggaaggggctcgggggatcctggcaaaaagaaacagcatatttgccacatccaaggctgtgggaaagtgtatggcaagacctctcacctgcgggcacacttgcgctggcatacaggcgagaggccatttatgtgtacctggtcatactgtgggaaacgcttcacacgttcggatgagctacagaggcacaaacgtacacacacaggtgagaagaaatttgcctgccctgagtgtcctaagcgcttcatgaggagtgaccacctgtcaaaacatatcaagacccaccagaataagaagggaggcccaggtgtagctctgagtgtgggcactttgcccctggacagtggggcaggttcagaaggcagtggcactgccactccttcagcccttattaccaccaatatggtagccatggaggccatctgtccagagggcattgcccgtcttgccaacagtggcatcaacgtcatgcaggtggcagatctgcagtccattaatatcagtggcaatggcttctgagatcaggcacccggggccagagacatatgggccataccccttaaccccgggatgcaaggtagcatgggtccaagagacatggaagagagagccatgaagcattaaaatgcatggtgttgagaagaatcaggagagggatacaagagaggagatggggtcccggcacccatctgtatcatcagtgcctctttgaaggtgggaaacattagtgaaaattctgttggtgccacgctttgatgagcatttgtttgaccccagtttcttcttacacttcttaccccagcctacccttcctgcatttctcttctcagctcttccatgatggattcccccccctttcctaaagccatcatgccttgataaatatatatgatcattgaaatactttttaacaaaaaacagattctatattattatatatatatatatatataaagatatatagagatgcattcacagggttggctggagaggaagaccattctgtgaccaaaataccttggtcattttttttatattgccttatttccctatggctgagccttgttgtgacacatcaagctt

SEQ ID NO: 334746 - DNA, 2337 bp, Artificial Sequence
  derived and/or modified sequence
atggacgagatgaccgccgtggtgaagatcgagaagggcgtgggcggcaacaacggcggcaacggcaacggcggcggcgccttcagccaggccagaagcagcagcaccggcagcagcagcagcaccggcggcggcggccaggagagccagcccagccccctggccctgctggccgccacctgcagcagaatcgagagccccaacgagaacagcaacaacagccagggccccagccagagcggcggcaccggcgagctggacctgaccgccacccagctgagccagggcgccaacggctggcagatcatcagcagcagcagcggcgccacccccaccagcaaggagcagagcggcagcagcaccaacggcagcaacggcagcgagagcagcaagaacagaaccgtgagcggcggccagtacgtggtggccgccgcccccaacctgcagaaccagcaggtgctgaccggcctgcccggcgtgatgcccaacatccagtaccaggtgatcccccagttccagaccgtggacggccagcagctgcagttcgccgccaccggcgcccaggtgcagcaggacggcagcggccagatccagatcatccccggcgccaaccagcagatcatcaccaacagaggcagcggcggcaacatcatcgccgccatgcccaacctgctgcagcaggccgtgcccctgcagggcctggccaacaacgtgctgagcggccagacccagtacgtgaccaacgtgcccgtggccctgaacggcaacatcaccctgctgcccgtgaacagcgtgagcgccgccaccctgacccccagcagccaggccgtgaccatcagcagcagcggcagccaggagagcggcagccagcccgtgaccagcggcaccaccatcagcagcgccagcctggtgagcagccaggccagcagcagcagcttcttcaccaacgccaacagctacagcaccaccaccaccaccagcaacatgggcatcatgaacttcaccaccagcggcagcagcggcaccaacagccagggccagaccccccagagagtgagcggcctgcagggcagcgacgccctgaacatccagcagaaccagaccagcggcggcagcctgcaggccggccagcagaaggagggcgagcagaaccagcagacccagcagcagcagatcctgatccagccccagctggtgcagggcggccaggccctgcaggccctgcaggccgcccccctgagcggccagaccttcaccacccaggccatcagccaggagaccctgcagaacctgcagctgcaggccgtgcccaacagcggccccatcatcatcagaacccccaccgtgggccccaacggccaggtgagctggcagaccctgcagctgcagaacctgcaggtgcagaacccccaggcccagaccatcaccctggcccccatgcagggcgtgagcctgggccagaccagcagcagcaacaccaccctgacccccatcgccagcgccgccagcatccccgccggcaccgtgaccgtgaacgccgcccagctgagcagcatgcccggcctgcagaccatcaacctgagcgccctgggcaccagcggcatccaggtgcaccccatccagggcctgcccctggccatcgccaacgcccccggcgaccacggcgcccagctgggcctgcacggcgccggcggcgacggcatccacgacgacaccgccggcggcgaggagggcgagaacagccccgacgcccagccccaggccggcagaagaaccagaagagaggcctgcacctgcccctactgcaaggacagcgagggcagaggcagcggcgaccccggcaagaagaagcagcacatctgccacatccagggctgcggcaaggtgtacggcaagaccagccacctgagagcccacctgagatggcacaccggcgagagacccttcatgtgcacctggagctactgcggcaagagattcaccagaagcgacgagctgcagagacacaagagaacccacaccggcgagaagaagttcgcctgccccgagtgccccaagagattcatgagaagcgaccacctgagcaagcacatcaagacccaccagaacaagaagggcggccccggcgtggccctgagcgtgggcaccctgcccctggacagcggcgccggcagcgagggcagcggcaccgccacccccagcgccctgatcaccaccaacatggtggccatggaggccatctgccccgagggcatcgccagactggccaacagcggcatcaacgtgatgcaggtggccgacctgcagagcatcaacatcagcggcaacggcttctag

SEQ ID NO: 334747 - DNA, 2337 bp, Artificial Sequence
  derived and/or modified sequence
atggacgaaatgaccgcagtggtgaagatagagaagggggtcgggggaaacaatggggggaacggtaacggtggcggagctttttctcaggcccggtcctccagtacgggaagcagttctagcacgggcggtgggggacaagagtctcagccaagtcctttggccctcctcgccgccacttgctccagaatcgagagtccgaatgagaactccaacaactcacagggcccatcacaatccggtggcacgggagagctagacctgacagccactcagctcagccagggagccaacggatggcagatcatttcttcatcaagcggtgccactcctacaagcaaagaacaatccggctcaagcactaatgggagtaatggcagcgagtcatcgaaaaataggacggtgtcagggggccaatacgtagtagctgcggcccctaacctgcagaatcagcaggtcctcacggggctgccaggtgttatgcccaacatacagtaccaggtgatcccccagttccaaacagtcgatgggcagcagttacagttcgccgctacgggggctcaggtgcaacaggatggttcaggccaaattcaaataatccccggcgccaatcagcagatcatcacaaacaggggctccggcggaaacatcatcgctgctatgcccaacttgctgcagcaggcagtgcccctgcagggactggcaaataacgtgctcagcgggcagacccaatatgttacaaacgtgcctgttgctctgaatggaaacatcactctgctcccggttaacagcgtgtcagcggccacactgacaccctcatcccaggccgtaaccatctcctcctcggggtcacaggagagtggctctcaacccgtgacttccgggaccacaattagcagcgctagtctcgtgtcttctcaggcttccagttcttctttctttaccaacgccaattcatactcaacaactactactacttcaaacatgggcatcatgaactttacaacatcaggcagcagcggtacgaatagccagggacagacgccacagagggtgagcggactgcaaggtagcgatgcactcaatatccagcagaaccaaactagcggtggaagcctccaggcaggccagcaaaaggaaggtgaacagaaccagcagacgcagcagcagcagattctgatccagccccagctggtgcagggtgggcaagctttgcaggctcttcaagcggcacctctgtcaggtcagacgttcacaactcaggccatctcacaggagacactgcagaatttgcagctacaagctgtaccaaattccggccctataatcattaggacccctactgtgggccctaatggacaggtaagttggcaaacgctccagctgcagaacctccaagtccagaatccacaggctcaaacgatcactcttgcccccatgcagggagttagcctgggacagacgagctcaagcaatactactctgacccctatcgctagcgccgcaagcattccagctgggactgtgactgtgaatgcagctcagcttagctcaatgccagggctacaaacaatcaatctgagcgccctgggcacttccggaattcaggtacaccctatccaaggcctgccattggctatcgctaacgctcctggagatcatggggcccaattaggattgcacggcgctggaggggatgggatacatgatgatactgcagggggcgaagaaggcgagaactcaccagatgctcaaccgcaggccggcaggcggacacggcgggaagcctgcacctgtccctattgcaaggacagtgagggccgaggcagcggcgatccaggcaagaagaagcaacacatctgccacatccaaggatgcggaaaagtctacgggaagacatcacatctgcgcgctcatttgaggtggcataccggggaacgacctttcatgtgcacgtggtcgtattgtggtaagaggtttacacggtccgatgaactccagagacacaaacggacccataccggagagaaaaaattcgcctgtccggaatgccccaagcgctttatgaggtctgaccatctgtccaagcatatcaagacccaccagaataagaaagggggacccggggtggctctgtcagttgggaccctccccctagattccggcgccggtagcgagggaagtggcacagcgacaccaagcgccctgataacgacaaacatggttgctatggaagctatttgtcctgagggtatcgcccggctggcgaatagcggcattaacgttatgcaggtggctgatctgcaatcaatcaatatcagcggcaatggcttttag

SEQ ID NO: 334748 - DNA, 2337 bp, Artificial Sequence
  derived and/or modified sequence
atggatgagatgacagctgtggtgaagattgagaagggcgtgggcggcaacaacggcggcaatggaaatggaggaggagccttcagccaggcccggagcagcagcacaggcagcagcagcagcactggaggcggcggccaggagagccagcccagccccctggccctgctggccgccacctgcagccgcatcgagagccccaatgaaaacagcaacaacagccagggccccagccagagcggcggcactggagagctggacctgacagccacccagctgagccagggcgccaacggctggcagatcatcagcagcagcagcggggccacccccaccagcaaggagcagagcggcagcagcaccaacggcagcaatggaagtgagagcagcaagaacagaacagtgtctgggggccagtatgtggtggccgccgcccccaacctgcagaaccagcaggtgctgaccggcctgcccggggtgatgcccaacatccagtaccaggtgatcccccagttccagacagtggatggccagcagctgcagtttgctgccactggagcccaggtgcagcaggacggcagcggccagatccagatcatccctggggccaaccagcagatcatcaccaacagaggcagcggcggcaacatcatcgccgccatgcccaacctgctgcagcaggccgtgcccctgcagggcctggccaacaacgtgctgagcggccagacccagtatgtgaccaacgtgcctgtggccctgaatggaaacatcaccctgctgcctgtgaacagcgtgtctgctgccaccctgacccccagcagccaggccgtgaccatcagcagcagcggcagccaggagagcggcagccagcctgtgaccagcggcaccaccatcagcagcgccagcctggtgagcagccaggccagcagcagcagcttcttcaccaatgccaacagctacagcaccaccaccaccaccagcaacatgggcatcatgaacttcaccaccagcggcagcagcggcaccaacagccagggccagaccccccagagggtgtctggcctgcagggcagtgatgccctgaacatccagcagaaccagaccagcggcggcagcctgcaggccggccagcagaaggagggggagcagaaccagcagacccagcagcagcagatcctgatccagccccagctggtgcagggcggccaggccctgcaggccctgcaggccgcccccctgagcggccagaccttcaccacccaggccatcagccaggagaccctgcagaacctgcagctgcaggccgtgcccaacagcggccccatcatcatccgcacccccaccgtgggccccaacggccaggtgtcctggcagaccctgcagctgcagaacctgcaggtgcagaacccccaggcccagaccatcaccctggcccccatgcagggcgtgtccctgggccagaccagcagcagcaacaccaccctgacccccatcgccagcgctgccagcatcccagctggcaccgtgacagtgaatgctgcccagctgagctccatgcctggcctgcagaccatcaacctgagcgccctgggcaccagcggcatccaggtgcaccccatccagggcctgcccctggccatcgccaatgcccctggggaccacggggcccagctgggcctgcatggagctggaggagatggcatccatgatgacacagctggaggagaggagggggagaacagcccagatgcccagccccaggccggccgccgcacccggcgggaggcctgcacctgcccctactgcaaggacagcgagggccggggcagcggggaccccgggaagaagaagcagcacatctgccacatccagggctgtgggaaggtgtatggcaagaccagccacctgcgggcccacctgcgctggcacactggagagcggcccttcatgtgcacctggagctactgtgggaagcgcttcaccaggagtgatgagctgcagaggcacaagaggacccacactggagagaagaagtttgcctgcccagaatgtcccaagcgcttcatgagaagtgaccacctgagcaagcacatcaagacccaccagaacaagaagggcggccctggggtggccctgtctgtgggcaccctgcccctggacagcggggccggcagcgagggcagcggcacagccacccccagcgccctgatcaccaccaacatggtggccatggaggccatctgcccagagggcatcgcccggctggccaacagcggcatcaacgtgatgcaggtggccgacctgcagagcatcaacatctctggaaatggcttctag

SEQ ID NO: 334749 - DNA, 2337 bp, Artificial Sequence
  derived and/or modified sequence
atggacgagatgaccgccgtggtgaagatcgagaagggcgtgggcggcaataatgggggtaatggcaacggaggcggtgccttttcacaggcacgctccagttctactggaagttcaagcagtaccggtggcggcggccaggagtcccaaccttcacctctcgctctgctagccgccacctgctctagaatcgagtccccaaacgagaactcaaacaactctcagggcccgagtcagagtgggggaacaggagaactggatctcacggccactcagctgtctcaaggcgctaacgggtggcagattataagttcatcgagcggcgccacaccaacatcgaaggagcagagcgggtcttccactaatgggagcaacggttccgagtccagcaaaaaccggacagtgagcggcgggcagtatgtggtggcagccgctcctaacctgcagaaccagcaggtactcactgggctgcccggcgtgatgcccaacatccagtatcaggtgatccctcagttccagaccgtagacggccagcagctgcagttcgcggcaacaggtgctcaggtccagcaagatggctcaggacagatccagattattccgggagccaatcaacagatcattacaaacagaggctcaggagggaacatcattgccgccatgccaaatctactccaacaggccgtgccccttcagggtctcgctaataacgtgctttccggccagactcaatacgtgaccaatgtccctgtggccctgaatgggaacattaccctactccctgtcaatagcgtgtccgctgcaacacttacacccagcagtcaggccgtcacaatctctagctcgggatcccaggagtcaggatctcagcctgtgaccagtggcacaaccatctcatcagccagtttggtttcgtcccaagccagcagctcaagcttcttcactaatgccaatagctattcaaccacaacaaccacctctaacatgggcataatgaatttcacaacctccggtagcagcggtacaaactcccaaggacaaactcctcagcgcgtgtccggactccagggcagcgacgctctcaatattcaacagaatcagacttcaggcgggtcactccaagcaggccagcagaaggagggagagcagaatcagcaaacacagcagcagcagattctgatccagccgcagctagtccaaggcggccaggcgctccaggctctgcaagcagcgcctctatctgggcagacctttactacccaggctattagccaagaaaccctacaaaatctccagcttcaagctgtgcccaattctggacctattataatacggacacctactgtgggccccaatggacaggtgagctggcagacacttcaattacaaaatctgcaggtgcaaaacccccaagcacaaactatcactcttgctcctatgcagggcgtgtcactggggcaaacgagctcatcgaacacaaccttgacacctatcgcatctgccgctagcattccagctggtacggtcaccgtgaatgccgcgcagctgtcaagcatgcctgggctgcaaaccatcaacctgtccgcactgggtacatcaggaattcaggtgcatcccattcagggtctgcccctggccattgccaatgcccccggagaccatggcgcacagctgggactgcatggggctggtggagacgggattcacgacgacacagctggaggggaggaaggcgaaaattccccggacgcacagccccaagcaggacgacggaccagaagggaggcctgtacctgtccttactgtaaagactccgagggaagagggagcggcgatcccggcaagaagaaacagcacatctgtcatatccagggctgtgggaaagtgtatggcaaaactagccacctgcgggcacatctgcgctggcacaccggtgagaggccttttatgtgcacatggtcttactgcggtaagagatttacacgcagtgacgaattgcagcggcacaagagaacacacaccggcgagaagaagttcgcctgtcccgagtgccccaaaaggtttatgcggtccgatcacttatctaaacacattaagactcatcagaacaagaagggtggacctggagtcgcactgtcagtggggacactgcctttggatagcggggcaggcagtgagggctcaggaacggcgacccctagcgccctcatcacaacaaatatggtggccatggaggctatctgtcccgaaggaatcgcgagactggctaatagtggaattaatgtgatgcaggtggctgatctgcagtccatcaatatctccggtaatggcttctag

SEQ ID NO: 334750 - DNA, 2337 bp, Artificial Sequence
  derived and/or modified sequence
atggacgaaatgactgccgtggtaaagattgaaaagggggtggggggtaacaacgggggaaacggaaatggtggtggagccttcagccaggcgcgatcaagcagcactggctcctcctccagtacgggaggtgggggacaggaaagtcagccgagccctcttgccctgcttgcagcaacgtgtagcaggattgagtctcccaacgaaaatagcaacaatagtcagggtccttctcagagcgggggaacgggggaattggatctgactgccacccagctgagccaaggcgcaaatggctggcagatcatctccagtagttccggtgctacgcccacttctaaggaacagtcggggtcctctactaacggaagtaacggatccgagtctagcaagaaccggacagtgagcgggggacagtacgtggtcgcagcagcccctaatcttcagaatcagcaggtgctcacagggctgccaggagtcatgccaaacatccaatatcaggttatcccacagtttcagacagttgatggtcagcagcttcagtttgccgcaaccggggctcaggtccagcaggacggaagcggacagatccagattattccgggtgcaaaccagcagataatcacaaatcgcggtagtggcggaaatatcatcgctgcgatgcctaatctgctgcagcaggcggtcccactgcagggcctggccaataacgttctcagcggacagacacagtacgttaccaacgtgcccgtcgccttaaacggcaacataaccctcctccccgtaaactctgtcagcgcagccaccctgacaccatccagccaagctgtgactataagttccagcggaagccaggaaagtggaagtcagcccgtgacttctggtaccactatctctagcgcaagcctggtcagctcacaggcctccagttctagcttctttacaaacgccaactcctactctacaacaacaactacgagcaacatgggtatcatgaattttactacatccggtagctctggcacaaacagccaagggcagacaccgcagcgcgttagcggcctgcaaggttccgatgccctcaacattcagcaaaaccagacctctggagggtctctgcaggccggacagcagaaagagggcgaacagaatcagcagacacaacagcaacagattctcatccagccacaactcgtgcagggcggtcaagccctccaggctctgcaagctgctccactgagcgggcaaacattcaccacccaagcaatctcgcaggagacacttcagaacctgcagctgcaggccgtgccaaattcgggacccatcattattcggactccaaccgtagggcctaatgggcaagtgagctggcaaaccctgcagctgcagaatttgcaggtacagaatcctcaggcccaaaccattacactcgccccaatgcagggggtgagtctgggtcagacttctagcagtaataccactcttactccaatagcaagtgcagcaagcatcccagctggcaccgtgaccgtcaatgccgcacagctatcctctatgcccggtctccagacaatcaatctgtccgctcttggtacctctggaattcaggttcacccaatccagggtctgccattggccatcgctaacgcgccaggagaccacggcgctcagttgggcctgcacggggcagggggtgacggcattcatgatgacacagccggaggggaggagggggaaaactcaccagacgcccaaccacaggctggtaggcgtacaaggcgcgaggcctgcacgtgcccttactgtaaggactcagaaggcagaggatccggggatcccggtaaaaagaagcagcacatctgccacattcagggatgtggtaaggtgtatggcaagaccagtcatctccgggcacatttgcgctggcacactggggagcggccatttatgtgcacatggtcgtactgcggaaaaaggttcactaggagcgatgaactgcagcggcataaaagaacccacacaggagagaaaaagtttgcatgcccagagtgcccgaagaggttcatgcgtagtgaccatctgtcgaagcacattaaaacgcaccagaataaaaagggcggaccaggcgtggccctgagcgtgggaacattacccctggatagtggtgccggatcagaaggtagtgggacagctacaccctctgctttgataactacgaacatggtggccatggaggccatttgtcctgagggaatcgctcgactggctaattcaggtataaatgtgatgcaggtcgccgatctccaatctataaatattagcggtaatggtttttag

SEQ ID NO: 334751 - protein, 64 aa, Artificial Sequence
  derived and/or modified sequence
MSLWGLVSKMPPEKVQRLYVDFPQHLRHLLGDWLESQPWEFLVGSDAFCCNLASALLSDTVQHL

SEQ ID NO: 334752 - protein, 121 aa, Artificial Sequence
  derived and/or modified sequence
MRIMLLFTAILAFSLAQSFGAVCKEPQEEVVPGGGRSKRDPDLYQLLQRLFKSHSSLEGLLKALSQASTDPKESTSPEKRDMHDFFVGLMGKRSVQPDSPTDVNQENVPSFGILKYPPRAE

SEQ ID NO: 334753 - DNA, 366 bp, Artificial Sequence
  derived and/or modified sequence
atgagaatcatgctgctgttcaccgccatcctggccttcagcctggcccagagcttcggcgccgtgtgcaaggagccccaggaggaggtggtgcccggcggcggcagaagcaagagagaccccgacctgtaccagctgctgcagagactgttcaagagccacagcagcctggagggcctgctgaaggccctgagccaggccagcaccgaccccaaggagagcaccagccccgagaagagagacatgcacgacttcttcgtgggcctgatgggcaagagaagcgtgcagcccgacagccccaccgacgtgaaccaggagaacgtgcccagcttcggcatcctgaagtacccccccagagccgagtag

SEQ ID NO: 334754 - DNA, 366 bp, Artificial Sequence
  derived and/or modified sequence
atgaggattatgctgctattcaccgctatacttgctttttcactcgctcaatcatttggagctgtatgtaaagagccccaggaagaggtcgtgccagggggaggaaggtccaagcgcgacccggacttataccagctcttgcaaagactctttaaatctcattcttcccttgaaggcctgttaaaagctctgtctcaggcaagcacggatcccaaagaatcaacgagccccgaaaaaagagacatgcatgacttctttgtgggactcatggggaaaaggtccgtgcaacccgatagccccaccgacgtgaatcaagagaacgtgcccagcttcggaatcctgaaatatccaccacgcgcggaatag

SEQ ID NO: 334755 - DNA, 366 bp, Artificial Sequence
  derived and/or modified sequence
atgcggataatgctgctcttcactgctattttagccttcagtctagcgcagtcatttggtgccgtatgcaaagaacctcaagaggaagtggtcccggggggagggcgctccaagcgagatcccgacctgtaccagctgctgcagcgactgtttaaatcccactcttccctggaaggcttactgaaagcgctttctcaggcttccacagacccaaaggagtcaacttcacctgaaaagagagatatgcacgacttcttcgtggggctgatggggaagcgctctgtgcagcccgactccccaacagacgttaaccaagaaaacgttcctagctttggaattttgaagtatccaccaagagctgagtag

SEQ ID NO: 334756 - DNA, 366 bp, Artificial Sequence
  derived and/or modified sequence
atgcggattatgctcctgttcactgccattctcgccttcagcctcgctcagagtttcggtgcagtttgtaaagaaccccaggaagaggttgtgcctggggggggaagatctaagagggatccagacctctaccaactgctgcagcggctgttcaaaagtcactcatccttggagggactgctgaaggctctatcccaggcaagcaccgatccaaaggagagtacgtccccagaaaaacgagacatgcacgatttttttgtcggactgatgggcaagcggtcggttcagcctgatagcccaacggacgtgaatcaggagaacgtgccttcatttggcatcctcaaatatccacccagagccgaatag

SEQ ID NO: 334757 - DNA, 366 bp, Artificial Sequence
  derived and/or modified sequence
atgaggatcatgctgctcttcaccgccatcctggccttcagcctggcccagagctttggagctgtgtgcaaggagccccaggaggaggtggtgcctgggggcggccgcagcaagagggaccctgacctgtaccagctgctgcagaggctcttcaagagccacagcagcctggagggcctgctgaaggccctgagccaggccagcacagaccccaaggagagcaccagccctgagaagagggacatgcatgacttctttgtgggcctgatgggcaagaggtctgtgcagcctgacagccccacagatgtgaaccaggagaatgtgcccagctttggcatcctgaagtacccacccagggctgagtag

SEQ ID NO: 334758 - DNA, 366 bp, Artificial Sequence
  derived and/or modified sequence
atgcggatcatgctgctgttcaccgccatcctggccttcagcctggcccaatcctttggggcagtctgtaaggaacctcaagaagaagtcgtccccggcggggggcgttcgaagcgagatcctgatttatatcagctcctgcaaagactgttcaaaagtcactcatctcttgaagggctcctgaaagcactgtcgcaagcctccactgaccccaaagagagcacgagtcctgagaagcgggacatgcacgacttttttgttggcctcatgggaaagcggtcagtgcagcccgactccccaacagatgtaaaccaagaaaatgtgccctccttcgggatactgaaataccccccccgagccgaatag

SEQ ID NO: 334759 - DNA, 366 bp, Artificial Sequence
  derived and/or modified sequence
atgcggatcatgctgctgttcaccgccatcctggccttcagcctggcccagagcttcggtgcagtgtgcaaggaaccccaagaggaggtggtgcctggaggcggccggtccaaacgggaccccgacctttatcaactactccaaagactttttaagtctcacagttcactcgaaggactgcttaaagcactgtcccaggcgagcacagaccccaaagaatccacatcccccgaaaaaagagacatgcatgactttttcgttggactgatgggcaagcggtccgtacagcctgatagtccaaccgacgttaatcaggaaaacgtcccctcgttcggaatattgaaatatcccccccgggcggaatag

SEQ ID NO: 334760 - DNA, 366 bp, Artificial Sequence
  derived and/or modified sequence
atgcggatcatgctgctgttcaccgccatcctggccttcagcctggctcagtctttcggtgccgtctgcaaagaaccccaggaagaggttgtccccggaggcggcaggagcaagagggacccggacctgtaccaactgctgcaaagattgtttaagtctcactcatcccttgagggcctcctgaaggctctgagccaggcttccacagacccaaaagagagcaccagcccagagaaaagggacatgcatgatttctttgtgggcttaatgggcaagagatctgtccagccagattcaccaaccgacgtgaaccaagagaacgtaccatccttcggaattctgaaatacccacctcgggcagagtag

SEQ ID NO: 334761 - DNA, 366 bp, Artificial Sequence
  derived and/or modified sequence
atgaggataatgctgctgttcaccgccatcctggctttcagtctcgcccaatctttcggcgctgtctgtaaggagccccaggaagaggtagtcccaggagggggaagatcgaagcgggaccccgatctgtatcaacttctgcaacggctcttcaagtcccactcaagtttggagggcctactgaaggccttgtctcaggcctcaaccgatcccaaggaatcaacctctcccgagaaaagagatatgcacgactttttcgtgggcctgatggggaagaggtctgtacagccggatagcccaactgacgtaaaccaggaaaatgttccctcctttggcattctcaaatacccaccccgagccgagtag

SEQ ID NO: 334762 - DNA, 366 bp, Artificial Sequence
  derived and/or modified sequence
atgcggattatgttgttgtttaccgccattctggccttctctttggcccagagctttggcgcagtctgcaaagagccccaggaggaggtggtgccgggtggcggtagatccaagagggatccagacttgtatcagctcctccagcggctgttcaaaagtcatagcagccttgaggggctgttaaaagcactcagccaggcctctaccgatcctaaggaaagtacttctccagagaaaagagatatgcatgatttttttgtgggtcttatgggtaaacgtagtgtccagccggacagccccacagatgttaaccaggagaacgttccatcattcggcattctgaagtatccacctagggcagagtag

SEQ ID NO: 334763 - DNA, 366 bp, Artificial Sequence
  derived and/or modified sequence
atgcggataatgcttttattcaccgccattctcgcctttagcttggcccagtcctttggggcagtgtgcaaggagccccaggaagaagtcgtccctgggggtgggagatccaaacgggatcccgatctttaccagttgcttcagaggctgttcaaatcccacagcagcctggaaggactgctgaaagcactaagtcaggcatccactgaccctaaagaatccactagtccggaaaagcgcgacatgcacgatttcttcgtcggtttaatgggtaagcgctcagtgcagcctgattccccaactgatgttaaccaggaaaatgtcccctcttttggcatattgaagtatcctccaagagccgaatag

SEQ ID NO: 334764 - DNA, 366 bp, Artificial Sequence
  derived and/or modified sequence
atgagaattatgctgctattcactgctatcctcgccttctctctggcccagtcattcggggcggtatgcaaagaacctcaggaagaggtagttccgggtggcggaaggtccaaaagagatcctgacctataccaattacttcaacgactgtttaaatcacactccagcctcgagggactcttgaaggcgctgtcacaggcttccacagaccccaaggaatctaccagcccagaaaaacgcgacatgcacgatttcttcgtcggccttatgggcaaaagaagcgttcaacctgatagccctacggacgtcaaccaggagaacgtgccaagcttcggaatcctgaaataccctccacgagctgagtag

SEQ ID NO: 334765 - DNA, 366 bp, Artificial Sequence
  derived and/or modified sequence
atgcgaattatgctactatttacagccatcctagccttctcactcgctcaaagctttggtgccgtatgtaaagagcctcaggaggaggtcgtgcccggaggcggccgatccaaaagagatcccgacctctatcaattgctacaaagactgttcaaatcacactctagtctggaggggctcctgaaagctcttagtcaggctagcactgaccctaaggagtcgacctcacctgaaaaacgcgacatgcacgacttctttgtgggcctcatgggcaagagatctgtacagccagacagtcctaccgatgtgaatcaagaaaacgtccctagcttcggtatccttaaatatcctccaagagctgaatag

SEQ ID NO: 334766 - DNA, 366 bp, Artificial Sequence
  derived and/or modified sequence
atgcggataatgttgctgtttacagccatcctggccttttccttggcacagtcattcggagctgtctgtaaagaacctcaagaggaggtggtccctggcggtggaaggagtaaacgcgatccggacctttaccaattgctgcaacggctgtttaagagtcactcaagtctggaaggactgctgaaggcattgtcacaggcatccactgaccccaaagagagcacaagccccgaaaagagggatatgcacgatttttttgttggcctcatgggtaaaaggtccgtccaaccagactcacctacggatgtgaaccaggaaaatgttccctcctttggaatcttgaagtacccccctcgcgcggagtag

SEQ ID NO: 334767 - DNA, 366 bp, Artificial Sequence
  derived and/or modified sequence
atgagaattatgctgctattcactgctatcctcgccttctctctggcccagtcattcggggcggtatgcaaagaacctcaggaagaggtagttccgggtggcggaaggtccaaaagagatcctgacctataccaattacttcaacgactgtttaaatcacactccagcctcgagggactcttgaaggcgctgtcacaggcttccacagaccccaaggaatctaccagcccagaaaaacgcgacatgcacgatttcttcgtcggccttatgggcaaaagaagcgttcaacctgatagccctactgatgttaaccaagagaacgtaccttctttcggaattttaaagtaccctccaagagccgagtag

SEQ ID NO: 334768 - DNA, 366 bp, Artificial Sequence
  derived and/or modified sequence
atgcgaataatgctcctcttcaccgccatacttgctttttccctggcccagagctttggcgctgtatgtaaagaaccacaagaggaggtggtcccaggcgggggcagatcaaagcgtgatcctgacctgtatcagttgttacagaggctctttaagtcacattctagtctggaaggtctgcttaaagccctaagtcaggcttcgacggaccctaaggaaagcacctctccagaaaaacgagacatgcacgacttttttgttggcctgatgggtaaacggagcgtgcaaccagattcccctactgatgtgaaccaggaaaatgtgccgtcatttggaatcttgaaatacccaccccgcgccgagtag

SEQ ID NO: 334769 - DNA, 366 bp, Artificial Sequence
  derived and/or modified sequence
atgcggataatgttgctcttcacagcgatcctggctttttcattggctcagagttttggcgccgtgtgcaaagagccccaagaggaggtcgtccccgggggcggtagatccaagcgtgaccccgatctctatcaactgttacagagactctttaaatcccatagctctctcgaaggcctcctgaaagccttatcccaggcatccacggacccgaaggagtcaacctcacccgagaagcgcgacatgcatgatttttttgtgggactaatggggaagagaagtgttcaacctgattcccctacagacgttaatcaggagaacgtgccatcattcggaattctaaagtacccccctcgcgcagagtag

SEQ ID NO: 334770 - DNA, 1120 bp, Artificial Sequence
  derived and/or modified sequence
agatcccctccactcggtttctctctttgcaggagcaccggcagcaccagtgtgtgaggggagcaggcagcggtcctagccagttccttgatcctgccagaccacccagcccccggcacagagctgctccacaggcaccatgaggatcatgctgctattcacagccatcctggccttcagcctagctcagagctttggggctgtctgtaaggagccacaggaggaggtggttcctggcgggggccgcagcaagagggatccagatctctaccagctgctccagagactcttcaaaagccactcatctctggagggattgctcaaagccctgagccaggctagcacagatcctaaggaatcaacatctcccgagaaacgtgacatgcatgacttctttgtgggacttatgggcaagaggagcgtccagccagactctcctacggatgtgaatcaagagaacgtccccagctttggcatcctcaagtatcccccgagagcagaatagggtattaaagctcatagatttgccctgaaatacactgccaatgcccagcacactgtcggccaaacacaaagacacttagaggcacgtgtgtttgtacacatcccccgtctttcatctctttcctctggatcatggacggcagctgactattgagcaggactctttcagagggacccataattgcagctttcataatcttaccattgagggagcattcccaacctgttaggtgtcaggcagaataggacataaggtttctgggagctggcatttaaagattagatgagatggatcaacacagatcattgtgtcatctgatttcattcatgtgaaacttactccacttccggactcctggactgcattaggaagacctctttccctgtcccaatccccaggtgcgcacgctcctgttaccctttctcttccctgttcttgtaacattcttgtgctttgactccttctccatcttttctacctgaccctggtgtggaaactgcatagtgaatatccccaaccccaatgggcattgactgtagaataccctagagttcctgtagtgtcctacattaaaaatataatgtctctctctattcctcaacaataaaggatttt

SEQ ID NO: 334771 - DNA, 588 bp, Artificial Sequence
  derived and/or modified sequence
aggttctcagtgaggttcaaggagaacagtgtggctgtcaaggtcgtccagggccctgcaggtggtgacaacagcaagctacgctacaaaaaaaaggggagtcattgcttggaggagcaccggcagcaccagtgtgtgaggggagcaggcagcggtcctagccagttccttgatcctgccagaccacccagcccccggcacagagctgctccacaggcaccatgaggatcatgctgctattcacagccatcctggccttcagcctagctcagagctttggggctgtctgtaaggagccacaggaggaggtggttcctggcgggggccgcagcaagagggatccagatctctaccagctgctccagagactcttcaaaagccactcatctctggagggattgctcaaagccctgagccaggctagcacagatcctaaggaatcaacatctcccgagaaacgtgacatgcatgacttctttgtgggacttatgggcaagaggagcgtccagccagactctcctacggatgtgaatcaagagaacgtccccagctttggcatcctcaagtatcccccgagagcagaatagg

SEQ ID NO: 334772 - DNA, 816 bp, Artificial Sequence
  derived and/or modified sequence
ctgagtgactgcagccttcctagatcccctccactcggtttctctctttgcaggagcaccggcagcaccagtgtgtgaggggagcaggcagcggtcctagccagttccttgatcctgccagaccacccagcccccggcacagagctgctccacaggcaccatgaggatcatgctgctattcacagccatcctggccttcagcctagctcagagctttggggctgtctgtaaggagccacaggaggaggtggttcctggcgggggccgcagcaagagggatccagatctctaccagctgctccagagactcttcaaaagccactcatctctggagggattgctcaaagccctgagccaggctagcacagatcctaaggaatcaacatctcccgagaaacgtgacatgcatgacttctttgtgggacttatgggcaagaggagcgtccagccagactctcctacggatgtgaatcaagagaacgtccccagctttggcatcctcaagtatcccccgagagcagaataggtactccacttccggactcctggactgcattaggaagacctctttccctgtcccaatccccaggtgcgcacgctcctgttaccctttctcttccctgttcttgtaacattcttgtgctttgactccttctccatcttttctacctgaccctggtgtggaaactgcatagtgaatatccccaaccccaatgggcattgactgtagaataccctagagttcctgtagtgtcctacattaaaaatataatgtctctctctattcctcaacaataaaggatttttgcatatgaa

SEQ ID NO: 334773 - protein, 206 aa, Artificial Sequence
  derived and/or modified sequence
MITLYQGSMVLDLPTWWKGPRPAAKISPGIYEIFSKEVFGVKVKNLEFGLQPHKIPDTETLCYVMPSSSARCAQFPRAQDKVHYYIKLKDLRDQLKGIERNMDVQEVQYTFDLQLAQEDAKKMAVKEEKYDPGYEAAYGGAYGENPCSSEPCGFSSNGLIESVELRGESAFSGIPNGQWMTQSFTDQIPSFSNHCGTQEQEEESHA

SEQ ID NO: 334774 - DNA, 621 bp, Artificial Sequence
  derived and/or modified sequence
atgatcaccctgtaccagggcagcatggtgctggacctgcccacctggtggaagggccccagacccgccgccaagatcagccccggcatctacgagatcttcagcaaggaggtgttcggcgtgaaggtgaagaacctggagttcggcctgcagccccacaagatccccgacaccgagaccctgtgctacgtgatgcccagcagcagcgccagatgcgcccagttccccagagcccaggacaaggtgcactactacatcaagctgaaggacctgagagaccagctgaagggcatcgagagaaacatggacgtgcaggaggtgcagtacaccttcgacctgcagctggcccaggaggacgccaagaagatggccgtgaaggaggagaagtacgaccccggctacgaggccgcctacggcggcgcctacggcgagaacccctgcagcagcgagccctgcggcttcagcagcaacggcctgatcgagagcgtggagctgagaggcgagagcgccttcagcggcatccccaacggccagtggatgacccagagcttcaccgaccagatccccagcttcagcaaccactgcggcacccaggagcaggaggaggagagccacgcctag

SEQ ID NO: 334775 - DNA, 621 bp, Artificial Sequence
  derived and/or modified sequence
atgattaccctgtatcagggcagcatggtcctcgatctgccaacatggtggaaaggcccccggcctgctgctaagatctcacccgggatctatgagattttctccaaggaagtgttcggggttaaggtaaaaaacctcgaatttggccttcaaccccacaagatccctgacacggaaaccttgtgctatgtgatgcccagcagttccgccagatgtgctcagttcccacgcgcgcaggataaagtccactattatattaaactgaaggacctccgtgaccagctcaaggggatcgagaggaatatggacgtgcaggaggttcagtataccttcgatttgcagctggctcaggaggatgcgaagaagatggccgtgaaggaggagaagtatgacccaggttatgaagcggcctacggaggggcctacggtgagaacccctgcagttctgagccgtgtggcttttcctcaaacggacttatcgagtccgttgaactcagaggtgaatccgcattttcggggataccaaacggtcagtggatgacccagagtttcacagaccaaattccctctttttcgaatcactgcggaacccaggagcaggaagaagagtcccatgcttag

SEQ ID NO: 334776 - DNA, 621 bp, Artificial Sequence
  derived and/or modified sequence
atgatcaccctgtaccagggctccatggtgctggacctgcccacctggtggaagggccccaggcctgctgccaagatcagccctggcatctatgagatcttcagcaaggaggtgtttggagtgaaggtgaagaacctggagtttggcctgcagccccacaagatcccagacacagagaccctgtgctacgtgatgcccagcagcagcgcccgctgtgcccagttcccccgggcccaggacaaggtgcactactacatcaagctgaaggacctgcgggaccagctgaagggcatcgagaggaacatggatgtgcaggaggtgcagtacacctttgacctgcagctggcccaggaggatgccaagaagatggctgtgaaggaggagaagtatgaccccggctatgaggccgcctacggcggggcctacggggagaacccctgcagcagcgagccctgtggcttcagcagcaatggcctcatcgagagcgtggagctgcggggggagagcgccttcagcggcatccccaacggccagtggatgacccagagcttcacagaccagatccccagcttcagcaaccactgcggcacccaggagcaggaggaggagagccacgcctag

SEQ ID NO: 334777 - DNA, 621 bp, Artificial Sequence
  derived and/or modified sequence
atgatcaccctgtaccagggcagcatggtgctggacctgcccacctggtggaaagggcctaggcctgccgcaaagatttccccaggcatttatgaaatcttttctaaggaggtcttcggtgtcaaagtgaagaacctggagttcgggttacagcctcacaagatccccgacacagagaccctatgctatgtgatgccctctagtagtgctaggtgtgcccaatttccccgcgcacaggataaggtacactactacattaaacttaaagatctgcgggatcagctaaagggaatagaacgtaatatggacgtgcaggaggtgcagtataccttcgatctccagctagcccaggaagacgccaagaagatggccgtcaaagaggagaagtatgatcctggctacgaagccgcttatgggggggcatacggcgagaacccctgctcgtccgagccttgtggtttcagctccaatggcctgatagagagcgtcgaactgcggggcgaatccgcttttagtggtattcccaacggccagtggatgactcaatccttcactgaccagattccctctttttcaaaccactgcggcactcaggagcaggaagaagagagtcatgcttag

SEQ ID NO: 334778 - DNA, 621 bp, Artificial Sequence
  derived and/or modified sequence
atgatcaccctgtaccagggttccatggtgctggacctgccgacatggtggaaaggaccgaggcccgctgcaaaaattagccctgggatctatgagatattctctaaagaggtctttggagtcaaggttaagaatctggagttcggcctgcagcctcacaaaatccctgatacagagaccttatgttacgttatgccctcgagcagcgctcggtgtgctcaattccccagagctcaggacaaagtgcattactacatcaagctaaaagatttgagagatcagctgaagggaattgaacgaaatatggacgtccaggaagtgcagtatacattcgacctgcagctggcgcaggaagacgctaagaagatggccgtgaaggaggaaaaatacgaccctggctatgaggctgcctatggtggtgcctacggggagaatccttgctccagcgaaccatgcggcttctcttccaacggtctgatcgagtccgtggagcttaggggcgagtctgcttttagcggcataccaaacggccaatggatgactcagtcattcaccgaccagatcccctccttctcaaatcactgtgggactcaggaacaggaggaggagtcacacgcttag

SEQ ID NO: 334779 - DNA, 2165 bp, Artificial Sequence
  derived and/or modified sequence
ctggccgccgagggtcgcggcgcccaggctgccggagccgccgccgtctgggctcggatccgggaagctgcggcgctgccgcggcagcggcgggcccctcatttgcatgcgattagcatgcgcccgcccgcctcatctgcatgcgcattcctcgcgccgcattcctgagcttaaccccgccgctgccggcgtcgccgcaccagctcggacgcactgccccgcggggccgcggctccaggtgggaggaaggcgggcgaaggaatgtgcggccagctccctccccttgaccccagatagctcccctgggccaaacgccgagaggttttagagtttctggacggggaagattgcaaaagtctccgcaaccttctcaacctctttcgtcttctagggaaaccacaaaactttcgagaggaaaggggtggcgggcggggagctctcctccggagaaaaaacctcaacaagcggagagggcacaaaggctccccacgccgcgccccgagcccctccggcaccccaagggcggtccggggtggtgggaaagcgccaagccctgggagtgcgtcggtgggtccgggacggcggggcctccgccagggctcctggccctcgatgacctcggctgagaccgcgagccgcgcggcggaaagcggaggaactcccgtccggccctgtagccgcccgcaccgcgccccgtcacccgccgccccttcgcgtccgggcgctccagccgcggggccccggaagctcctggtccctggcctcccctgcttggttcggggcggttggccgtggacgcgccccgactctagtcccttccgtccagccgcccgccccaggatgtccccccaccgcagccccgccgtggccaggaggtgtgggcggccacgccggagggacccacggcggcgccggacgcccgcccttcctaggccctggcccggccggggtgggccgggacgttccctgttgcataggcatttatttattcagcagctactacgtacgtgctggcccgcactgccgagggaccggacgcctgccccaggcgggacaatgccgggtgcagcgctggcggggcctggacgccaagcttcagggtccccagcccctcagtcagagggggcgcctcccaggccctggactcctctccagccgggtctacaccaccgtcccccgtcatcttcttctgggttactgagcagcttcttttaaaatagcaacaccgaggaaggccccgaagcccagtcttgcacctcgtggtgtgaagtcgtttaatcctgcccgctaatgcgtaaggactttccaccgtgtgcaggactccgcgctgggcaggggctctcgcagggtttgaaccgacctccgcctcccctgcgggttcacaggcctgcgaggaagtcgcgtgaaggagattcgctactgtgtgaggctggcctgcgcggcgtgggcagtagctgtccggggctggggacagctttcggctccccaggccatcccgtcggggcatctgcggccaatctcgaaggtggagaggctcagggttggaacagacttcacggaaggggtcctagaagaggaaaggggtcgtgtttgcccttagagcagtctgggcgtgaagcggaaactttaaaccaccagaaactctggagagcttggagcacctgggaaggagcaaccagagtgggccggaggtagggaaggaaggcacccacggcgaatttgcccgctttgaccgcatttagggcggccgcttgtgcagccagccttctggaaggtaggctttgcgcttggtgaagagaagcccccacctccggatctgtgttccgccccagtccattcatcaggaggtgatcacacaagtcaagcttctctagttcccggtggaatgagacgccctggtggggtcttaaggttgaacgtttgaatactgtaaaaaagatgggacctgcctacaattaatctctcacactactgagcgaatgtgcgttgttttggacttccctaaattggcccaaatgcatagccaacacttgaattgcggtgtactaacaacatcattcagcaccaaaccaaaccattcttatttaaaccttgcttcctagcttatttatttcccaaacaacttgaaaacatttgttatactaaaatgtctacatcttactatt

SEQ ID NO: 334780 - DNA, 1802 bp, Artificial Sequence
  derived and/or modified sequence
acccaaccgtgcctgtctcggaccccgcacccaaaccactggaggtcctgatcgatctgcccaccggagcctccgggcttcgacatgctggaggagccccggccgcggcctccgccctcgggcctcgcgggtctcctgttcctggcgttgtgcagtcgggctctaagcaatgagattctgggcctgaagttgcctggcgagccgccgctgacggccaacaccgtgtgcttgacgctgtccggcctgagcaagcggcagctaggcctgtgcctgcgcaaccccgacgtgacggcgtccgcgcttcagggtctgcacatcgcggtccacgagtgtcagcaccagctgcgcgaccagcgctggaactgctccgcgcttgagggcggcggccgcctgccgcaccacagcgccatcctcaagcgcggtttccgagaaagtgctttttccttctccatgctggctgctggggtcatgcacgcagtagccacggcctgcagcctgggcaagctggtgagctgtggctgtggctggaagggcagtggtgagcaggatcggctgagggccaaactgctgcagctgcaggcactgtcccgagggaagctccccgggacatccaggcacgaatgcgaatccacaacaacagggtggggcgccaggtggtaactgaaaacctgaagcggaaatgcaagtgtcatggcacatcaggcagctgccagttcaagacatgctggagggcggccccagagttccgggcagtgggggcggcgttgagggagcggctgggccgggccatcttcattgatacccacaaccgcaattctggagccttccagccccgtctgcgtccccgtcgcctctcaggagagctggtctactttgagaagtctcctgacttctgtgagcgagaccccactatgggctccccagggacaaggggccgggcctgcaacaagaccagccgcctgttggatggctgtggcagcctgtgctgtggccgtgggcacaacgtgctccggcagacacgagttgagcgctgccattgccgcttccactggtgctgctatgtgctgtgtgatgagtgcaaggttacagagtgggtgaatgtgtgtaagtgagggtcagccttaccttggggctggggaagaggactgtgtgagaggggcgccttttcagccctttgctctgatttccttccaaggtcactcttggtccctggaagcttaaagtatctacctggaaacagctttaggggtggtgggggtcaggtggactctgggatgtgtagccttctccccaacaattggagggtcttgaggggaagctgccacccctcttctgctccttagacacctgaatggactaagatgaaatgcactgtattgctcctcccacttctcaactccagagcccctttaaccctgattcatactccttttggctggggagtccctatagtttcaccactcctctcccttgagggataaccccaggcactgtttggagccataagatctgtatctagaaagagatcacccactcctatgtactatccccaaactcctttactgcagcctgggctccctcttgtgggataatgggagacagtggtagagaggtttttcttgggaaagagacagagtgctgaggggcactctcccctgaatcctcagagagttgtctgtccaggcccttagggaagttgtctccttccattcagatgttaatggggaccctccaaaggaaggggttttcccatgactcttggagcctctttttccttcttcagcaggaagggtgggaaggga

SEQ ID NO: 334781 - protein, 191 aa, Artificial Sequence
  derived and/or modified sequence
MLEEPRPRPPPSGLAGLLFLALCSRALSNEILGLKLPGEPPLTANTVCLTLSGLSKRQLGLCLRNPDVTASALQGLHIAVHECQHQLRDQRWNCSALEGGGRLPHHSAILKRGFRESAFSFSMLAAGVMHAVATACSLGKLVSCGCGWKGSGEQDRLRAKLLQLQALSRGKLPGTSRHECESTTTGWGARW

SEQ ID NO: 334782 - protein, 102 aa, Artificial Sequence
  derived and/or modified sequence
MLEEPRPRPPPSGLAGLLFLALCSRALSNEILGLKLPGEPPLTANTVCLTLSGLSKRQLGLCLRNPDVTASALQGLHIAVHECQHQLRDQRWNCSALEGGGR

SEQ ID NO: 334783 - DNA, 576 bp, Artificial Sequence
  derived and/or modified sequence
atgctggaggagcccagacccagacccccccccagcggcctggccggcctgctgttcctggccctgtgcagcagagccctgagcaacgagatcctgggcctgaagctgcccggcgagccccccctgaccgccaacaccgtgtgcctgaccctgagcggcctgagcaagagacagctgggcctgtgcctgagaaaccccgacgtgaccgccagcgccctgcagggcctgcacatcgccgtgcacgagtgccagcaccagctgagagaccagagatggaactgcagcgccctggagggcggcggcagactgccccaccacagcgccatcctgaagagaggcttcagagagagcgccttcagcttcagcatgctggccgccggcgtgatgcacgccgtggccaccgcctgcagcctgggcaagctggtgagctgcggctgcggctggaagggcagcggcgagcaggacagactgagagccaagctgctgcagctgcaggccctgagcagaggcaagctgcccggcaccagcagacacgagtgcgagagcaccaccaccggctggggcgccagatggtag

SEQ ID NO: 334784 - DNA, 576 bp, Artificial Sequence
  derived and/or modified sequence
atgctcgaagaacccaggcccaggccgcctccctctggcctagcagggctgttattcctggcactgtgttcgcgggccctgagcaacgagatcttagggcttaagttgcccggggaacctccactcaccgccaacactgtttgcctcactctgtctggccttagtaaaaggcaattaggactttgccttaggaatcctgacgtcacagcctccgcgctgcagggcttgcatatcgccgtccacgaatgtcagcatcagcttcgggaccagcgttggaattgttccgccctcgaaggtggtggacggctcccccaccatagcgctatattgaaaagaggctttagagaatctgccttttctttctccatgttggccgcaggggttatgcatgccgtggcaacagcatgtagtctcgggaagttagtgtcttgcggatgtgggtggaaaggctctggagagcaggatcggcttcgggccaagttactgcaacttcaggccctgtctagagggaagctgcctggaacgtcgagacatgaatgcgaatctacaactactggctggggcgctcgatggtag

SEQ ID NO: 334785 - DNA, 576 bp, Artificial Sequence
  derived and/or modified sequence
atgctggaggagccccggccccggcccccacccagcggcctggccggcctgctcttcctggccctgtgcagccgggccctgagcaatgagatcctgggcctgaagctgcctggagagccccccctgacagccaacacagtgtgcctgaccctgagcggcctgagcaagaggcagctgggcctgtgcctgaggaacccagatgtgacagccagcgccctgcagggcctgcacatcgctgtgcatgagtgccagcaccagctgcgggaccagcgctggaactgcagcgccctggagggcggcggccgcctgccccaccacagcgccatcctgaagaggggcttccgggagagcgccttctccttctccatgctggccgccggcgtgatgcatgctgtggccacagcctgcagcctgggcaagctggtgtcctgtggctgcggctggaagggcagcggggagcaggaccggctgcgggccaagctgctgcagctgcaggccctgagccggggcaagctgcccggcaccagcagacatgaatgtgagagcaccaccaccggctggggcgcccgctggtag

SEQ ID NO: 334786 - DNA, 576 bp, Artificial Sequence
  derived and/or modified sequence
atgctggaggagccccggccccggcccccccccagcggcctggccggtttgcttttccttgccctttgcagccgcgccctcagcaacgaaattctgggcttaaagttgcctggcgagcccccactaacagccaatacagtttgtttgactctctccgggcttagtaagagacagctgggcttgtgccttagaaatcccgatgtgactgcatctgccctgcaaggcctccacattgccgtccatgagtgccagcatcagcttcgagaccagaggtggaactgctcagccctggagggaggagggagattgcctcatcacagcgccatcctgaagcggggcttccgggaatctgcattcagttttagtatgctggccgccggtgtcatgcatgccgtggcgactgcgtgttccctgggcaaactggtttcttgtggatgcggttggaaggggtctggcgaacaggatcggctacgagcaaagctgctacagctgcaagccctcagtcgcggcaaactgcccggcaccagccggcacgagtgtgagagcacaacaaccgggtggggcgccagatggtag

SEQ ID NO: 334787 - DNA, 576 bp, Artificial Sequence
  derived and/or modified sequence
atgctcgaagagcctcgcccacgcccaccacctagcggcttggcaggactgctgtttttggccctctgttctcgcgctctgtctaatgagatcctcggactcaagctgcctggcgagccaccactgacagctaacacggtgtgtctgacactgtccggcctcagtaaaagacagctcggtctctgtctccgaaaccccgatgtcaccgccagcgcactccaagggctgcatatagctgtacacgagtgccagcaccagctgcgggatcagcgctggaattgcagcgcattggaagggggaggaaggcttcctcaccattccgcaatcctcaagcgtggatttcgcgaatcagccttttccttttctatgttggccgctggtgtgatgcacgctgtggccaccgcatgtagcttgggaaaacttgtttcttgcgggtgcggctggaaaggaagcggcgaacaagataggctgcgggctaaactgctgcaattacaagctttaagtcggggaaaactgccgggtaccagcagacacgagtgtgagtcaaccacgactggttggggcgctaggtggtag

SEQ ID NO: 334788 - DNA, 576 bp, Artificial Sequence
  derived and/or modified sequence
atgttagaggaaccacggccccgaccccctccctctggcttggcgggacttttgttccttgccttgtgctccagagccctgtcgaatgagattctgggtctgaaactgcctggcgaacctcccctcacggccaataccgtgtgtcttacattgtccggcttatccaaaaggcagctcggtttatgcctgcgcaaccctgacgtaactgcatcagctctgcagggactgcatatcgccgtccacgagtgtcagcatcagttaagagaccaaaggtggaattgctccgcgcttgaaggaggcggccgtctgccccaccactctgctattctaaaaaggggctttcgggagagtgctttttccttcagcatgctcgccgctggggtgatgcacgccgtggccaccgcttgcagcctcgggaagttggtttcttgcggatgtggctggaaagggagtggtgaacaagaccggctgagagctaagctactacagcttcaagcactttcccggggaaaacttcctggaaccagccggcacgaatgcgagtctaccaccacgggatggggcgcccggtggtag

SEQ ID NO: 334789 - DNA, 576 bp, Artificial Sequence
  derived and/or modified sequence
atgttagaggaaccacggccccgaccccctccctctggcttggcgggacttttgttccttgccttgtgctccagagccctgtcgaatgagattctgggtctgaaactgcctggcgaacctcccctcacggccaataccgtgtgtcttacattgtccggcttatccaaaaggcagctcggtttatgcctgcgcaaccctgacgtaactgcatcagctctgcagggactgcatatcgccgtccacgagtgtcagcatcagttaagagaccaaaggtggaattgctccgcgcttgaaggaggcggcagactgccacatcattccgctatactgaagagaggctttcgagagagcgcattttccttctcaatgctagccgcgggggttatgcatgccgtcgctactgcttgctctctgggcaaacttgtgagctgtggttgtgggtggaaaggctccggcgaacaggaccgtcttcgagcaaagctcctccagttgcaggccctatcaagagggaagcttccaggaactagtcgccatgagtgcgagtcaactacgacgggttggggagctcgatggtag

SEQ ID NO: 334790 - DNA, 309 bp, Artificial Sequence
  derived and/or modified sequence
atgctggaggagcccagacccagacccccccccagcggcctggccggcctgctgttcctggccctgtgcagcagagccctgagcaacgagatcctgggcctgaagctgcccggcgagccccccctgaccgccaacaccgtgtgcctgaccctgagcggcctgagcaagagacagctgggcctgtgcctgagaaaccccgacgtgaccgccagcgccctgcagggcctgcacatcgccgtgcacgagtgccagcaccagctgagagaccagagatggaactgcagcgccctggagggcggcggcagatag

SEQ ID NO: 334791 - DNA, 309 bp, Artificial Sequence
  derived and/or modified sequence
atgctagaggagccccgcccacgccccccgccctccgggctggcagggctgctgttcttagcactctgctcccgcgccctctctaacgagatactcggcctgaagctgccgggtgagccccctctgactgcaaacaccgtttgtctaacattgtctggtctgtccaagcggcaactgggcctgtgcctgcggaaccccgatgtgacagcctcagcactccaggggctccatatcgcggtgcacgaatgccagcatcagctccgggaccaaagatggaactgttcggccttggagggtggaggccgctag

SEQ ID NO: 334792 - DNA, 309 bp, Artificial Sequence
  derived and/or modified sequence
atgctggaggagccccggccccggcccccacccagcggcctggccggcctgctcttcctggccctgtgcagccgggccctgagcaatgagatcctgggcctgaagctgcctggagagccccccctgacagccaacacagtgtgcctgaccctgagcggcctgagcaagaggcagctgggcctgtgcctgaggaacccagatgtgacagccagcgccctgcagggcctgcacatcgctgtgcatgagtgccagcaccagctgcgggaccagcgctggaactgcagcgccctggagggcggcggccgctag

SEQ ID NO: 334793 - DNA, 309 bp, Artificial Sequence
  derived and/or modified sequence
atgctggaggagccccggccccggcccccccccagcggcctggccgggctgcttttcctcgctctctgctcaagagccctgagcaatgagatactgggcctcaagctgcccggggagccgcctctcactgctaacacagtatgcttgacgctttcagggcttagcaagcgacagctcggactgtgcctgagaaatccagacgtgacggcctctgccctgcaaggcctgcacatcgcagtgcatgagtgtcagcatcagttgcgggaccaacgttggaattgcagtgcacttgaaggagggggccggtag

SEQ ID NO: 334794 - DNA, 309 bp, Artificial Sequence
  derived and/or modified sequence
atgctcgaggaacctcgccctagacctcccccaagcggactcgcaggcctcctgtttctggcgctttgtagtcgagcgctgtctaatgagatacttggtctgaaactgcccggagaaccacccctaaccgcaaatactgtgtgtctcactttgtccggcctgtccaaaaggcagttaggtctgtgtctaaggaacccagacgtcactgccagcgcgcttcagggactccatatcgccgtccacgaatgtcagcaccagctgcgcgaccagcgctggaactgtagcgccctggagggaggcggtcgctag

SEQ ID NO: 334795 - DNA, 309 bp, Artificial Sequence
  derived and/or modified sequence
atgctggaggagccacgaccgcggccacctccgtccgggttagctggactgctatttctcgcactgtgtagccgcgccttgagtaatgagatcctggggctgaaactgccgggcgagcctccactgactgcaaacactgtctgccttacactgtcaggccttagcaaacgacagttgggcctgtgcttaagaaatcctgacgtaacagcttctgcactgcaaggattgcacatagctgtacacgagtgtcaacaccagctccgagaccaacgttggaactgcagtgctttggaaggcggggggcgctag

SEQ ID NO: 334796 - DNA, 309 bp, Artificial Sequence
  derived and/or modified sequence
atgctggaagaaccgagaccacgacctccaccgtcaggactagccggtctacttttcctggctctctgcagcagagcactgtccaatgagatattggggctgaagctcccgggagaaccgcccctaacagctaatacagtctgtctaacactctcaggcttgtcaaagaggcagctcggcctgtgtctccgcaatcccgacgtaactgcgtccgctctgcagggccttcacatcgcagtccacgaatgccagcatcagctcagagaccaaaggtggaattgctccgcccttgaggggggtgggcgatag

SEQ ID NO: 334797 - DNA, 559 bp, Artificial Sequence
  derived and/or modified sequence
caagtgtttgtgagtctgtgtgtctgagtttgcaagtgagtgtgtgtctgtgtgccgggcgttgtgtctgattgggcaaggttccaggggtgctcgcttgagtcctgagctgggacaacgccttgactcttcttctttaagacctccaagcctcagggactctgggaatcaaggggtgtttcttcttgttttgtttgaggaggaatgagaagggtcctgatcgatctgcccaccggagcctccgggcttcgacatgctggaggagccccggccgcggcctccgccctcgggcctcgcgggtctcctgttcctggcgttgtgcagtcgggctctaagcaatgagattctgggcctgaagttgcctggcgagccgccgctgacggccaacaccgtgtgcttgacgctgtccggcctgagcaagcggcagctaggcctgtgcctgcgcaaccccgacgtgacggcgtccgcgcttcagggtctgcacatcgcggtccacgagtgtcagcaccagctgcgcgaccagcgctggaactgctccgcgcttgagggcggcggccgc

SEQ ID NO: 334798 - protein, 100 aa, Artificial Sequence
  derived and/or modified sequence
MRPRGLPPLLVVLLGCWASVSAQTDATPAVTTEGLNSTEAALATFGTFPSTRPPGTPRAPGPSSGPRPTPVTDGGYHVPAPGVHSDPTSRGQPRCCSLCL

SEQ ID NO: 334799 - DNA, 252 bp, Artificial Sequence
  derived and/or modified sequence
atgagacccaggggcctgcctccacttctggtggttctgctcggctgctgggcgtctgtttccgcacagaccgatgccacccccgctgtaacaaccgaaggcctcaatagcacagaagccgcactggcaacttttggcacgtttccctccactagacctccgggaacaccgcgagctcccggtcccagcagcgggcctaggccaacccccgtcaccgacggtagccacagtgtgacccaagctggagtatag

SEQ ID NO: 334800 - DNA, 303 bp, Artificial Sequence
  derived and/or modified sequence
atgcggcctcgaggtcttcccccactgctagtagtcctgcttggatgttgggcttctgtttccgcacagactgacgccacaccagctgtcacgaccgaggggctcaacagcactgaggcagccctagctacattcgggaccttcccctcaacacgaccaccaggcacccctcgcgcaccagggcctagttctggccctcgccctacaccagtgactgacggtggctaccatgtgcctgcacctggcgtgcactctgatcctactagccggggacagccacggtgttgctctctgtgcctctag

SEQ ID NO: 334801 - DNA, 252 bp, Artificial Sequence
  derived and/or modified sequence
atgagaccccgcggattaccaccactcctggttgttcttctgggttgctgggcatccgtgtcagcccaaactgatgccacccctgcagtcactactgaaggcttgaactctaccgaagccgcactcgccacctttggaacctttccgagtactcgccctcccggcacccctcgtgcccctggtccttctagcgggccgcgacccactccagttaccgatggtagccatagcgttacacaagctggagtctag

SEQ ID NO: 334802 - DNA, 303 bp, Artificial Sequence
  derived and/or modified sequence
atgcggccaagaggtctgccacccctcttggtcgtgctgctcggatgctgggcttcagtctctgcgcagacggacgctacccccgcagtcaccacagaaggcttgaactcgacagaggcagcccttgccacgtttgggaccttcccctccacgagaccgcccggaacccctagagctccagggccatcctccggacctcgccctaccccagttactgacggcggatatcacgtgccagccccaggtgtgcactccgaccctacttctcgaggccagcctcggtgttgctctctctgtctctag

SEQ ID NO: 334803 - DNA, 252 bp, Artificial Sequence
  derived and/or modified sequence
atgagacccagaggcctgccccccctgctggtggtgctgctgggctgctgggccagcgtgagcgcccagaccgacgccacccccgccgtgaccaccgagggcctgaacagcaccgaggccgccctggccaccttcggcaccttccccagcaccagaccccccggcacccccagagcccccggccccagcagcggccccagacccacccccgtgaccgacggcagccacagcgtgacccaggccggcgtgtag

SEQ ID NO: 334804 - DNA, 303 bp, Artificial Sequence
  derived and/or modified sequence
atgagacccagaggcctgccccccctgctggtggtgctgctgggctgctgggccagcgtgagcgcccagaccgacgccacccccgccgtgaccaccgagggcctgaacagcaccgaggccgccctggccaccttcggcaccttccccagcaccagaccccccggcacccccagagcccccggccccagcagcggccccagacccacccccgtgaccgacggcggctaccacgtgcccgcccccggcgtgcacagcgaccccaccagcagaggccagcccagatgctgcagcctgtgcctgtag

SEQ ID NO: 334805 - DNA, 252 bp, Artificial Sequence
  derived and/or modified sequence
atgcggccccgcgggcttccccctttgctagtagtcctgctgggatgctgggcaagtgtgagtgctcagactgacgcaaccccggcagtgaccaccgaagggctgaactccactgaggccgcactggccacatttggaacattcccttccacgcggcccccgggtacaccccgggctcccggaccatcttctggccccaggccaacccccgtgactgacgggagccattctgtgacccaggctggtgtatag

SEQ ID NO: 334806 - DNA, 303 bp, Artificial Sequence
  derived and/or modified sequence
atgcggccacgcggtttacccccccttctggtcgtactgctgggttgctgggcctctgtgagtgctcagacagacgcgaccccagccgtgactacagaaggactgaacagcaccgaggcagcactggccaccttcggcacatttccttcgacaaggcctcctggcacaccgagggcaccaggtcctagcagcggcccgcggcctacacccgttactgacggggggtaccatgtacctgcgccgggcgtgcatagcgaccctacaagtcgcggccagccaagatgttgttctctatgtctgtag

SEQ ID NO: 334807 - DNA, 252 bp, Artificial Sequence
  derived and/or modified sequence
atgaggccccggggcctgccccccctgctggtggtgctgctgggctgctgggcctctgtgtctgcccagacagatgccaccccagctgtgaccacagagggcctgaacagcacagaggccgccctggccaccttcggcaccttccccagcaccaggcctcctggcaccccccgggcccctggccccagcagcggcccccggcccacccctgtgacagatggcagccacagcgtgacccaggccggcgtgtag

SEQ ID NO: 334808 - DNA, 303 bp, Artificial Sequence
  derived and/or modified sequence
atgaggccccggggcctgccccccctgctggtggtgctgctgggctgctgggcctctgtgtctgcccagacagatgccaccccagctgtgaccacagagggcctgaacagcacagaggccgccctggccaccttcggcaccttccccagcaccaggcctcctggcaccccccgggcccctggccccagcagcggcccccggcccacccctgtgacagatggcggctaccacgtgcctgcccctggggtgcacagcgaccccaccagccggggccagccccgctgctgcagcctgtgcctgtag

SEQ ID NO: 334809 - DNA, 252 bp, Artificial Sequence
  derived and/or modified sequence
atgcggccccggggcctgccccccctgctggtggtgctgctgggctgctgggcttcagtgagtgcacaaactgacgccaccccagctgtcaccaccgagggtctgaatagcacggaggcagccctcgcaacctttgggacgtttccatccacacgtccaccagggacccctcgggccccgggaccaagtagcggaccgcgaccaacgcccgttaccgacggctctcactcggtaacgcaagccggcgtgtag

SEQ ID NO: 334810 - DNA, 303 bp, Artificial Sequence
  derived and/or modified sequence
atgcggccccggggcctgccccccctgctggtggtgctgctgggctgctgggccagtgtctccgcccagaccgacgcaactccagctgttacgaccgagggattaaattctacggaggctgcactcgctacatttggcaccttccctagtacacgccccccggggacaccaagggcccctggaccttccagcgggccgcgccccaccccagtcacagacggtggatatcatgttcctgcccccggtgtgcattctgatccaacaagtcggggtcagcccagatgctgctccctgtgtctctag

SEQ ID NO: 334811 - RNA, 252 nt, Artificial Sequence
  derived and/or modified sequence
augagaccccgcggauuaccaccacuccugguuguucuucuggguugcugggcauccgugucagcccaaacugaugccaccccugcagucacuacugaaggcuugaacucuaccgaagccgcacucgccaccuuuggaaccuuuccgaguacucgcccucccggcaccccucgugccccugguccuucuagcgggccgcgacccacuccaguuaccgaugguagccauagcguuacacaagcuggagucuag

SEQ ID NO: 334812 - RNA, 303 nt, Artificial Sequence
  derived and/or modified sequence
augcggccaagaggucugccaccccucuuggucgugcugcucggaugcugggcuucagucucugcgcagacggacgcuacccccgcagucaccacagaaggcuugaacucgacagaggcagcccuugccacguuugggaccuuccccuccacgagaccgcccggaaccccuagagcuccagggccauccuccggaccucgcccuaccccaguuacugacggcggauaucacgugccagccccaggugugcacuccgacccuacuucucgaggccagccucgguguugcucucucugucucuag

SEQ ID NO: 334813 - protein, 260 aa, Artificial Sequence
  derived and/or modified sequence
MKTSDGFTLNAESYVSFTTKLDIPTAAKYEYGVPLQTSDSFLRFPSSLTSSLCTDNNPAAFLVNQAVKCTRKINLEQCEEIEALSMAFYSSPEILRVPDSRKKVPITVQSIVIQSLNKTLTRREDTDVLQPTLVNAGHFSLCVNVVLEVKYSLTYTDAGEVTKADLSFVLGTVSSVVVPLQQKFEIHFLQTDWSSPVSARSTEGEEPAVGPGLPRLRGPFWKFPGPGHAGLGAHPLHHPVIQQEGFLPAPRGFGYRSEVD

SEQ ID NO: 334814 - DNA, 783 bp, Artificial Sequence
  derived and/or modified sequence
atgaagacgagcgacggatttactttaaatgctgaatcctacgtgagtttcacaactaagctcgacatacctacagctgcaaagtatgagtatggcgtgccccttcagacaagcgatagtttcctgcggttcccgtctagtttgaccagctccctatgcaccgacaataatccagctgccttcttggtgaatcaggcagtgaagtgcacacgcaagatcaacctcgagcagtgtgaagagatcgaagccctgtcgatggcattctactctagcccggaaatcctgagggttcccgatagtagaaagaaggtgcctattaccgttcagtctatcgtcattcagtccctgaataaaacactgacacgccgtgaggatacagacgtgctccagccgaccctggtgaatgcaggccacttctcactgtgcgtgaacgtggtgttggaagtgaagtattccttaacctatactgatgccggagaagttaccaaggctgacttgtcttttgtgttggggaccgtatcttccgtcgtggtgcctctacagcagaaattcgagatacattttttgcaaactgactggtcctctcctgtgtctgctcggtccacggagggggaagaacctgcagtgggccctgggctccctcgcctaagagggcctttttggaaattcccaggccctgggcatgctggccttggggctcaccctcttcaccacccagtgattcagcaggaggggttcctcccagctcccaggggctttggttacaggtccgaggtggactag

SEQ ID NO: 334815 - DNA, 783 bp, Artificial Sequence
  derived and/or modified sequence
atgaagacaagtgatgggttcacactaaacgccgaatcttatgtctccttcaccaccaagctggatatacccactgccgcaaagtacgaatatggtgtgcccctgcaaacaagcgactccttcctgcggttccctagttccctcacaagcagtctgtgcactgacaacaacccggctgccttccttgtgaaccaggctgtgaagtgcactcgaaaaataaacctggagcagtgcgaagagatcgaggccctctccatggccttttactcatcgcctgagatactgagagtgcctgattcaagaaagaaagtacctataaccgtccagtctatcgtcatccaatctttgaacaagactcttacacgacgcgaggacacagacgtactccagccgactttagtcaatgccgggcacttctccctatgcgtaaatgtcgtcctggaggtcaagtactccttgacatatactgacgccggcgaagtcaccaaagccgacctgtccttcgttcttgggacagtttcgtccgtggttgtgccgctgcaacagaaatttgagatccattttctccagacagactggtcatcccctgtttcagctcgctccactgaaggagaggagccagccgtgggacctggcctcccccgtttacgcggacctttttggaagtttcctggacctggtcacgctggcctgggtgcccacccattgcatcatccagtcatccagcaggagggcttcttgcccgcccctcgcggtttcggatatagaagtgaagttgattag

SEQ ID NO: 334816 - DNA, 783 bp, Artificial Sequence
  derived and/or modified sequence
atgaagacttctgacggtttcaccttgaacgctgagtcctatgtatccttcacaaccaagctagacatcccaacagccgcgaagtacgaatacggcgtgcctttgcagacgtctgacagctttcttagatttccctcctccctgacttcctctctctgcaccgataataaccctgccgcttttctggtgaaccaagccgttaaatgcactcgcaaaatcaacctggagcagtgcgaagagatcgaggcccttagtatggccttctatagctcacccgagatactgcgggttcctgatagccgcaagaaagtaccaataaccgtgcaaagtatcgtgattcagagcctcaataagaccctgacccgaagagaagatacagacgtgctccaacccacattagtaaatgctgggcatttctcactgtgcgtgaatgtcgtgctggaagttaaatactcacttacctatacagatgccggagaagtgactaaagccgacctcagtttcgtactggggactgtctcttccgttgtggtccccctgcagcaaaagttcgagattcattttctccaaaccgactggtcaagtccggttagtgctcggagtacggaaggcgaggaaccagcagtaggaccaggtttgcctagactgaggggtccattctggaagttcccgggccctgggcacgccggacttggtgcccacccactccaccacccagttattcaacaggagggatttcttccagcacctagaggattcgggtatcgaagcgaagtcgactag

SEQ ID NO: 334817 - DNA, 783 bp, Artificial Sequence
  derived and/or modified sequence
atgaagaccagcgacggcttcaccctgaacgccgagagctacgtgagcttcaccaccaagctggacatccccaccgccgccaagtacgagtacggcgtgcccctgcagaccagcgacagcttcctgagattccccagcagcctgaccagcagcctgtgcaccgacaacaaccccgccgccttcctggtgaaccaggccgtgaagtgcaccagaaagatcaacctggagcagtgcgaggagatcgaggccctgagcatggccttctacagcagccccgagatcctgagagtgcccgacagcagaaagaaggtgcccatcaccgtgcagagcatcgtgatccagagcctgaacaagaccctgaccagaagagaggacaccgacgtgctgcagcccaccctggtgaacgccggccacttcagcctgtgcgtgaacgtggtgctggaggtgaagtacagcctgacctacaccgacgccggcgaggtgaccaaggccgacctgagcttcgtgctgggcaccgtgagcagcgtggtggtgcccctgcagcagaagttcgagatccacttcctgcagaccgactggagcagccccgtgagcgccagaagcaccgagggcgaggagcccgccgtgggccccggcctgcccagactgagaggccccttctggaagttccccggccccggccacgccggcctgggcgcccaccccctgcaccaccccgtgatccagcaggagggcttcctgcccgcccccagaggcttcggctacagaagcgaggtggactag

SEQ ID NO: 334818 - DNA, 783 bp, Artificial Sequence
  derived and/or modified sequence
atgaaaacttccgacggattcaccctgaacgccgaaagttatgttagcttcaccaccaaactagacatccctacagcagctaaatatgagtacggggtgcctctccagacctctgacagtttcttgagatttccaagttcattgacctcgtcactgtgtacagacaacaaccctgcagcttttctagttaaccaggctgtcaaatgtacgcgcaagataaatctcgaacagtgcgaggagatcgaagcactcagcatggcgttctacagcagccccgagattctgagagtccctgactccaggaaaaaagtgcccataacagtgcaaagcatcgtgattcaatcgcttaacaaaaccctgacaaggcgtgaggataccgacgtgcttcaacccactctggtgaatgccggacattttagcttgtgtgtaaacgtcgtgttggaggtcaagtacagcctgacttacacagatgccggggaagtgactaaggcggacctgagtttcgttctgggaaccgtgagctcggtggtggtgcctcttcagcagaaatttgaaatccattttctgcagactgattggtcctctccagtgagcgctcgctctaccgaaggagaagaacccgctgtgggacctgggctgccaaggctcagagggccgttctggaaattccctggacctgggcacgccggtcttggcgctcacccactgcatcatccagttattcagcaagagggctttctgccagccccccgcggctttggctacaggtccgaggtcgattag

SEQ ID NO: 334819 - DNA, 783 bp, Artificial Sequence
  derived and/or modified sequence
atgaagaccagtgatggcttcaccctgaatgctgagagctatgtgtccttcaccaccaagctggacatccccacagctgccaagtatgaatatggagtgcccctgcagaccagtgacagcttcctgcgcttccccagcagcctgaccagcagcctgtgcacagacaacaacccagctgccttcctggtgaaccaggccgtgaagtgcaccaggaagatcaacctggagcagtgtgaggagattgaggccctgtccatggccttctacagcagccctgagatcctgcgggtgcctgacagcaggaagaaggtgcccatcaccgtgcagagcatcgtcatccagagcctgaacaagaccctgacccggcgggaggacacagatgtgctgcagcccaccctggtgaatgccggccacttcagcctgtgtgtgaatgtggtgctggaggtgaagtacagcctgacctacacagatgctggggaggtgaccaaggctgacctgagctttgtgctgggcaccgtgtcctctgtggtggtgcccctgcagcagaagtttgagatccacttcctgcagacagactggagcagccctgtgtctgcccggagcacagaaggagaggagcctgctgtgggccctggcctgccccggctgcggggccccttctggaagtttcctggccctggccatgctggcctgggcgcccaccccctgcaccaccctgtgatccagcaggagggcttcctgcctgccccccggggcttcggctacagaagtgaggtggactag

SEQ ID NO: 334820 - DNA, 1667 bp, Artificial Sequence
  derived and/or modified sequence
gcaacgcgctgtccatgtcgcgggcctcgctgggactccctgggagatgaggccgcgaggtctcccgccgctcctggtggtgctcctgggctgctgggcctccgtgagcgcccagaccgatgccaccccggcggtgacgacagagggcctcaactccaccgaggcagccctggccaccttcggaactttcccgtcgaccaggccccccgggactcccagggctccagggccctcctccggccccaggcctaccccagtcacggacgttgctgttctctgtgtctgtgacttatccccagcacagtgtgacatcaactgctgctgtgatcccgactgcagctccgtggatttcagtgtcttttctgcctgctcagttccagttgtcacgggcgacagccagttttgtagtcaaaaagcagtcatctattcattgaattttacagcaaacccacctcaaagagtatttgaacttgttgaccagattaatccatctattttctgcattcatattacaaactataaacctgcattatcctttattaatccagaagtacctgatgaaaacaattttgatacattgatgaaaacatctgatggttttacattgaatgctgaatcatatgtttccttcacaaccaaactggatattcctactgctgctaaatatgagtatggggttcctctgcagacttcagattcgtttctgagatttccttcgtccctgacatcatctctgtgcactgataataaccctgcagcgtttctggtgaaccaggctgttaagtgcaccagaaaaataaatttagaacagtgtgaagaaattgaagccctcagcatggctttttacagcagcccggaaattctgagggtacctgattcaagaaaaaaggtccctatcactgttcagtccatcgtcattcagtctctaaataaaacgctcacccgacgggaggacactgatgtgctgcagccgactctcgtcaacgctggacactttagcctttgcgtgaatgttgttcttgaggtaaagtacagcctcacatacacagatgcaggtgaagtcaccaaagctgatctctcattcgttctggggacagttagcagcgtagtggtcccactgcagcaaaagtttgaaattcattttcttcagactgactggagctctcccgtgtcagctcgtagcacagaaggtgaagagcctgctgtggggccagggcttcccagattacgtggccccttttggaaattcccaggcccaggacatgctggactgggtgcccatccacttcatcacccagtcattcaacaggaaggattcctgccagctcccaggggctttggttatagaagtgaagtggactaaatacggatccctgctgaatccacaggccaaaatagtcaatgtaactgcaaatctaatttcatcctcctttcctgaggccaactcaggaaatgaaaggacgattcttatttccactgcggttacttttgtggatgtgtctgcacctgcagaggcaggcttcagagctccaccagccatcaatgccaggctgccctttaacttcttcttcccgtttgtttgacaatgctcagatgcatcagttccttaatatacacgtgaaatttgaaaactgtacattcggtgagattaaattttatatacaact

SEQ ID NO: 334821 - DNA, 783 bp, Artificial Sequence
  derived and/or modified sequence
atgaagaccagcgacggcttcaccctgaacgccgagagctacgtgagctttacaaccaaactggacatcccaaccgcagcgaaatacgagtatggggttccactgcaaacaagtgattcttttttgcggttcccctcctctttgacctcttccctttgcactgacaataacccggccgcattcttggtcaaccaagctgtgaagtgtacacgtaagattaatctggaacagtgcgaagagatcgaagcactgtccatggccttctacagctctcccgagatcctgcgtgttcccgactcccgaaaaaaggtgccaattaccgttcagagcattgttatccagtcactaaataagaccctcactaggcgcgaggatacggacgtgcttcaacccaccctggtcaatgctgggcatttttcgctatgcgtgaatgtggtccttgaagtaaagtattctctcacatacaccgatgctggagaagtcaccaaagctgatctatcatttgtgctcgggacagtgagcagtgtggtggtgcctcttcagcagaagttcgaaattcactttctccaaacggactggtcctctccggtgagcgccagatccacggaaggagaggagcccgccgtcggacccggcctccccaggctgcgcgggcccttctggaagtttcccgggcctggccatgccggacttggagcccaccctctgcatcaccccgtcatccagcaagaaggttttctaccagccccacgaggcttcggctaccgttcagaggtggattag

SEQ ID NO: 334822 - RNA, 783 nt, Artificial Sequence
  derived and/or modified sequence
augaagacaagugauggguucacacuaaacgccgaaucuuaugucuccuucaccaccaagcuggauauacccacugccgcaaaguacgaauauggugugccccugcaaacaagcgacuccuuccugcgguucccuaguucccucacaagcagucugugcacugacaacaacccggcugccuuccuugugaaccaggcugugaagugcacucgaaaaauaaaccuggagcagugcgaagagaucgaggcccucuccauggccuuuuacucaucgccugagauacugagagugccugauucaagaaagaaaguaccuauaaccguccagucuaucgucauccaaucuuugaacaagacucuuacacgacgcgaggacacagacguacuccagccgacuuuagucaaugccgggcacuucucccuaugcguaaaugucguccuggaggucaaguacuccuugacauauacugacgccggcgaagucaccaaagccgaccuguccuucguucuugggacaguuucguccgugguugugccgcugcaacagaaauuugagauccauuuucuccagacagacuggucauccccuguuucagcucgcuccacugaaggagaggagccagccgugggaccuggccucccccguuuacgcggaccuuuuuggaaguuuccuggaccuggucacgcuggccugggugcccacccauugcaucauccagucauccagcaggagggcuucuugcccgccccucgcgguuucggauauagaagugaaguugauuag

SEQ ID NO: 334823 - RNA, 783 nt, Artificial Sequence
  derived and/or modified sequence
augaagacuucugacgguuucaccuugaacgcugaguccuauguauccuucacaaccaagcuagacaucccaacagccgcgaaguacgaauacggcgugccuuugcagacgucugacagcuuucuuagauuucccuccucccugacuuccucucucugcaccgauaauaacccugccgcuuuucuggugaaccaagccguuaaaugcacucgcaaaaucaaccuggagcagugcgaagagaucgaggcccuuaguauggccuucuauagcucacccgagauacugcggguuccugauagccgcaagaaaguaccaauaaccgugcaaaguaucgugauucagagccucaauaagacccugacccgaagagaagauacagacgugcuccaacccacauuaguaaaugcugggcauuucucacugugcgugaaugucgugcuggaaguuaaauacucacuuaccuauacagaugccggagaagugacuaaagccgaccucaguuucguacuggggacugucucuuccguuguggucccccugcagcaaaaguucgagauucauuuucuccaaaccgacuggucaaguccgguuagugcucggaguacggaaggcgaggaaccagcaguaggaccagguuugccuagacugagggguccauucuggaaguucccgggcccugggcacgccggacuuggugcccacccacuccaccacccaguuauucaacaggagggauuucuuccagcaccuagaggauucggguaucgaagcgaagucgacuag

SEQ ID NO: 334824 - protein, 83 aa, Artificial Sequence
  derived and/or modified sequence
MRPRGLPPLLVVLLGCWASVSAQTDATPAVTTEGLNSTEAALATFGTFPSTRPPGTPRAPGPSSGPRPTPVTDGSHSVTQAGV

SEQ ID NO: 334825 - DNA, 1107 bp, Artificial Sequence
  derived and/or modified sequence
atgctgcactggtccatgtcatcaatttatggactgcagccaggggaggtgtggtgggcagcgtcagacttaggttgggtggtggggcattcatacatctgctacggcccactgcttcacgggaataccacagtgctttacgagggtaaaccagtcggaacccccgacgcgggggcatattttcgagtgctggcggaacatggagtggcggccctttttactgcacctaccgccattcgtgctatccggcagcaggacccgggagccgctctggggaagcagtacagcttaacaagattcaaaacactctttgtggctggtgaacgctgtgacgtcgaaaccctcgaatggagtaagaacgtatttcgggtgcctgtgctggatcactggtggcagacagagactggatcgcctatcaccgcgagctgtgttgggttagggaatagcaaaacccccccaccaggccaagccggaaagagtgtgcctggctacaacgtcatgattctggatgataatatgcagaagcttaaagcaagatgtttaggaaatatcgtagtgaagctgcctctgccccctggcgctttcagcgggttgtggaagaatcaggaggccttcaaacacctgtatttcgagaagttccccggctactacgacactatggatgctggctatatggatgaagaaggttacttgtatgttatgagtagggtggacgatgttattaacgtagcgggccataggatctctgccggtgccatagaagaatccatactgtcgcatgggacagtggctgactgcgccgtggttgggaaggaggaccccctgaaaggtcatgtcccattggcactgtgcgtgctgcgaaaggacattaacgctactgaagagcaggtgctggaggaaatcgtgaagcatgtccgccaaaatataggccctgtggccgcctttagaaacgccgtcttcgtgaagcaattacctaagacccgttcgggaaaaatacctcgaagcgctttgtccgcaattgtaaatggtaaaccctacaagattacatctactatcgaagatcctagtattttcgggcatgttgaagaaatgcttaagcaggcatag

SEQ ID NO: 334826 - DNA, 1107 bp, Artificial Sequence
  derived and/or modified sequence
atgctgcactggagcatgagcagcatctacggcctgcagcccggggaggtgtggtgggccgccagtgacctgggctgggtggtgggccacagctacatctgctacggccccctgctgcacggcaacaccaccgtgctgtatgagggcaagcctgtgggcaccccagatgctggggcctacttccgggtgctggccgagcacggcgtggccgccctcttcaccgcccccacagccatccgggccatccggcagcaggaccctggagctgccctgggcaagcagtacagcctgacccgcttcaagaccctgtttgtggccggggagcgctgtgatgtggagaccctggagtggagcaagaatgtgttccgggtgcctgtgctggaccactggtggcagacagaaacaggcagccccatcacagccagctgtgtgggcctgggcaacagcaagaccccacctcctggccaggccggcaagtctgtgcccggctacaacgtgatgatcctggatgacaacatgcagaagctgaaggcccgctgcctgggcaacatcgtggtgaagctgcccctgcccccaggggccttcagcggcctgtggaagaaccaggaggccttcaagcacctgtactttgagaagtttcctggctactatgacaccatggatgctggctacatggatgaggagggctacctgtatgtgatgagccgggtggatgatgtgatcaacgtggccggccaccgcatctctgctggggccatcgaggagagcatcctgagccacggcaccgtggccgactgtgctgtggtgggcaaggaggaccccctgaagggccacgtgcccctggccctgtgtgtgctgaggaaggacatcaatgccacagaggagcaggtgctggaggagatcgtgaagcacgtgcggcagaacatcggccctgtggccgccttcagaaatgctgtgtttgtgaagcagctgcccaagaccaggtctgggaagatccccaggtctgccctgagcgccatcgtgaatggcaagccctacaagatcaccagcaccatcgaggaccccagcatcttcggccacgtggaggagatgctgaagcaggcctag

SEQ ID NO: 334827 - DNA, 1107 bp, Artificial Sequence
  derived and/or modified sequence
atgctgcactggagcatgagcagcatctacggcctgcagcccggcgaggtctggtgggccgcaagtgatctgggatgggtagtgggacacagttacatctgttacggcccgctgttacacggaaacaccacagtgctctacgagggcaagcccgtagggaccccggacgccggagcctatttccgagtgctggccgaacatggcgttgccgcgttgtttacagctcccactgcgatcagagccatccgacagcaagaccccggagccgccttaggcaagcagtactccctgacaaggttcaagaccctgtttgtcgctggcgagcgctgcgatgttgagacacttgagtggtctaaaaacgtttttcgagtgccagttctggaccattggtggcagacagaaactgggtcaccgattaccgctagctgcgtaggtctgggaaatagtaagacccccccccctggccaagccgggaagtccgtgccaggatataacgtgatgatactggacgataacatgcagaagcttaaggcccgatgcttaggaaacattgtggtgaagctgcccctcccacctggagcattcagcggactctggaagaatcaagaggccttcaaacacctttactttgagaagtttcccggatattatgacactatggacgccggatatatggacgaggagggctacttgtacgtgatgtcaagggtcgacgacgtcattaacgtggcaggccatagaataagtgctggggctattgaagagtccatcctatcccacgggactgtggcagactgcgctgtggtagggaaggaagatccactgaaggggcacgtcccccttgccctttgtgtattgagaaaagacattaatgccaccgaggagcaggtcctggaagaaatagttaagcacgtgagacagaacataggaccagtggcggcttttcgcaacgctgtgttcgtaaaacagctgccgaaaacccgctctggaaaaattccccggagcgctctgagcgccatcgtcaacggcaagccttacaaaatcacttcaaccattgaagatccatcaatctttggccacgtggaggaaatgctaaagcaggcatag

SEQ ID NO: 334828 - DNA, 1107 bp, Artificial Sequence
  derived and/or modified sequence
atgcttcattggtcgatgtcgtccatttacggcctccaacctggcgaagtctggtgggccgcatcggatctcggatgggtggttggccacagttacatctgctacggtcctctgctccacggaaacacaaccgtcctgtatgaaggaaagcctgtcggaacgcctgacgccggagcctactttagagttttggctgaacacggggtagcagcgctgtttacggctcccaccgccatccgcgcaatcaggcagcaggatcccggagctgcgttaggcaaacagtacagcctgacacgctttaaaacacttttcgttgcgggagaaaggtgtgatgtggagaccctggagtggtccaagaatgtttttcgggtccccgtgcttgatcactggtggcagacagagaccggaagcccaatcactgccagctgcgtgggactgggaaactcgaaaacgcccccacccggacaagccggaaaatccgttcccggatataacgttatgatactggacgacaatatgcagaagttgaaagcacggtgcctcggaaatattgttgtgaaactgccattgcctcctggggcatttagcggcctatggaagaaccaggaggcgttcaaacacttgtatttcgagaagttccccggatactatgatactatggacgctggatatatggacgaggagggttatctctacgtgatgagtagggttgacgatgtgatcaacgtggcgggtcatcgcattagcgccggagcaattgaggagtcaattctgtcacatggtaccgtggctgattgcgccgttgtgggaaaagaagaccccctgaaagggcatgtgcccctcgcactctgtgttctgaggaaggatatcaacgcgaccgaagagcaagttctagaggaaatcgtgaagcacgtacggcagaacattgggcctgtggcagcatttcggaacgccgtgtttgtgaagcaacttccgaagacacgctccggcaagattccaagaagcgctttgtctgcaatcgtgaacggaaaaccctacaagattaccagtaccatcgaggatccatccatttttggccacgtggaagaaatgctgaagcaagcttag

SEQ ID NO: 334829 - DNA, 1107 bp, Artificial Sequence
  derived and/or modified sequence
atgctgcactggagcatgagcagcatctacggcctgcagcccggcgaggtgtggtgggccgccagcgacctgggctgggtggtgggccacagctacatctgctacggccccctgctgcacggcaacaccaccgtgctgtacgagggcaagcccgtgggcacccccgacgccggcgcctacttcagagtgctggccgagcacggcgtggccgccctgttcaccgcccccaccgccatcagagccatcagacagcaggaccccggcgccgccctgggcaagcagtacagcctgaccagattcaagaccctgttcgtggccggcgagagatgcgacgtggagaccctggagtggagcaagaacgtgttcagagtgcccgtgctggaccactggtggcagaccgagaccggcagccccatcaccgccagctgcgtgggcctgggcaacagcaagacccccccccccggccaggccggcaagagcgtgcccggctacaacgtgatgatcctggacgacaacatgcagaagctgaaggccagatgcctgggcaacatcgtggtgaagctgcccctgccccccggcgccttcagcggcctgtggaagaaccaggaggccttcaagcacctgtacttcgagaagttccccggctactacgacaccatggacgccggctacatggacgaggagggctacctgtacgtgatgagcagagtggacgacgtgatcaacgtggccggccacagaatcagcgccggcgccatcgaggagagcatcctgagccacggcaccgtggccgactgcgccgtggtgggcaaggaggaccccctgaagggccacgtgcccctggccctgtgcgtgctgagaaaggacatcaacgccaccgaggagcaggtgctggaggagatcgtgaagcacgtgagacagaacatcggccccgtggccgccttcagaaacgccgtgttcgtgaagcagctgcccaagaccagaagcggcaagatccccagaagcgccctgagcgccatcgtgaacggcaagccctacaagatcaccagcaccatcgaggaccccagcatcttcggccacgtggaggagatgctgaagcaggcctag

SEQ ID NO: 334830 - DNA, 149 bp, Artificial Sequence
  derived and/or modified sequence
gtcaacacaggaccaacataggaccaacacagggtcaacacaggaccaacataggaccaacacagggtcaacacaagaccaacatgggaccaacacagggtcaacataggaccaacatgggaccaacacagggtcaacacaggaccaac

SEQ ID NO: 334831 - DNA, 86 bp, Artificial Sequence
  derived and/or modified sequence
aacaaaaaatgagtcaagccttaaataaaatcagagccaaaaaagaagacattacatctgataagacaaaaattcaaaggaccatc

SEQ ID NO: 334832 - protein, 1539 aa, Artificial Sequence
  derived and/or modified sequence
MAIFKIAALQKVVDNSVSLSELELANKQYNELTAKYRDILQKDNMLVQRTSNLEHLECENISLKEQVESINKELEITKEKLHTIEQAWEQETKLGNESSMDKAKKSITNSDIVSISKKITMLEMKELNERQRAEHCQKMYEHLRTSLKQMEERNFELETKFAELTKINLDAQKVEQMLRDELADSVSKAVSDADRQRILELEKNEMELKVEVSKLREISDIARRQVEILNAQQQSRDKEVESLRMQLLDYQAQSDEKSLIAKLHQHNVSLQLSEATALGKLESITSKLQKMEAYNLRLEQKLDEKEQALYYARLEGRNRAKHLRQTIQSLRRQFSGALPLAQQEKFSKTMIQLQNDKLKIMQEMKNSQQEHRNMENKTLEMELKLKGLEELISTLKDTKGAQKVINWHMKIEELRLQELKLNRELVKDKEEIKYLNNIISEYERTISSLEEEIVQQNKFHEERQMAWDQREVDLERQLDIFDRQQNEILNAAQKFEEATGSIPDPSLPLPNQLEIALRKIKENIRIILETRATCKSLEEKLKEKESALRLAEQNILSRDKVINELRLRLPATAEREKLIAELGRKEMEPKSHHTLKIAHQTIANMQARLNQKEEVLKKYQRLLEKAREEQREIVKKHEEDLHILHHRLELQADSSLNKFKQTAWDLMKQSPTPVPTNKHFIRLAEMEQTVAEQDDSLSSLLVKLKKVSQDLERQREITELKVKEFENIKLQLQENHEDEVKKVKAEVEDLKYLLDQSQKESQCLKSELQAQKEANSRAPTTTMRNLVERLKSQLALKEKQQKALSRALLELRAEMTAAAEERIISATSQKEAHLNVQQIVDRHTRELKTQVEDLNENLLKLKEALKTSKNRENSLTDNLNDLNNELQKKQKAYNKILREKEEIDQENDELKRQIKRLTSGLQGKPLTDNKQSLIEELQRKVKKLENQLEGKVEEVDLKPMKEKNAKEELIRWEEGKKWQAKIEGIRNKLKEKEGEVFTLTKQLNTLKDLFAKADKEKLTLQRKLKTTGMTVDQVLGIRALESEKELEELKKRNLDLENDILYMRAHQALPRDSVVEDLHLQNRYLQEKLHALEKQFSKDTYSKPSISGIESDDHCQREQELQKENLKLSSENIELKFQLEQANKDLPRLKNQVRDLKEMCEFLKKEKAEVQRKLGHVRGSGRSGKTIPELEKTIGLMKKVVEKVQRENEQLKKASGILTSEKMANIEQENEKLKAELEKLKAHLGHQLSMHYESKTKGTEKIIAENERLRKELKKETDAAEKLRIAKNNLEILNEKMTVQLEETGKRLQFAESRGPQLEGADSKSWKSIVVTRMYETKLKELETDIAKKNQSITDLKQLVKEATEREQKVNKYNEDLEQQIKILKHVPEGAETEQGLKRELQVLRLANHQLDKEKAELIHQIEANKDQSGAESTIPDADQLKEKIKDLETQLKMSDLEKQHLKEEIKKLKKELENFDPSFFEEIEDLKYNYKEEVKKNILLEEKVKKLSEQLGVELTSPVAASEEFEDEEESPVNFPIY

SEQ ID NO: 334833 - DNA, 4620 bp, Artificial Sequence
  derived and/or modified sequence
atggccatttttaaaattgctgcactccaaaaggtggtcgacaatagcgtgtcactgagtgagctggagttggcgaataagcagtacaacgaattaactgcaaaatatcgagacattctgcagaaggataatatgcttgtccagagaacatctaatcttgaacacttggagtgcgaaaacatttccctcaaggagcaggttgagtccatcaataaagagttggagataactaaggagaagctgcatactatcgaacaggcatgggagcaggaaaccaagcttggaaatgagagcagcatggacaaagccaaaaagagtatcacaaattcagatattgtctccatttcaaagaaaattactatgctggaaatgaaggaactgaacgaacgtcagagagcggagcactgtcagaagatgtatgagcatctccgtacctcgctcaagcagatggaagagcggaattttgagcttgagactaagttcgccgaattgaccaagatcaatctggatgcacaaaaagtcgaacaaatgttgagggatgagctagcggattccgtctccaaagccgtcagtgatgctgaccgtcaaaggattctggagctggaaaagaacgagatggaactgaaagttgaggttagcaaactgcgggagatcagtgatatcgctcggcggcaggtggagatactgaacgcccagcagcagagcagagacaaggaggtcgaaagcctgcgaatgcagctgctggactatcaggctcaaagtgatgagaagagtctgatagcgaaattacaccagcacaatgtctccctgcaactttccgaagcaacggctttgggaaagttagagtccattacctccaaactgcagaagatggaggcttataacctccgcctcgagcagaagcttgatgagaaagaacaagcactctactacgcccggttggaggggcggaatcgggccaaacaccttagacagaccatccagtctctgcggaggcagttctccggcgcgctgcctcttgctcagcaggagaagttcagcaagacaatgattcaactgcagaacgacaaactgaagatcatgcaagaaatgaaaaatagtcagcaggagcatagaaacatggagaacaagacgctggaaatggaactgaagctcaaaggactggaggaactaatctctactctgaaggatactaaaggtgcacagaaagtcatcaattggcacatgaagattgaagagctcaggctgcaagagttaaagctgaatcgggaattagtgaaggataaagaggaaataaaatacttgaataatataattagcgaatatgagcgtactatttcctcactggaggaggagatagttcagcagaataagttccatgaagagcgccagatggcatgggatcaaagagaggtagacttagaaaggcagttagacattttcgacaggcagcagaatgagatcttaaatgctgcccagaaatttgaggaagccaccgggagcatccctgacccttctttacccctacccaaccagctcgaaatcgcactgcgaaagatcaaagagaacattcgaatcatccttgaaactagggctacttgtaaaagccttgaggaaaagctgaaggaaaaagaatcagcacttcggctggccgagcagaacatcctgagtcgggataaggtaattaacgagctcagactgcgcttacctgcaaccgctgagcgtgaaaagctcatcgctgaactggggcgtaaggagatggagccgaaatctcaccacaccctgaaaatcgcccaccagaccatagccaatatgcaggcccgtctcaaccagaaggaagaagtcctcaagaaataccaacggctgcttgagaaggcgagggaggagcaaagggagattgtgaagaagcatgaggaggaccttcatattctgcaccacagactggagcttcaggcagactcaagcctgaacaaattcaagcagaccgcatgggacctgatgaagcaaagccctacaccagtccctaccaataagcattttatccgcttagccgagatggagcaaaccgtggccgaacaggatgattctttgtcaagcttgttagtgaaacttaagaaagtctctcaggatctggagcgccagagagaaataaccgagctgaaagtgaaggaatttgagaacattaagctgcagctgcaggagaaccatgaagatgaagttaaaaaggtgaaagccgaagtggaagaccttaaataccttctggatcagagccaaaaggaatctcagtgcttgaagtcagaacttcaggcccaaaaggaagctaattctagagcacctactaccactatgcgcaacttggtagaacggctgaagtcccagctggccttaaaagaaaaacagcaaaaggctctgtccagggcccttctggaactcagggccgaaatgactgctgccgccgaggaaagaatcatatcggccaccagccagaaggaagcccatctcaatgttcaacaaatcgtggatcgacatacccgggaactcaagactcaggtggaggatttaaatgaaaacctgctcaagttaaaggaggcactgaaaaccagcaaaaatagggagaacagcctgacagacaacctgaacgacttgaataacgaactgcagaagaagcagaaggcatataataaaatactgcgggaaaaggaagagattgaccaggaaaatgatgaactaaagcggcagattaagaggttaacctccggactgcaagggaaacccctgacagataataaacagtctttaatcgaagaactccagcgaaaagtcaagaagctcgagaaccagcttgagggcaaggtggaggaggtggatctgaagcctatgaaagaaaagaacgccaaagaggaacttatacgttgggaagaaggtaagaaatggcaggctaagatcgaggggatccgaaacaaactgaaggagaaggagggcgaggtctttaccctcactaaacagctcaatactcttaaggaccttttcgccaaggcagataaggagaaacttaccttacagcggaagcttaagactacagggatgactgtagatcaggttttgggtattagggccctggaaagcgaaaaggaactggaagaacttaagaaaaggaatctggacctagagaatgacattctctatatgcgggctcatcaagcactgcccagggactccgtggtggaggacttgcatctgcagaataggtatctccaagagaagctgcacgctctcgagaagcaattctccaaggacacgtattctaaaccgagtatctccgggatagagagcgacgaccattgccaaagggagcaggagttacagaaggagaatctgaaactgtcatccgaaaacatcgagctgaagtttcagttggagcaggccaataaagacctaccacggctcaaaaatcaggttcgggacctgaaagaaatgtgcgagttcctaaaaaaggagaaagccgaagtgcagcggaagctcgggcacgtcagaggaagtggccgctccgggaaaacaattcctgaattggaaaaaaccatcggactgatgaaaaaagtggtggaaaaggtgcagcgcgaaaacgaacaactgaagaaggccagcgggatccttaccagcgaaaagatggccaatatagagcaggaaaacgaaaaactgaaagccgaactggagaagttaaaagcccatttgggccatcagttgagcatgcattacgagtcaaaaactaaggggaccgaaaaaatcatagccgaaaacgagcgcctgcgcaaggaattgaaaaaggagacagacgccgcagagaaactgagaatcgctaaaaacaacctggaaatcttaaacgagaagatgaccgtccagctcgaggagactggcaaacgtctgcaatttgccgagtcccgggggcctcagctggaaggcgctgattctaaaagttggaagtccatcgtggttacacggatgtatgaaacaaagttgaaggagcttgagactgatattgcaaaaaagaatcaaagtatcaccgatctgaaacaactagtgaaggaggcgaccgagcgagagcagaaggttaataaatataacgaggatctagaacagcagatcaagatcctcaagcatgtgcccgagggcgctgagacagagcagggactcaagagagagctccaggtactcagattggccaaccaccaactggataaagaaaaagctgaattaattcaccagattgaggcaaataaggaccagagcggggcagaatctacaatccctgacgctgaccagctcaaagaaaaaattaaggacttagagacccaactgaaaatgagcgatctcgaaaagcagcatttgaaagaagagatcaaaaagctgaaaaaggaactggagaatttcgatccaagttttttcgaggagattgaggaccttaagtataattacaaagaagaagtcaagaaaaatattctactggaggaaaaggtcaaaaaactttctgaacagctgggtgtcgagttaacttccccggttgcagcctctgaggagtttgaggatgaagaagaatccccagtgaatttccctatttattag

SEQ ID NO: 334834 - DNA, 4620 bp, Artificial Sequence
  derived and/or modified sequence
atggctatcttcaagatcgctgccctgcagaaagtcgttgataatagcgtctcgctttctgagctggagctggcaaacaagcagtacaacgagcttaccgccaagtatagagacatcctgcaaaaagacaacatgctggtgcaaagaactagcaatcttgagcacttagaatgcgagaacatttctttgaaagagcaggtcgaatcaatcaataaagaactggagatcacaaaagagaagctgcatacaattgagcaggcctgggaacaggagaccaaactcggaaacgaaagctctatggacaaggctaagaaaagcatcactaattcggacattgtgtcaatcagcaaaaagattaccatgctagaaatgaaggagctaaatgaaagacagcgggctgaacactgtcagaaaatgtatgaacacctgaggaccagccttaagcaaatggaagaacggaactttgagctcgagacaaaattcgccgaactgactaagataaacctggatgctcagaaagtcgaacaaatgctgagagacgaactagccgactcggtttcaaaggccgtgtccgacgccgacaggcagcgtatccttgagttagaaaaaaatgagatggaactcaaagtggaggtatctaagctgagggaaatcagtgatattgcaaggcgccaagtagaaatcctgaatgcccagcagcagtctagagataaagaagtagagagtctcagaatgcaactgctggactaccaggctcagagcgatgagaagtctctgattgccaagctgcaccaacataacgtttcgctgcagctgtctgaggcaactgcactgggcaaactggaatctatcacaagcaaattgcagaagatggaggcatataacctaaggctagagcaaaaactggatgaaaaggagcaggctctatattacgcccggctggaagggagaaacagggctaagcatctgcgccaaactatccagtcccttcgccgtcaatttagcggggctctgccattggcacagcaggagaagttttcaaaaaccatgatccaattacaaaatgataaactgaagatcatgcaggagatgaaaaacagccaacaggagcatcggaacatggagaacaagactctggagatggagctgaaactgaaggggctggaggaactgatatcaactttgaaagacactaaaggtgcccagaaggttattaactggcacatgaagatagaagagttgcgactgcaggagctgaagcttaatcgcgaactggtgaaagacaaagaggagattaagtacctgaataacataatctctgaatacgagcggaccatctcctccctggaggaggagattgtccagcagaacaagtttcacgaggagcggcagatggcctgggaccagcgcgaggttgacctcgagcggcaacttgacatttttgaccgtcaacaaaacgagatcctgaacgctgcacagaaatttgaagaagcaaccggaagcatcccggatcccagcctccccctgcctaatcagctcgagattgccctgaggaagatcaaagaaaacatccgcatcatactcgagaccagagctacttgcaagagcctagaagagaaactcaaggaaaaagagagtgctttgcgcttggccgagcagaacatcttatctcgtgataaggttatcaatgaactgcgcctgaggcttcccgctaccgctgaacgcgagaagctgattgctgaattagggcggaaggagatggaaccgaagagtcatcatacgcttaagatcgcgcaccagacaatcgccaatatgcaggcccgcctgaatcaaaaggaggaagtgctcaagaaataccaacgtctgctggaaaaagcaagagaagagcagagagaaatagtaaaaaagcacgaggaggacctccatatcctccatcatagacttgagctgcaggccgatagttccctcaacaagtttaaacagacagcatgggaccttatgaaacagtctccgactcccgtgccaactaacaagcactttattcgactggcagagatggaacagacagtggccgaacaggacgattctctgtcttccctgctcgtgaaattgaagaaggttagtcaggatttggagcgccagcgagaaatcacagaactgaaagttaaggagtttgaaaatatcaaactccagctgcaggagaaccacgaggacgaagtcaagaaggttaaggccgaggtcgaggacctcaagtatctccttgaccaaagtcagaaggaatcccaatgccttaagtccgagctgcaggcacagaaagaggccaacagcagagctcccactacaacaatgcgaaatttagtcgaacggctcaagagtcaattggccttgaaagaaaaacagcagaaggctttgtcacgcgcacttctggagctgcgcgctgagatgactgcagctgccgaggagcggattattagcgctaccagccagaaagaagctcacttgaacgtccagcagatcgtcgataggcacaccagggagctgaagactcaggtggaagacctgaacgagaacctcctgaagctcaaggaggctctgaagacgtctaagaatagagagaatagcctgacggacaatcttaacgacctgaacaacgaactccagaagaaacagaaagcgtataataagatcctgagagaaaaagaggaaatcgatcaggagaacgacgagctgaaacggcagatcaaacggctcacctcgggccttcagggcaaaccgcttactgataacaagcagtctctgatagaagagctgcaaagaaaggtaaaaaagttggaaaatcagctcgagggtaaggtggaggaggttgatctgaagcccatgaaggaaaaaaatgccaaggaagagctgattcgctgggaggagggcaagaagtggcaggctaagattgagggcatcagaaataaactcaaggagaaagaaggggaagtcttcacactgacgaagcagctgaacactttgaaagacctgttcgccaaggcagacaaagaaaagctgactctccagagaaaattgaagacaactggcatgacagttgaccaggttcttggcattcgggctctggagtcagaaaaggagttggaggagctgaagaagcgtaacctggacttggagaacgacattctgtacatgcgggctcaccaagctctccccagggattcagtagttgaggacttgcacctgcagaaccgctacctgcaggaaaagctgcacgcgctggagaaacagttttcgaaagacacatatagtaaaccctccatctccggaattgagagcgacgaccattgccagcgggaacaggagttgcagaaggaaaatcttaaactgagctctgaaaacattgagctcaagttccagctcgaacaggccaacaaggacctgcctcgcttaaagaatcaggtgagagatctcaaagaaatgtgtgaatttctgaagaaagaaaaagctgaggtccagcgtaagctggggcacgtgagaggatccggccgctcgggaaagactatccctgaacttgagaagactatcgggttaatgaagaaagtggtggagaaggttcagagggaaaacgagcaacttaaaaaagcatccgggatcctgactagcgagaaaatggcaaacatcgaacaagagaatgagaaactgaaggcggagctcgaaaaactcaaggcccatctggggcaccagctgagcatgcattacgagtctaagaccaaaggcacagaaaagatcatagccgaaaacgaacgcctgcggaaagagctcaaaaaagaaacggacgcagctgaaaaactaagaattgccaaaaacaatctagagatattgaatgaaaagatgaccgtgcaactggaggagaccggcaaacgtcttcaattcgcagagtcacgaggcccccagctagagggagcagattccaaatcttggaaaagtatagtggttacccgcatgtacgaaacgaaactgaaggaattagaaactgacattgccaaaaaaaatcagtccatcactgatctgaaacagctggtcaaagaggcaacggaacgggaacagaaagtcaacaagtataacgaagacttagaacagcagatcaagatcctgaaacatgttcctgaaggcgctgaaaccgaacaagggcttaaacgtgaacttcaggttctgcggctggctaaccatcaactcgacaaggagaaagctgagctcatccatcagattgaagccaacaaagatcaaagcggagctgaatctacaattcctgatgccgatcagttaaaggaaaagatcaaggatttagaaacccagctgaagatgtcagatctagagaagcagcacctgaaagaagaaatcaagaagctgaagaaagaactagaaaacttcgatccctctttttttgaagagattgaagacttgaagtataattacaaagaggaagtcaagaagaatatcctcctggaggaaaaggtgaagaagctgtctgaacaattgggcgtggagttgacatcaccagtggctgccagtgaagagttcgaggatgaggaagaaagcccagtgaattttcccatctactag

SEQ ID NO: 334835 - DNA, 4620 bp, Artificial Sequence
  derived and/or modified sequence
atggccatcttcaagattgctgccctgcagaaggtggtggacaacagcgtgtccctgtctgagctggagctggccaacaagcagtacaatgagctgacagccaagtacagagacatcctgcagaaggacaacatgctggtgcagaggaccagcaacctggagcacctggagtgtgagaacatcagcctgaaggagcaggtggagagcatcaacaaggagctggagatcaccaaggagaagctgcacaccatcgagcaggcctgggagcaggagaccaagctgggcaatgaaagctccatggacaaggccaagaagagcatcaccaacagcgacatcgtgtccatcagcaagaagatcaccatgctggagatgaaggagctgaatgaaaggcagagagctgagcactgccagaagatgtatgagcacctgcggaccagcctgaagcagatggaggagaggaactttgagctggagaccaagtttgctgagctgaccaagatcaacctggatgcccagaaggtggagcagatgctgagagatgagctggccgacagcgtgtccaaggctgtgtctgatgctgaccggcagaggatcctggagctggagaagaatgagatggagctgaaggtggaggtgtccaagctgcgggagatcagtgacatcgcccggcggcaggtggagatcctgaatgcccagcagcagagccgggacaaggaggtggagagcctgaggatgcagctgctggactaccaggcccagagtgatgagaagagcctcatcgccaagctgcaccagcacaacgtgtccctgcagctgtctgaggccacagccctgggcaagctggagagcatcaccagcaagctgcagaagatggaggcctacaacctgcggctggagcagaagctggatgagaaggagcaggccctgtactatgcccggctggagggcaggaacagagccaagcacctgcggcagaccatccagagcctgcggcggcagttcagcggggccctgcccctggcccagcaggagaagttcagcaagaccatgatccagctgcagaatgacaagctgaagatcatgcaggagatgaagaacagccagcaggagcacaggaacatggagaacaagaccctggagatggagctgaagctgaagggcctggaggagctgatcagcaccctgaaggacaccaagggggcccagaaggtgatcaactggcacatgaagattgaggagctgcggctgcaggagctgaagctgaaccgggagctggtgaaggacaaggaggagatcaagtacctgaacaacatcatcagtgaatatgaaagaaccatcagcagcctggaggaggagatcgtgcagcagaacaagttccacgaggagcggcagatggcctgggaccagcgggaggtggacctggagcggcagctggacatctttgaccggcagcagaatgagatcctgaatgctgcccagaagtttgaggaggccaccggcagcatcccagaccccagcctgcccctgcccaaccagctggagatcgccctgaggaagatcaaggagaacatccgcatcatcctggagacccgggccacctgcaagagcctggaggagaagctgaaggagaaggagagcgccctgcggctggccgagcagaacatcctgagccgggacaaggtgatcaatgagctgcggctgcggctgcctgccacagctgagcgggagaagctgattgctgagctgggcaggaaggagatggagcccaagagccaccacaccctgaagatcgcccaccagaccatcgccaacatgcaggcccggctgaaccagaaggaggaggtgctgaagaagtaccagaggctgctggagaaggcccgggaggagcagcgggagatcgtgaagaagcatgaggaggacctgcacatcctgcaccaccggctggagctgcaggccgacagcagcctgaacaagttcaagcagacagcctgggacctgatgaagcagagccccacccctgtgcccaccaacaagcacttcatccggctggccgagatggagcagacagtggccgagcaggatgacagcctgagcagcctgctggtgaagctgaagaaggtgtcccaggacctggagcggcagcgggagatcacagagctgaaggtgaaggagtttgagaacatcaagctgcagctgcaggagaaccatgaagatgaggtgaagaaggtgaaggccgaggtggaggacctgaagtacctgctggaccagagccagaaggagagccagtgcctgaagtctgagctgcaggcccagaaggaggccaacagccgggcccccaccaccaccatgaggaacctggtggagcggctgaagagccagctggccctgaaggagaagcagcagaaggccctgagccgggccctgctggagctgcgggcagagatgacagctgctgctgaggagcgcatcatcagcgccaccagccagaaggaggcccacctgaatgtgcagcagatcgtggacagacacacccgggagctgaagacccaggtggaggacctgaatgaaaacctgctgaagctgaaggaggccctgaagaccagcaagaaccgggagaacagcctgacagacaacctgaatgacctgaacaatgagctgcagaagaagcagaaggcctacaacaagatcctgcgggagaaggaggagattgaccaggagaatgatgagctgaagaggcagatcaagaggctgaccagcggcctgcagggcaagcccctgacagacaacaagcagagcctcatcgaggagctgcagaggaaggtgaagaagctggagaaccagctggagggcaaggtggaggaggtggacctgaagcccatgaaggagaagaatgccaaggaggagctgatccgctgggaggagggcaagaagtggcaggccaagattgagggcatccggaacaagctgaaggagaaggagggggaggtgttcaccctgaccaagcagctgaacaccctgaaggacctgtttgccaaggctgacaaggagaagctgaccctgcagaggaagctgaagaccaccggcatgacagtggaccaggtgctgggcatccgggccctggagagcgagaaggagctggaggagctgaagaagaggaacctggacctggagaatgacatcctgtacatgagggcccaccaggccctgccccgggacagcgtggtggaggacctgcacctgcagaaccgctacctgcaggagaagctgcacgccctggagaagcagttcagcaaggacacctacagcaagcccagcatctctggaattgaaagtgatgaccactgccagcgggagcaggagctgcagaaggagaacctgaagctgagcagtgaaaatattgagctgaagttccagctggagcaggccaacaaggacctgccccggctgaagaaccaggtgcgggacctgaaggagatgtgtgagttcctgaagaaggagaaggccgaggtgcagaggaagctgggccacgtgcggggcagcggccgcagcggcaagaccatccctgagctggagaagaccatcggcctgatgaagaaggtggtggagaaggtgcagagagaaaatgagcagctgaagaaggccagcggcatcctgaccagcgagaagatggccaacatcgagcaggagaatgagaagctgaaggccgagctggagaagctgaaggcccacctgggccaccagctgtccatgcactatgagagcaagaccaagggcacagagaagatcatcgcagaaaatgaaaggctgaggaaggagctgaagaaggagacagatgctgctgagaagctgagaattgccaagaacaacctggagatcctgaatgagaagatgacagtgcagctggaggagaccgggaagaggctgcagtttgctgagagccggggcccccagctggagggcgctgacagcaagtcctggaagagcatcgtggtgaccaggatgtatgagaccaagctgaaggagctggagacagacatcgccaagaagaaccagagcatcacagacctgaagcagctggtgaaggaggccacagagcgggagcagaaggtgaacaagtacaatgaagacctggagcagcagatcaagatcctgaagcacgtgcctgagggcgctgagacagagcagggcctgaagcgggagctgcaggtgctgcggctggccaaccaccagctggacaaggagaaggccgagctgatccaccagatcgaggccaacaaggaccagagcggggctgagagcaccatcccagatgctgaccagctgaaggagaagatcaaggacctggagacccagctgaagatgtctgacctggagaagcagcacctgaaggaggagatcaagaagctgaagaaggagctggagaactttgaccccagcttctttgaggagattgaggacctgaagtacaactacaaggaggaggtgaagaagaacatcctgctggaggagaaggtgaagaagctgtctgagcagctgggcgtggagctgaccagccctgtggccgccagcgaggagtttgaagatgaggaggagagccctgtgaacttccccatctactag

SEQ ID NO: 334836 - DNA, 4620 bp, Artificial Sequence
  derived and/or modified sequence
atggccatcttcaagatcgccgccctgcagaaggtggtggacaactccgtgtccctctctgaactggagctggccaataagcagtacaatgagctcaccgcgaagtaccgcgacattctgcagaaagacaacatgctggtgcaaaggacaagcaacctcgaacatcttgagtgtgaaaacatttccttaaaagaacaggtagagagcatcaacaaggaactggagatcaccaaggagaagcttcatacaatcgagcaggcctgggagcaggagactaaactgggtaacgagagttcgatggataaagcaaagaagtcaattaccaattcagatattgtgagcataagcaaaaaaattacaatgcttgagatgaaagagctcaatgaaagacagagagcagagcactgccaaaaaatgtatgagcatctgcgcacctctctaaagcagatggaagagcgaaatttcgaactcgaaacaaaattcgcggagttgaccaagatcaacctggacgctcagaaagtggaacagatgttacgcgacgaactggcagactcggtcagcaaagccgtctcagatgctgaccgtcaacgcattctcgaactggaaaagaatgagatggaactgaaagtagaagtgtcgaagcttcgcgagataagcgatatagcccgcagacaagtagagatattgaatgcacagcagcagtcaagggataaggaggtggaaagcctgaggatgcaactgctagactaccaggcacagtcagacgaaaagtccctgatcgccaaactccaccagcacaacgtttctctccagctgtctgaggcgactgcccttggaaagctggaaagcataacaagtaagcttcaaaagatggaggcctacaacttgcgactcgagcaaaagttggacgaaaaagaacaggcactatattacgctagactcgagggccgaaacagagcaaagcatctgagacaaaccattcagtctctgcgtaggcaatttagtggggccctgccactggctcagcaagaaaagttttctaaaaccatgattcagctgcagaatgacaaactgaagataatgcaggagatgaaaaacagccagcaggagcacaggaatatggaaaataaaaccctggagatggaactgaaactaaagggattagaggaactgatctccacactgaaggacaccaagggcgcacagaaggtgattaattggcacatgaaaatcgaggagctccgccttcaggagctaaaactcaacagagagcttgtgaaggacaaggaagagatcaaatatctgaataacatcatttcagaatacgagcggaccatttcctcccttgaagaagaaatcgtgcagcagaacaaatttcatgaagagcggcagatggcttgggaccaaagggaggttgacttggagcgccagctcgatatctttgacagacaacagaatgagattctcaacgccgctcagaagttcgaggaggcgacggggagtatacccgacccttccctcccattacccaaccagctggagatcgcgttaagaaaaatcaaggagaatatcagaatcattctggagacaagagccacctgtaagagccttgaagaaaagctgaaggagaaggagagcgcgctgcgtctggcagagcagaacatcctgtcccgcgacaaggtcatcaacgagctgcgtctccgactcccagctactgccgagcgtgagaaactaatagctgagctgggacgcaaggaaatggaacccaagagtcatcataccctgaagatagctcatcaaacgatcgctaacatgcaggctcgtctcaatcagaaggaagaggtgctgaaaaagtatcaacgccttctggaaaaggcacgagaagagcaacgggagatagtgaaaaaacacgaagaagacttgcatattctgcatcacaggttggaactgcaagcagattcttctctgaataagtttaagcagactgcctgggacctgatgaagcagtcacccactcccgttcctaccaacaaacattttatcaggctggccgagatggagcagacagtggcggagcaggacgactctctctctagtttgctagtcaagctcaaaaaggtttcgcaggatcttgaacgccagcgggagattactgagttaaaagtgaaggagttcgagaatatcaagctgcagctgcaggagaaccacgaagacgaagttaaaaaagtgaaagcagaggttgaagacctcaaatatcttctcgaccagagccagaaagagagccagtgcctcaaaagcgagttgcaggcacagaaggaagccaactcgagagcgccaaccacgacaatgaggaaccttgtggagcggcttaagtcacaactggctttaaaagagaaacagcagaaagccctgtcaagagcactgctggaactgagagctgagatgacggccgctgctgaggaacggatcatctccgccacaagccagaaggaagctcatctgaacgtgcagcagatagtggatagacatacacgggaactgaaaacccaagtggaggacctcaacgagaacctcctgaaactcaaagaggcattgaaaacgtccaagaaccgggaaaacagcctgactgataacttaaacgacctaaacaatgagcttcagaaaaagcagaaagcctacaataaaatcctgcgcgaaaaggaagaaatcgaccaggaaaatgacgaactgaagagacagataaagcggctgacaagcggtctccagggaaagcctcttacagacaataaacaatcactgattgaggagctgcaacgcaaggtgaagaaattggaaaaccaactggaggggaaagttgaagaagtcgatcttaagcccatgaaggaaaagaacgcaaaagaggaacttatccgatgggaagaaggaaagaaatggcaggcgaaaatagagggaatccggaataagttaaaggagaaggaaggagaagtgtttacactgaccaagcagctcaataccttgaaggacctgtttgcaaaagcagacaaggaaaagctgacactccaaaggaagctcaagactacagggatgaccgtcgaccaggtcttgggaatacgggccctggaaagcgagaaagagctcgaggagctcaagaagcggaatctcgacctggaaaatgacatcctgtatatgagggcccatcaggcattgcctagagacagcgttgtcgaagatctccacctccagaatcgatatcttcaggagaagctgcacgctctggagaagcagttctcgaaggacacttattctaagcccagcatttccggcatagagagcgatgaccattgtcagcgtgagcaggaactgcagaaagaaaatctgaagttaagcagtgagaacatagagctcaagtttcagctggaacaggccaataaggacttgcctcggctaaaaaatcaggtaagagaccttaaagagatgtgtgagtttctcaagaaggaaaaggctgaggtgcaacggaagttagggcatgtgagagggtctggtaggagcggaaaaaccattcctgagttggagaaaaccatcggtctgatgaaaaaggtggtggagaaagttcagcgggagaacgaacaactgaaaaaggctagtggcatactgacatctgagaaaatggcaaatattgagcaggaaaacgagaaactgaaagcggaactcgagaaactcaaagctcacctagggcaccagctgtcgatgcactacgagagcaagaccaaagggaccgagaaaataatagccgagaatgagagactacgtaaagagctgaaaaaagaaaccgatgctgccgaaaaattgcgcattgcgaagaacaatcttgagattcttaacgaaaaaatgacagtccagctcgaagagaccggcaagcggttgcagtttgcagagagccgtggaccccagctcgagggcgcggactccaaatcatggaagagcattgtggtcactcgcatgtatgagactaaacttaaagagctggaaacagatattgcaaaaaagaaccagagtatcactgatctgaagcagctggtcaaagaggctacagaacgcgagcagaaagtgaacaagtacaacgaagacctggagcagcagatcaagatcctgaagcacgtacctgaaggcgctgagaccgaacaaggcttaaagcgcgaactgcaagtgctgagactcgctaatcatcagctggacaaagagaaggcagagctgatacatcagatcgaggcgaataaagaccagtccggcgccgagtcaaccatacctgatgctgaccagctaaaggagaaaatcaaagacctcgagacacaacttaagatgagtgacctggaaaagcaacacctcaaggaggagattaagaaactgaagaaggagctcgagaatttcgatccttccttcttcgaggagatcgaagatctgaaatacaactacaaagaggaagtgaaaaaaaatatcctgcttgaagagaaggtgaagaagctctccgaacagttaggggtagagctcacaagtccagtggccgcttctgaggagttcgaagacgaggaagaaagccctgtgaattttcccatatattag

SEQ ID NO: 334837 - DNA, 4620 bp, Artificial Sequence
  derived and/or modified sequence
atggccatcttcaagatcgccgccctgcagaaggtggtggacaactcagtgagcctgagtgaactggagctggctaataagcagtacaacgagctgaccgccaagtatagggacatccttcaaaaggacaacatgctggtgcaaagaacaagcaatctcgaacacctggaatgtgagaacatttcgctgaaagaacaggttgaatcgattaataaagaattggagatcactaaggagaaactccacactatcgaacaggcctgggagcaggaaaccaagctgggcaatgagtcttctatggacaaggcaaaaaaatcaattactaatagtgacattgtttctatctccaagaaaatcaccatgctggagatgaaggagctgaatgagcggcagagggcagagcactgtcagaaaatgtacgagcacctgaggacctcactgaagcagatggaggaaaggaattttgaactcgagacgaagttcgccgagctgactaaaatcaatctagacgcgcagaaagttgagcaaatgctccgggacgagctggctgattcagtttcgaaagccgtgtctgacgccgatcgacagaggattcttgagttggaaaagaacgagatggaactcaaggtggaggtgtcgaaattgagagaaatttcggacattgcacggcgccaagttgaaatcctgaacgcgcaacagcagtctagggacaaagaagttgagagcctgcgcatgcaactactggattatcaggcccagtcagacgagaaatcccttattgctaagctccaccaacacaatgtgtctctgcagctcagcgaagccacagccttaggaaagctagagtctattacctcaaaactgcagaagatggaggcgtataatctgagactggaacaaaaacttgatgagaaagagcaggcgctttactacgcccgcctcgaaggcagaaatcgtgctaaacatttgagacaaacgatccagtccctcagacgccagttttcaggcgccttgccactggcacagcaagaaaagttcagcaaaactatgattcaactgcagaatgataaacttaagataatgcaagagatgaaaaattcacagcaggagcaccgaaacatggagaataagacactggagatggagctgaagcttaagggtctagaagaactcattagtacactgaaggacacaaaaggcgcccagaaagtgatcaactggcatatgaaaattgaggagctgagacttcaggagctaaagcttaacagagagctggtaaaagacaaagaggaaatcaaatatctgaataacatcatttccgaatacgagcgaacaatcagctctttggaggaagagatcgtgcaacaaaataagtttcacgaagagagacagatggcctgggaccagcgggaggtcgatctggagcggcaactggacatcttcgatcgacagcagaatgaaatcttgaatgccgcgcaaaagttcgaggaagcgactggcagcatcccggatccgagtctccctttaccaaatcagctggagatcgccctcagaaagatcaaagaaaacattagaattatactggaaacacgcgccacctgcaagagcttggaagaaaaactgaaggagaaagaatccgcactgcgactagctgaacagaatatcttgtctcgggacaaggtgattaacgagctccgattgagacttccagctacagccgaacgcgaaaagctgattgcggagctcggacgaaaggagatggagccaaaatcacaccataccttgaagattgcacaccaaacgatcgctaatatgcaggcgcgcttgaaccagaaggaagaggtccttaaaaagtaccagcggctgctggagaaggctagagaagaacaaagagagatcgtgaagaagcatgaggaggatctgcacatactgcaccaccggctggaactacaagccgactccagcctaaataaatttaagcagactgcatgggaccttatgaagcagagcccaacacctgtgccaactaacaagcatttcatccgactcgccgagatggagcagaccgtcgctgagcaagatgacagcctctcatcactgcttgtgaagctcaagaaggtttcacaggacctagagaggcagcgagagattacagagcttaaggtcaaggaattcgagaatataaaactgcaacttcaggagaatcatgaagatgaggtgaagaaagtcaaggccgaggtcgaagacctgaagtatcttcttgatcagagccagaaggagagtcagtgcctcaaatcagagctgcaagctcaaaaggaggcaaatagccgcgcacctacaacaacgatgcgtaacttagtcgagagacttaaaagtcagctggctctcaaggaaaagcagcaaaaggcattgagtagagcactgctcgagctgcgggctgagatgacggcagccgctgaagagaggatcatctccgccacctcccagaaggaggcacaccttaatgtccaacaaatagttgatcgtcacacccgcgaactcaagacacaagtggaagatctgaatgagaatttactgaagctgaaagaagcgctgaaaacaagtaaaaaccgggaaaattccctgacggacaacctgaatgatttgaacaatgagctgcagaaaaaacaaaaggcttacaacaagatccttcgagaaaaagaagaaatagatcaggagaatgacgagctgaaaaggcagatcaagcgcctcacctctggactgcaaggaaagcctctcactgataataaacagtcacttattgaagaactgcagaggaaggtgaaaaaactcgagaatcagcttgagggaaaagtggaggaggtcgacctaaagccaatgaaggaaaagaacgccaaagaagaacttattaggtgggaagagggcaagaagtggcaggcaaaaatagaaggcatcagaaacaaattaaaagaaaaggagggggaagtattcacactgacaaagcagctgaacaccctgaaggacctgttcgcgaaagctgataaggagaagcttacacttcagcggaagttaaagactaccggaatgacggttgatcaggtgctgggcatccgcgcactcgaatctgaaaaggaactagaagaacttaagaaacgaaacctcgatctggaaaacgacattctgtatatgcgagctcaccaggccttgccgcgcgactccgtcgtcgaggacctgcatctccaaaatcggtatctgcaggagaaattgcacgccctcgagaagcagttttccaaggacacttactctaagccttcgatctcaggcattgaatcagacgatcactgtcaaagagagcaagaactgcagaaggagaatcttaagctgtctagcgagaatattgagcttaaatttcagcttgaacaggcaaacaaagatctgccaaggttgaagaatcaggtgcgcgatttgaaagagatgtgtgagttccttaagaaggagaaagcggaggtgcagaggaagcttggacatgtcaggggaagtggtcgttcaggcaaaacaatccctgaactggagaagaccattggcctgatgaaaaaggtggtagagaaagtacaaagagagaatgaacagttgaagaaggcatccgggatcctcacatctgaaaaaatggccaatattgaacaggaaaatgagaagctcaaggcggaactcgaaaagctgaaggcgcaccttgggcatcagctctccatgcactacgagtcaaaaactaagggcacagaaaagattattgctgaaaacgagcgcctcagaaaagagctgaaaaaggagaccgatgctgccgaaaagttacgcatagcgaaaaacaacctggagatcttgaacgagaaaatgacggtgcaactagaggaaaccgggaagagactgcagttcgcagaatctaggggcccccagttagagggggctgacagcaagtcctggaaaagcattgtcgtcactagaatgtacgaaacaaagcttaaagaacttgaaaccgatatcgcaaaaaagaatcagtctattacagatttgaagcagctggtgaaggaggcgaccgaacgggagcagaaagtgaataagtacaacgaagacctcgagcagcagattaagattctcaagcacgtccccgagggcgcagaaacagagcagggcctgaagagagaactgcaggttctgaggttagccaaccaccagctcgacaaagagaaagctgagctgatccaccagattgaagcgaataaagatcagtccggcgcagaatctaccattccggacgctgaccagcttaaggaaaagatcaaggaccttgagacccaattgaagatgagcgacctggagaagcagcacctcaaagaggagataaagaagctcaaaaaagaactggaaaactttgaccctagtttttttgaagaaatcgaagacctcaagtacaactataaggaagaggttaaaaagaacatccttctggaggaaaaggtgaaaaagctgtcggaacagcttggtgtagaactgacatcacccgtggccgcttccgaggaattcgaggatgaggaagagagtccagtgaactttcctatatactag

SEQ ID NO: 334838 - DNA, 4620 bp, Artificial Sequence
  derived and/or modified sequence
atggccatctttaagatcgctgccctgcagaaagtcgtggacaactcagtgtctctttccgagctggaactcgccaacaagcagtacaatgagctgactgctaagtatagggacatcctccagaaggataacatgctggtgcagcgtacatcaaatttggaacacctggaatgtgaaaacatctcactcaaagagcaagtggagtcgattaacaaggagctagagatcaccaaggagaaactgcatactattgaacaagcttgggagcaggagaccaaattagggaacgaatcttctatggacaaagcaaagaaaagcattaccaattctgatattgttagcatttctaaaaaaattaccatgctggagatgaaagaactgaacgagcgtcagagagcagagcattgtcagaaaatgtatgagcacttgagaacgtcactgaagcaaatggaagagagaaatttcgagctggaaaccaagttcgccgagctgacaaaaatcaatcttgacgcacaaaaggtggaacagatgctgcgggatgagctggccgactctgtcagtaaggctgtttcagatgccgaccgccagagaatcctggagttggagaaaaatgaaatggaactcaaggtggaagtgtccaaacttagggagataagcgacatcgcgcgtaggcaggtggaaatcctgaacgcccaacagcagagccgggataaagaggtggagtccctccggatgcagctcctggactatcaagcacagtcagatgaaaaatccctgatagccaagttacaccagcataatgtgagtcttcagctatccgaggcaactgcgctgggaaagctcgagagtataaccagtaagctgcaaaaaatggaagcttacaacctacgcttggaacagaagctcgacgaaaaggaacaggccctttattacgctagactggaaggtcggaacagggccaagcacctgaggcaaaccattcagtccctgcgcaggcaattctcaggcgctcttccccttgcccagcaggaaaagttctccaagactatgattcaactgcagaacgacaagctgaagatcatgcaggaaatgaagaattcacagcaggaacacagaaatatggaaaacaagaccctggaaatggagctgaagctcaaggggttggaggaacttattagcacactcaaagataccaaaggcgctcagaaggtgatcaactggcatatgaagatagaggagctgcggctccaggaattaaagctgaatagggagctggtgaaggacaaagaagagatcaaatacctaaacaatatcatctcagaatatgaaagaaccatatcctcattagaagaggagattgttcagcaaaataaatttcacgaggaaaggcagatggcctgggaccagcgggaggtggatctggaaaggcaactggacatttttgatcgacaacagaatgaaatcctgaacgcagcccaaaaattcgaggaggccaccggtagcatcccagatcccagtctgcccttacccaatcaactcgagattgcacttcgtaagatcaaggaaaatattcgcattatcctggagacccgtgctacatgcaagtctctggaggaaaaactaaaagaaaaggagtcagcattgaggttggctgaacagaatatcttgtcaagggacaaggttattaacgaactgagactgcgcctcccagccacagcggaacgcgaaaaactgatcgctgagttaggaaggaaggagatggaacccaagtcacatcacacacttaagatcgctcatcagactatagccaacatgcaggcacgcctgaaccagaaggaggaagtgctgaaaaagtatcagcggctcctggagaaagcgagagaggagcagagggaaatcgtgaagaaacacgaggaggatcttcacatactccaccatcgactcgagctacaggccgatagctcactcaacaagtttaagcaaactgcctgggacctcatgaagcaaagcccaactccagtgccgacgaataagcacttcatccggctggctgaaatggagcagaccgtcgccgagcaggatgactctctgagcagcttgctagtgaaactgaaaaaggtttcccaggacctagagcgacagagagagatcactgaactcaaggtgaaagagtttgaaaacatcaaactgcaacttcaggaaaatcacgaggacgaggttaagaaggttaaggcagaggtggaggacttgaaatacctgttggatcaaagccagaaggaaagtcagtgcctcaaatccgaattacaggctcagaaggaagcaaactcaagagcccctaccaccactatgagaaacctcgtggaaagacttaaaagtcagttagccttaaaggagaagcagcagaaagcattaagtagggctctcctggaattgcgcgcagagatgacagccgctgccgaggaaaggataatctctgccactagtcaaaaggaagcccatctaaacgtgcagcagatagtggaccggcatactcgggaactgaagacacaggtcgaggatttgaatgaaaacctgttgaaactgaaggaggcattaaagacttcaaaaaacagggagaattctctgaccgacaacttgaatgacttgaacaacgaattacaaaagaagcagaaagcttacaataagatcctgagagagaaggaagagattgaccaagaaaacgatgagctgaaaagacagattaaacgcctcacatccggcctccagggcaaacccctgaccgacaataagcaaagcttgatcgaggagctccagcggaaggtgaaaaagctcgagaatcaactggagggtaaggtggaggaggtcgatctgaaaccaatgaaagaaaaaaatgcaaaagaagagctcatccgttgggaagagggaaagaaatggcaggccaagattgaaggaatcagaaacaaactaaaagaaaaggagggcgaggtgttcaccctcaccaaacaacttaacacccttaaagatctgtttgcaaaagccgacaaggaaaaactgacactgcagcgcaaactgaagaccacagggatgaccgtggaccaggttctaggaattcgcgctttggaaagcgaaaaagaactcgaggagttgaaaaaacggaacttggaccttgagaacgacatattgtatatgagagcacatcaggccctcccacgcgactcagtcgttgaggaccttcacctccagaacaggtacctgcaggaaaagctgcacgctttggaaaagcagttttcaaaggacacatactctaaaccatccataagcggcatcgaatccgacgatcactgccagcgcgaacaagaactgcagaaagaaaatctgaaactatcatctgagaatatcgagttgaaatttcaacttgagcaggccaacaaagacttacctcggcttaagaaccaagtgcgcgacctcaaagagatgtgcgaattccttaaaaaggagaaggccgaagtgcagagaaagctagggcacgtccggggttcaggaaggagtggcaaaactatacccgaacttgagaagacaataggcctcatgaaaaaggtcgtcgagaaggttcagagggagaatgagcagctaaaaaaagcatccggaattttgaccagtgaaaaaatggctaacattgagcaggagaacgagaagctcaaggctgagctggaaaagctgaaggctcacctgggacatcagttgtctatgcactacgagagtaagactaaagggacggaaaagatcatcgcagagaacgaacggttgaggaaagaactgaagaaagagacggatgctgcagaaaaactgcgcattgccaagaacaatctggaaatcctaaacgaaaagatgacggtgcagttggaagagacaggaaagcgtctgcagtttgcagaatccagagggcctcaactggaaggggctgatagtaaaagctggaaatctattgtggttaccaggatgtacgagaccaaactgaaggaactggaaacagacattgccaagaagaatcaatcaattactgatttgaagcagctcgttaaggaagcaaccgagcgtgagcaaaaggtgaacaagtataacgaagatctggagcagcagattaagatcctgaaacacgtgcccgaaggggctgaaactgagcagggcctgaaacgggagcttcaggttctccgacttgccaaccatcagctcgataaagagaaggcagagttgatacaccagatcgaggcgaataaagaccagtctggagcagagtccacgatccccgatgccgaccagctcaaagagaagataaaggacctcgaaactcagctgaagatgagcgacctagagaagcaacacctgaaagaggaaattaagaagctgaaaaaagaattagaaaacttcgatccctcatttttcgaggagattgaagatttaaagtacaattataaggaggaggttaaaaaaaacatccttctggaggaaaaggtaaagaagttgagcgagcagctgggagttgagttaacatctcccgtggccgcatcagaagaatttgaagatgaagaggagtctcctgtcaatttccccatctattag

SEQ ID NO: 334839 - DNA, 4620 bp, Artificial Sequence
  derived and/or modified sequence
atggcaatctttaaaatcgccgctctccaaaaggttgtggacaactctgtatctctctctgagctggagttggctaataagcagtacaacgaactcaccgcgaagtaccgggatattctacagaaagataatatgctagtgcaacggacaagtaatctcgagcatcttgagtgtgagaatatctccttgaaggaacaagtggagtccataaataaggagctcgagatcacaaaagagaagctgcacactatcgagcaggcttgggagcaggagacaaaattgggcaacgagtccagtatggataaggctaagaagagcattactaactcagacatcgtgagcatatcaaagaagattaccatgctcgagatgaaagagctgaacgagcgccagcgagcagaacactgccagaagatgtacgagcatctccgcacctccctgaaacaaatggaggagcgaaatttcgaactggaaacaaagttcgcagagttgaccaagatcaacctagatgcccagaaggtggaacagatgctgagggatgagctcgccgactctgtgtccaaagccgtttccgatgccgatcggcagcggattttagagctggagaaaaatgagatggagctgaaagtggaggtttccaagttgcgtgaaatttctgacatagctaggaggcaagtagaaattctgaacgcccaacaacagagtcgcgataaggaagtggaatctctgcggatgcagcttcttgattatcaggcacagagcgacgagaaatccctcattgccaagctacaccagcataatgtatccttgcagctgtccgaagctactgcactcgggaagttagaaagtatcacgtccaaacttcagaagatggaagcttataatctaaggcttgaacaaaagctggacgagaaggagcaggccctgtattatgcaagactggaaggtagaaatcgggcaaagcacctcagacaaacaattcagtccctaagaaggcagttcagcggcgcactaccacttgcccagcaagagaaattcagcaaaaccatgatccaattgcagaacgacaaactgaaaatcatgcaagaaatgaagaactcccagcaagagcatcgtaacatggaaaataagactctcgagatggagctcaagctgaaagggttggaggaactcatctcaactttgaaagataccaaaggagctcagaaagtcattaactggcatatgaagatagaggagctgagattgcaggagttgaagctgaatcgggaattggtgaaagacaaggaggagataaaatacctcaacaacatcattagcgagtacgagagaacgattagcagtcttgaggaggaaatcgttcagcagaataagtttcacgaggagcggcagatggcttgggaccagagagaggttgacctcgagcggcagctggacatctttgacagacagcagaacgagatccttaatgctgcccagaagtttgaagaggctacagggagcattcctgacccttctctgcctttgcctaaccagcttgaaattgccctgagaaagataaaagagaatattcggattatcctggagacccgggcaacttgtaaaagcctcgaagaaaagctcaaggagaaggagtctgctctgcgtctggctgagcagaacatcctgtcgcgggacaaagtgattaacgagttgcgactgcggctcccggctaccgccgagagagaaaagctgatcgccgaactcggcaggaaggagatggagcccaagtcccatcatactctgaaaattgcccaccagactatcgctaacatgcaggcaaggctcaaccagaaagaggaagtgcttaaaaagtatcagaggctcctcgaaaaagcacgggaagagcagcgcgaaattgtgaagaaacatgaggaagatttgcacatcctacaccatcgacttgagctccaggctgactcttcccttaacaagttcaagcaaaccgcttgggatctgatgaaacaatcgcctacccctgtacctacaaacaaacattttatccgactcgccgaaatggagcagaccgtggctgaacaggacgacagcctgtcctctttgttagtgaaactgaagaaggtttcacaagacctggaacggcagagggagatcacggagctgaaagtcaaagagtttgaaaatatcaaattgcagctgcaagagaaccatgaagatgaggttaagaaggtgaaggctgaagtggaagatctgaaatacctgttagatcaaagccaaaaggaatcacagtgtctgaagtccgaactacaggcacaaaaggaggcaaacagccgcgctccaacaacaacaatgagaaacctggtggagcggctgaagtcccagctagctctcaaggagaagcagcagaaagctctgtctcgcgctcttctggagctgcgggcagaaatgacagcggcagctgaagaaaggatcatctccgcaactagtcaaaaggaagcacatcttaatgtgcagcagatcgtggataggcataccagagagcttaaaacgcaggttgaggacctgaacgagaacctgctcaagcttaaagaggccctgaagacgtctaagaatagagaaaacagccttactgacaacttgaacgacctaaacaacgagctgcagaaaaaacagaaggcttacaataagattctgcgggagaaggaagaaattgatcaggaaaatgacgaactgaagcggcagatcaagagactgacctccgggctgcagggtaagcctctgaccgacaacaaacagagtctgatagaagagctacagcggaaggtgaagaaactggaaaatcagctggagggcaaggtggaagaagtggacctgaagccgatgaaggaaaagaatgccaaggaggagctgatacgatgggaagaaggcaagaagtggcaagccaagattgagggcatacgcaacaaactcaaagagaaggaaggagaagtattcacccttaccaagcagctgaacactctcaaagacctttttgctaaagcggataaagaaaaactgacccttcagcggaagttaaaaactaccgggatgactgtagatcaggtattaggcattcgtgccctggaaagtgagaaggagctcgaagaactgaaaaagaggaatctggatctggagaacgatatattgtatatgagggcccatcaagccctgcctagagactccgtcgtcgaggatctccatttgcaaaacaggtatcttcaggagaaattgcatgccctcgaaaagcagttttccaaagacacgtacagcaaaccatctatatcaggtattgaatcagacgaccactgccagagggagcaggaactgcagaaggaaaatcttaaactctctagcgagaatattgaactgaaattccagttagagcaggcgaacaaagatttacccaggctaaagaatcaagttcgagacctgaaggaaatgtgcgagttccttaagaaggagaaggcggaagttcagagaaaattaggccacgtgcgtggctctggcaggtcagggaaaaccattccggagctggaaaaaacgattggcctgatgaagaaggtggttgagaaggttcagcgcgaaaacgaacagctaaaaaaggcctcgggcattctgactagtgaaaaaatggctaatatcgagcaggaaaacgaaaaactgaaggcggagctggaaaaactcaaggcacaccttggccatcaactcagtatgcattacgagtccaagactaagggcaccgagaagatcatcgccgagaacgagagactgagaaaggaacttaaaaaagaaacagatgccgctgaaaaactgagaatcgctaagaacaatctagaaattctcaacgagaagatgaccgttcaactggaggaaacgggcaagcgactgcaattcgccgaaagtcggggtccccagctcgagggcgctgatagcaaatcctggaaatcaatagtagtgaccaggatgtatgagactaagctgaaagaattggaaactgacatcgcgaagaagaaccagagtataaccgatttgaagcaattagtaaaggaggcaactgaaagagagcaaaaggtgaataagtataacgaggatttagagcagcaaattaagattctaaagcacgtcccggagggtgccgagacggaacaggggttgaaacgcgagctgcaagttctccggctggctaaccaccaattggataaagaaaaggccgagctgattcatcagatcgaggccaacaaggaccagagcggcgcagagtctaccatcccggatgctgaccaactcaaggagaaaattaaagacctggaaacacagttaaaaatgtcagatcttgagaaacaacacctgaaggaggagattaaaaagcttaagaaagaactggagaattttgacccttcattctttgaggaaatcgaagaccttaagtataactataaagaagaggttaaaaaaaacatcttgttggaagaaaaagtaaaaaaactgtccgaacaactcggggtggaactgacttctcctgtcgcggcaagtgaagaattcgaagatgaggaagagtccccggttaactttccaatctactag

SEQ ID NO: 334840 - DNA, 5967 bp, Artificial Sequence
  derived and/or modified sequence
aagcttaatactgagcatcaagaaattctttaataaatataagtgatatttattcagacatgtaataaggaaatgttcatgtcttatttttgtgttagatttttttagaatctacttttgttagagttttataaatacagttagtgtttgagatagaaagagaaaagaattagttttcttcctcttctacctgctcatgaacttgatttttttctcccaacaattgaagagccaagaaaaagggagattcttaagagatgggaaatagaatctcatctacccctgtttcccccagaacagtgaaactgaatcttaagggtaagatagaatagtgtgtacttaacttagatggagaagaaaggctgccaaaatgagatctgaagcgctattacaaatatttccatcgttactgtacttcagaatgaattacaaccgtaagtttttttacttcctcattcataaatttgattattccttataccacttctcagctttcatcattctttattgtacttttctatgtaatgtttgcctattatacagcaacttaagagaactgtaagtttggacatttcattttggtgttgataatagaatatctttgaatagttctatagttgatgagtagaaccatgaaccaagtaacttaaagtccttgatgttatttattacagagaactataatagaagctctcccgctaatgtttccatcatgtgtacaaaaagttttcttgttattaaagctagtccgtttaacttacaataagcataaatagctaagctgtgaaagttacctgtgataatgctaattttcccatttattaaaaggcaagttgttttccgatcataagaaatttagaaaagccatccaaagataaattccgagtgatatattcctgctgtttgttatgttttctcaaattaattgagttttattttacaatgacaggagttattaaagtattttatttttattatgattaagattttcaaagtaacatttcttatatgaaagaaattatgttaatgcatgtttttcttacatgggaaatcatatattttaaaaatgattttaaaattcgttttactttaagttgtattatctttctcaaaagtggctagtgcttgaccagaaaaaaagacaccagcataactcagtgtatctttatttacataggaaatggccattttcaagattgcagctctccaaaaagttgtagataatagtgtttctttgtctgaactagaactggctaataaacagtacaatgaactgactgctaagtacagggacatcttgcaaaaagataatatgcttgttcaaagaacaagtaacttggaacacctggagtgtgaaaacatctccttaaaagaacaagtggagtctataaataaagaactggagattaccaaggaaaaacttcacactattgaacaagcctgggaacaggaaactaaattaggtaatgaatctagcatggataaggcaaagaaatcaataaccaacagtgacattgtttccatttcaaaaaaaataactatgctggaaatgaaggaattaaatgaaaggcagcgggctgaacattgtcaaaaaatgtatgaacacttacggacttcgttaaagcaaatggaggaacgtaattttgaattggaaaccaaatttgctgagcttaccaaaatcaatttggatgcacagaaggtggaacagatgttaagagatgaattagctgatagtgtgagcaaggcagtaagtgatgctgataggcaacggattctagaattagagaagaatgaaatggaactaaaagttgaagtgtcaaaactgagagagatttctgatattgccagaagacaagttgaaattttgaatgcacaacaacaatctagggacaaggaagtagagtccctcagaatgcaactgctagactatcaggcacagtctgatgaaaagtcgctcattgccaagttgcaccaacataatgtctctcttcaactgagtgaggctactgctcttggtaagttggagtcaattacatctaaactgcagaagatggaggcctacaacttgcgcttagagcagaaacttgatgaaaaagaacaggctctctattatgctcgtttggagggaagaaacagagcaaaacatctgcgccaaacaattcagtctctacgacgacagtttagtggagctttacccttggcacaacaggaaaagttctccaaaacaatgattcaactacaaaatgacaaacttaagataatgcaagaaatgaaaaattctcaacaagaacatagaaatatggagaacaaaacattggagatggaattaaaattaaagggcctggaagagttaataagcactttaaaggataccaaaggagcccaaaaggtaatcaactggcatatgaaaatagaagaacttcgtcttcaagaacttaaactaaatcgggaattagtcaaggataaagaagaaataaaatatttgaataacataatttctgaatatgaacgtacaatcagcagtcttgaagaagaaattgtgcaacagaacaagtttcatgaagaaagacaaatggcctgggatcaaagagaagttgacctggaacgccaactagacatttttgaccgtcagcaaaatgaaatactaaatgcggcacaaaagtttgaagaagctacaggatcaatccctgaccctagtttgccccttccaaatcaacttgagatcgctctaaggaaaattaaggagaacattcgaataattctagaaacacgggcaacttgcaaatcactagaagagaaactaaaagagaaagaatctgctttaaggttagcagaacaaaatatactgtcaagagacaaagtaatcaatgaactgaggcttcgattgcctgccactgcagaaagagaaaagctcatagctgagctaggcagaaaagagatggaaccaaaatctcaccacacattgaaaattgctcatcaaaccattgcaaacatgcaagcaaggttaaatcaaaaagaagaagtattaaagaagtatcaacgtcttctagaaaaagccagagaggagcaaagagaaattgtgaagaaacatgaggaagaccttcatattcttcatcacagattagaactacaggctgatagttcactaaataaattcaaacaaacggcttgggatttaatgaaacagtctcccactccagttcctaccaacaagcattttattcgtctggctgagatggaacagacagtagcagaacaagatgactctctttcctcactcttggtcaaactaaagaaagtatcacaagatttggagagacaaagagaaatcactgaattaaaagtaaaagaatttgaaaatatcaaattacagcttcaagaaaaccatgaagatgaagtgaaaaaagtaaaagcggaagtagaggatttaaagtatcttctggaccagtcacaaaaggagtcacagtgtttaaaatctgaacttcaggctcaaaaagaagcaaattcaagagctccaacaactacaatgagaaatctagtagaacggctaaagagccaattagccttgaaggagaaacaacagaaagcacttagtcgggcacttttagaactccgggcagaaatgacagcagctgctgaagaacgtattatttctgcaacttctcaaaaagaggcccatctcaatgttcaacaaatcgttgatcgacatactagagagctaaagacacaagttgaagatttaaatgaaaatcttttaaaattgaaagaagcacttaaaacaagtaaaaacagagaaaactcactaactgataatttgaatgacttaaataatgaactgcaaaagaaacaaaaagcctataataaaatacttagagagaaagaggaaattgatcaagagaatgatgaactgaaaaggcaaattaaaagactaaccagtggattacagggcaaacccctgacagataataaacaaagtctaattgaagaactccaaaggaaagttaaaaaactagagaaccaattagagggaaaggtggaggaagtagacctaaaacctatgaaagaaaagaatgctaaagaagaattaattaggtgggaagaaggtaaaaagtggcaagccaaaatagaaggaattcgaaacaagttaaaagagaaagagggggaagtctttactttaacaaagcagttgaatactttgaaggatctttttgccaaagccgataaagagaaacttactttgcagaggaaactaaaaacaactggcatgactgttgatcaggttttgggaatacgagctttggagtcagaaaaagaattggaagaattaaaaaagagaaatcttgacttagaaaatgatatattgtatatgagggcccaccaagctcttcctcgagattctgttgtagaagatttacatttacaaaatagatacctccaagaaaaacttcatgctttagaaaaacagttttcaaaggatacatattctaagccttcaatttcaggaatagagtcagatgatcattgtcagagagaacaggagcttcagaaggaaaacttgaagttgtcatctgaaaatattgaactgaaatttcagcttgaacaagcaaataaagatttgccaagattaaagaatcaagtcagagatttgaaggaaatgtgtgaatttcttaagaaagaaaaagcagaagttcagcggaaacttggccatgttagagggtctggtagaagtggaaagacaatcccagaactggaaaaaaccattggtttaatgaaaaaagtagttgaaaaagtccagagagaaaatgaacagttgaaaaaagcatcaggaatattgactagtgaaaaaatggctaatattgagcaggaaaatgaaaaattgaaggctgaattagaaaaacttaaagctcatcttgggcatcagttgagcatgcactatgaatccaagaccaaaggcacagaaaaaattattgctgaaaatgaaaggcttcgtaaagaacttaaaaaagaaactgatgctgcagagaaattacggatagcaaagaataatttagagatattaaatgagaagatgacagttcaactagaagagactggtaagagattgcagtttgcagaaagcagaggtccacagcttgaaggtgctgacagtaagagctggaaatccattgtggttacaagaatgtatgaaaccaagttaaaagaattggaaactgatattgccaaaaaaaatcaaagcattactgaccttaaacagcttgtaaaagaagcaacagagagagaacaaaaagttaacaaatacaatgaagaccttgaacaacagattaagattcttaaacatgttcctgaaggtgctgagacagagcaaggccttaaacgggagcttcaagttcttagattagctaatcatcagctggataaagagaaagcagaattaatccatcagatagaagctaacaaggaccaaagtggagctgaaagcaccatacctgatgctgatcaactaaaggaaaaaataaaagatctagagacacagctcaaaatgtcagatctagaaaagcagcatttgaaggaggaaataaagaagctgaaaaaagaactggaaaattttgatccttcattttttgaagaaattgaagatcttaagtataattacaaggaagaagtgaagaagaatattctcttagaagagaaggtaaaaaaactttcagaacaattgggagttgaattaactagccctgttgctgcttctgaagagtttgaagatgaagaagaaagtcctgttaatttccccatttactaaaggtcacctataaactttgtttcatttaactatttattaactttataagttaaatatacttggaaataagcagttctccgaactgtagtatttccttctcactaccttgtacctttatacttagattggaattcttaataaataaaattatatgaaattttcaactt

SEQ ID NO: 334841 - DNA, 4620 bp, Artificial Sequence
  derived and/or modified sequence
atggccatcttcaagatcgccgccctgcagaaggtggtggacaacagcgtgagcctgagcgagctggagctggccaacaagcagtacaacgagctgaccgccaagtacagagacatcctgcagaaggacaacatgctggtgcagagaaccagcaacctggagcacctggagtgcgagaacatcagcctgaaggagcaggtggagagcatcaacaaggagctggagatcaccaaggagaagctgcacaccatcgagcaggcctgggagcaggagaccaagctgggcaacgagagcagcatggacaaggccaagaagagcatcaccaacagcgacatcgtgagcatcagcaagaagatcaccatgctggagatgaaggagctgaacgagagacagagagccgagcactgccagaagatgtacgagcacctgagaaccagcctgaagcagatggaggagagaaacttcgagctggagaccaagttcgccgagctgaccaagatcaacctggacgcccagaaggtggagcagatgctgagagacgagctggccgacagcgtgagcaaggccgtgagcgacgccgacagacagagaatcctggagctggagaagaacgagatggagctgaaggtggaggtgagcaagctgagagagatcagcgacatcgccagaagacaggtggagatcctgaacgcccagcagcagagcagagacaaggaggtggagagcctgagaatgcagctgctggactaccaggcccagagcgacgagaagagcctgatcgccaagctgcaccagcacaacgtgagcctgcagctgagcgaggccaccgccctgggcaagctggagagcatcaccagcaagctgcagaagatggaggcctacaacctgagactggagcagaagctggacgagaaggagcaggccctgtactacgccagactggagggcagaaacagagccaagcacctgagacagaccatccagagcctgagaagacagttcagcggcgccctgcccctggcccagcaggagaagttcagcaagaccatgatccagctgcagaacgacaagctgaagatcatgcaggagatgaagaacagccagcaggagcacagaaacatggagaacaagaccctggagatggagctgaagctgaagggcctggaggagctgatcagcaccctgaaggacaccaagggcgcccagaaggtgatcaactggcacatgaagatcgaggagctgagactgcaggagctgaagctgaacagagagctggtgaaggacaaggaggagatcaagtacctgaacaacatcatcagcgagtacgagagaaccatcagcagcctggaggaggagatcgtgcagcagaacaagttccacgaggagagacagatggcctgggaccagagagaggtggacctggagagacagctggacatcttcgacagacagcagaacgagatcctgaacgccgcccagaagttcgaggaggccaccggcagcatccccgaccccagcctgcccctgcccaaccagctggagatcgccctgagaaagatcaaggagaacatcagaatcatcctggagaccagagccacctgcaagagcctggaggagaagctgaaggagaaggagagcgccctgagactggccgagcagaacatcctgagcagagacaaggtgatcaacgagctgagactgagactgcccgccaccgccgagagagagaagctgatcgccgagctgggcagaaaggagatggagcccaagagccaccacaccctgaagatcgcccaccagaccatcgccaacatgcaggccagactgaaccagaaggaggaggtgctgaagaagtaccagagactgctggagaaggccagagaggagcagagagagatcgtgaagaagcacgaggaggacctgcacatcctgcaccacagactggagctgcaggccgacagcagcctgaacaagttcaagcagaccgcctgggacctgatgaagcagagccccacccccgtgcccaccaacaagcacttcatcagactggccgagatggagcagaccgtggccgagcaggacgacagcctgagcagcctgctggtgaagctgaagaaggtgagccaggacctggagagacagagagagatcaccgagctgaaggtgaaggagttcgagaacatcaagctgcagctgcaggagaaccacgaggacgaggtgaagaaggtgaaggccgaggtggaggacctgaagtacctgctggaccagagccagaaggagagccagtgcctgaagagcgagctgcaggcccagaaggaggccaacagcagagcccccaccaccaccatgagaaacctggtggagagactgaagagccagctggccctgaaggagaagcagcagaaggccctgagcagagccctgctggagctgagagccgagatgaccgccgccgccgaggagagaatcatcagcgccaccagccagaaggaggcccacctgaacgtgcagcagatcgtggacagacacaccagagagctgaagacccaggtggaggacctgaacgagaacctgctgaagctgaaggaggccctgaagaccagcaagaacagagagaacagcctgaccgacaacctgaacgacctgaacaacgagctgcagaagaagcagaaggcctacaacaagatcctgagagagaaggaggagatcgaccaggagaacgacgagctgaagagacagatcaagagactgaccagcggcctgcagggcaagcccctgaccgacaacaagcagagcctgatcgaggagctgcagagaaaggtgaagaagctggagaaccagctggagggcaaggtggaggaggtggacctgaagcccatgaaggagaagaacgccaaggaggagctgatcagatgggaggagggcaagaagtggcaggccaagatcgagggcatcagaaacaagctgaaggagaaggagggcgaggtgttcaccctgaccaagcagctgaacaccctgaaggacctgttcgccaaggccgacaaggagaagctgaccctgcagagaaagctgaagaccaccggcatgaccgtggaccaggtgctgggcatcagagccctggagagcgagaaggagctggaggagctgaagaagagaaacctggacctggagaacgacatcctgtacatgagagcccaccaggccctgcccagagacagcgtggtggaggacctgcacctgcagaacagatacctgcaggagaagctgcacgccctggagaagcagttcagcaaggacacctacagcaagcccagcatcagcggcatcgagagcgacgaccactgccagagagagcaggagctgcagaaggagaacctgaagctgagcagcgagaacatcgagctgaagttccagctggagcaggccaacaaggacctgcccagactgaagaaccaggtgagagacctgaaggagatgtgcgagttcctgaagaaggagaaggccgaggtgcagagaaagctgggccacgtgagaggcagcggcagaagcggcaagaccatccccgagctggagaagaccatcggcctgatgaagaaggtggtggagaaggtgcagagagagaacgagcagctgaagaaggccagcggcatcctgaccagcgagaagatggccaacatcgagcaggagaacgagaagctgaaggccgagctggagaagctgaaggcccacctgggccaccagctgagcatgcactacgagagcaagaccaagggcaccgagaagatcatcgccgagaacgagagactgagaaaggagctgaagaaggagaccgacgccgccgagaagctgagaatcgccaagaacaacctggagatcctgaacgagaagatgaccgtgcagctggaggagaccggcaagagactgcagttcgccgagagcagaggcccccagctggagggcgccgacagcaagagctggaagagcatcgtggtgaccagaatgtacgagaccaagctgaaggagctggagaccgacatcgccaagaagaaccagagcatcaccgacctgaagcagctggtgaaggaggccaccgagagagagcagaaggtgaacaagtacaacgaggacctggagcagcagatcaagatcctgaagcacgtgcccgagggcgccgagaccgagcagggcctgaagagagagctgcaggtgctgagactggccaaccaccagctggacaaggagaaggccgagctgatccaccagatcgaggccaacaaggaccagagcggcgccgagagcaccatccccgacgccgaccagctgaaggagaagatcaaggacctggagacccagctgaagatgagcgacctggagaagcagcacctgaaggaggagatcaagaagctgaagaaggagctggagaacttcgaccccagcttcttcgaggagatcgaggacctgaagtacaactacaaggaggaggtgaagaagaacatcctgctggaggagaaggtgaagaagctgagcgagcagctgggcgtggagctgaccagccccgtggccgccagcgaggagttcgaggacgaggaggagagccccgtgaacttccccatctactag

SEQ ID NO: 334842 - DNA, 6699 bp, Artificial Sequence
  derived and/or modified sequence
gatcattatcaacttcaagtgcaggagcttacagatcttctgaaatcaaaaaatgaagaagatgatccaattatggtagctgtcaatgcaaaagtagaagaatggaagctaattttgtcttctaaagatgatgaaattattgagtatcagcaaatgttacataacctaagggagaaacttaagaatgctcagcttgatgctgataaaagtaatgttatggctctacagcagggtatacaggaacgagacagtcaaattaagatgctcaccgaacaagtagaacaatatacaaaagaaatggaaaagaatacttgtattattgaagatttgaaaaatgagctccaaagaaacaaaggtgcttcaaccctttctcaacagactcatatgaaaattcagtcaacgttagacattttaaaagagaaaactaaagaggctgagagaacagctgaactggctgaggctgatgctagggaaaaggataaagaattagttgaggctctgaagaggttaaaagattatgaatcgggagtatatggtttagaagatgctgtcgttgaaataaagaattgtaaaaaccaaattaaaataagagatcgagagattgaaatattaacaaaggaaatcaataaacttgaattgaagatcagtgatttccttgatgaaaatgaggcacttagagagcgtgtgggccttgaaccaaagacaatgattgatttaactgaatttagaaatagcaaacacttaaaacagcagcagtacagagctgaaaaccagattcttttgaaagagattgaaagtctagaggaagaacgacttgatctgaaaaaaaaaattcgtcaaatggctcaagaaagaggaaaaagaagtgcaacttcaggattaaccactgaggacctgaacctaactgaaaacatttctcaaggagatagaataagtgaaagaaaattggatttattgagcctcaaaaatatgagtgaagcacaatcaaagaatgaaatcatagcacaggaattcttgatcaaagaagcagagtgtagaaatgcagatatagagcttgaacatcacagaagccaggcagaacagaatgaatttctttcaagagaactaattgaaaaagaaagagatttagaaaggagtaggacagtgatagccaaatttcagaataaattaaaagaattagttgaagaaaataagcaacttgaagaaggtatgaaagaaatattgcaagcaattaaggaaatgcagaaagatcctgatgttaaaggaggagaaacatctctaattatccctagccttgaaagactagttaatgctatagaatcaaagaatgcagaaggaatctttgatgcgagtctgcatttgaaagcccaagttgatcagcttaccggaagaaatgaagaattaagacaggagctcagggaatctcggaaagaggctataaattattcacagcagttggcaaaagctaatttaaagatagaccatcttgaaaaagaaactagtcttttacgacaatcagaaggatcaaatgttgtttttaaaggaattgacttacctgatgggatagcaccatctagtgccagtatcattaattctcagaatgaatatttaatacatttgttacaggaactagaaaataaagaaaaaaagttaaagaatttagaagattctcttgaagattacaacagaaaatttgctgtaattcgtcatcaacaaagtttgttgtataaagaatacctaagtgaaaaggagacctggaaaacagaatctaaaacaataaaagaggaaaagagaaaacttgaggatcaagtccaacaagatgctataaaagtaaaagaatataataatttgctcaatgctcttcagatggattcggatgaaatgaaaaaaatacttgcagaaaatagtaggaaaattactgttttgcaagtgaatgaaaaatcacttataaggcaatatacaaccttagtagaattggagcgacaacttagaaaagaaaatgagaagcaaaagaatgaattgttgtcaatggaggctgaagtttgtgaaaaaattgggtgtttgcaaagatttaaggaaatggccattttcaagattgcagctctccaaaaagttgtagataatagtgtttctttgtctgaactagaactggctaataaacagtacaatgaactgactgctaagtacagggacatcttgcaaaaagataatatgcttgttcaaagaacaagtaacttggaacacctggagtgtgaaaacatctccttaaaagaacaagtggagtctataaataaagaactggagattaccaaggaaaaacttcacactattgaacaagcctgggaacaggaaactaaattaggtaatgaatctagcatggataaggcaaagaaatcaataaccaacagtgacattgtttccatttcaaaaaaaataactatgctggaaatgaaggaattaaatgaaaggcagcgggctgaacattgtcaaaaaatgtatgaacacttacggacttcgttaaagcaaatggaggaacgtaattttgaattggaaaccaaatttgctgagcttaccaaaatcaatttggatgcacagaaggtggaacagatgttaagagatgaattagctgatagtgtgagcaaggcagtaagtgatgctgataggcaacggattctagaattagagaagaatgaaatggaactaaaagttgaagtgtcaaaactgagagagatttctgatattgccagaagacaagttgaaattttgaatgcacaacaacaatctagggacaaggaagtagagtccctcagaatgcaactgctagactatcaggcacagtctgatgaaaagtcgctcattgccaagttgcaccaacataatgtctctcttcaactgagtgaggctactgctcttggtaagttggagtcaattacatctaaactgcagaagatggaggcctacaacttgcgcttagagcagaaacttgatgaaaaagaacaggctctctattatgctcgtttggagggaagaaacagagcaaaacatctgcgccaaacaattcagtctctacgacgacagtttagtggagctttacccttggcacaacaggaaaagttctccaaaacaatgattcaactacaaaatgacaaacttaagataatgcaagaaatgaaaaattctcaacaagaacatagaaatatggagaacaaaacattggagatggaattaaaattaaagggcctggaagagttaataagcactttaaaggataccaaaggagcccaaaaggtaatcaactggcatatgaaaatagaagaacttcgtcttcaagaacttaaactaaatcgggaattagtcaaggataaagaagaaataaaatatttgaataacataatttctgaatatgaacgtacaatcagcagtcttgaagaagaaattgtgcaacagaacaagtttcatgaagaaagacaaatggcctgggatcaaagagaagttgacctggaacgccaactagacatttttgaccgtcagcaaaatgaaatactaaatgcggcacaaaagtttgaagaagctacaggatcaatccctgaccctagtttgccccttccaaatcaacttgagatcgctctaaggaaaattaaggagaacattcgaataattctagaaacacgggcaacttgcaaatcactagaagagaaactaaaagagaaagaatctgctttaaggttagcagaacaaaatatactgtcaagagacaaagtaatcaatgaactgaggcttcgattgcctgccactgcagaaagagaaaagctcatagctgagctaggcagaaaagagatggaaccaaaatctcaccacacattgaaaattgctcatcaaaccattgcaaacatgcaagcaaggttaaatcaaaaagaagaagtattaaagaagtatcaacgtcttctagaaaaagccagagaggagcaaagagaaattgtgaagaaacatgaggaagaccttcatattcttcatcacagattagaactacaggctgatagttcactaaataaattcaaacaaacggcttgggatttaatgaaacagtctcccactccagttcctaccaacaagcattttattcgtctggctgagatggaacagacagtagcagaacaagatgactctctttcctcactcttggtcaaactaaagaaagtatcacaagatttggagagacaaagagaaatcactgaattaaaagtaaaagaatttgaaaatatcaaattacagcttcaagaaaaccatgaagatgaagtgaaaaaagtaaaagcggaagtagaggatttaaagtatcttctggaccagtcacaaaaggagtcacagtgtttaaaatctgaacttcaggctcaaaaagaagcaaattcaagagctccaacaactacaatgagaaatctagtagaacggctaaagagccaattagccttgaaggagaaacaacagaaagcacttagtcgggcacttttagaactccgggcagaaatgacagcagctgctgaagaacgtattatttctgcaacttctcaaaaagaggcccatctcaatgttcaacaaatcgttgatcgacatactagagagctaaagacacaagttgaagatttaaatgaaaatcttttaaaattgaaagaagcacttaaaacaagtaaaaacagagaaaactcactaactgataatttgaatgacttaaataatgaactgcaaaagaaacaaaaagcctataataaaatacttagagagaaagaggaaattgatcaagagaatgatgaactgaaaaggcaaattaaaagactaaccagtggattacagggcaaacccctgacagataataaacaaagtctaattgaagaactccaaaggaaagttaaaaaactagagaaccaattagagggaaaggtggaggaagtagacctaaaacctatgaaagaaaagaatgctaaagaagaattaattaggtgggaagaaggtaaaaagtggcaagccaaaatagaaggaattcgaaacaagttaaaagagaaagagggggaagtctttactttaacaaagcagttgaatactttgaaggatctttttgccaaagccgataaagagaaacttactttgcagaggaaactaaaaacaactggcatgactgttgatcaggttttgggaatacgagctttggagtcagaaaaagaattggaagaattaaaaaagagaaatcttgacttagaaaatgatatattgtatatgagggcccaccaagctcttcctcgagattctgttgtagaagatttacatttacaaaatagatacctccaagaaaaacttcatgctttagaaaaacagttttcaaaggatacatattctaagccttcaatttcaggaatagagtcagatgatcattgtcagagagaacaggagcttcagaaggaaaacttgaagttgtcatctgaaaatattgaactgaaatttcagcttgaacaagcaaataaagatttgccaagattaaagaatcaagtcagagatttgaaggaaatgtgtgaatttcttaagaaagaaaaagcagaagttcagcggaaacttggccatgttagagggtctggtagaagtggaaagacaatcccagaactggaaaaaaccattggtttaatgaaaaaagtagttgaaaaagtccagagagaaaatgaacagttgaaaaaagcatcaggaatattgactagtgaaaaaatggctaatattgagcaggaaaatgaaaaattgaaggctgaattagaaaaacttaaagctcatcttgggcatcagttgagcatgcactatgaatccaagaccaaaggcacagaaaaaattattgctgaaaatgaaaggcttcgtaaagaacttaaaaaagaaactgatgctgcagagaaattacggatagcaaagaataatttagagatattaaatgagaagatgacagttcaactagaagagactggtaagagattgcagtttgcagaaagcagaggtccacagcttgaaggtgctgacagtaagagctggaaatccattgtggttacaagaatgtatgaaaccaagttaaaagaattggaaactgatattgccaaaaaaaatcaaagcattactgaccttaaacagcttgtaaaagaagcaacagagagagaacaaaaagttaacaaatacaatgaagaccttgaacaacagattaagattcttaaacatgttcctgaaggtgctgagacagagcaaggccttaaacgggagcttcaagttcttagattagctaatcatcagctggataaagagaaagcagaattaatccatcagatagaagctaacaaggaccaaagtggagctgaaagcaccatacctgatgctgatcaactaaaggaaaaaataaaagatctagagacacagctcaaaatgtcagatctagaaaagcagcatttgaaggaggaaataaagaagctgaaaaaagaactggaaaattttgatccttcattttttgaagaaattgaagatcttaagtataattacaaggaagaagtgaagaagaatattctcttagaagagaaggtaaaaaaactttcagaacaattgggagttgaattaactagccctgttgctgcttctgaagagtttgaagatgaagaagaaagtcctgttaatttccccatttactaa

SEQ ID NO: 334843 - protein, 804 aa, Artificial Sequence
  derived and/or modified sequence
MPPNINWKEIMKVDPDDLPRQEELADNLLISLSKVEVNELKSEKQENVIHLFRITQSLMKMKAQEVELALEEVEKAGEEQAKFENQLKTKVMKLENELEMAQQSAGGRDTRFLRNEICQLEKQLEQKDRELEDMEKELEKEKKVNEQLALRNEEAENENSKLRRENKRLKKKNEQLCQDIIDYQKQIDSQKETLLSRRGEDSDYRSQLSKKNYELIQYLDEIQTLTEANEKIEVQNQEMRKNLEESVQEMEKMTDEYNRMKAIVHQTDNVIDQLKKENDHYQLQVQELTDLLKSKNEEDDPIMVAVNAKVEEWKLILSSKDDEIIEYQQMLHNLREKLKNAQLDADKSNVMALQQGIQERDSQIKMLTEQVEQYTKEMEKNTCIIEDLKNELQRNKGASTLSQQTHMKIQSTLDILKEKTKEAERTAELAEADAREKDKELVEALKRLKDYESGVYGLEDAVVEIKNCKNQIKIRDREIEILTKEINKLELKISDFLDENEALRERVGLEPKTMIDLTEFRNSKHLKQQQYRAENQILLKEIESLEEERLDLKKKIRQMAQERGKRSATSGLTTEDLNLTENISQGDRISERKLDLLSLKNMSEAQSKNEFLSRELIEKERDLERSRTVIAKFQNKLKELVEENKQLEEGMKEILQAIKEMQKDPDVKGGETSLIIPSLERLVNAIESKNAEGIFDASLHLKAQVDQLTGRNEELRQELRESRKEAINYSQQLAKANLKIDHLEKETSLLRQSEGSNVVFKGIDLPDGIAPSSASIINSQNEYLIHLLQELENKEKVKEFRRFS

SEQ ID NO: 334844 - protein, 549 aa, Artificial Sequence
  derived and/or modified sequence
KMAQQSAGGRDTRFLRNEICQLEKQLEQKDRELEDMEKELEKEKKVNEQLALRNEEAENENSKLRRENKRLKKKNEQLCQDIIDYQKQIDSQKETLLSRRGEDSDYRSQLSKKNYELIQYLDEIQTLTEANEKIEVQNQEMRKNLEESVQEMEKMTDEYNRMKAIVHQTDNVIDQLKKENDHYQLQVQELTDLLKSKNEEDDPIMVAVNAKVEEWKLILSSKDDEIIEYQQMLHNLREKLKNAQLDADKSNVMALQQGIQERDSQIKMLTEQVEQYTKEMEKNTCIIEDLKNELQRNKGASTLSQQTHMKIQSTLDILKEKTKEAERTAELAEADAREKDKELVEALKRLKDYESGVYGLEDAVVEIKNCKNQIKIRDREIEILTKEINKLELKISDFLDENEALRERVGLEPKTMIDLTEFRNSKHLKQQQYRAENQILLKEIESLEEERLDLKKKIRQMAQERGKRSATSGLTTEDLNLTENISQGDRISERKLDLLSLKNMSEAQSKNEFLSRELIEKERDLERSRTVIAKFQNKCYRIKECRRNL

SEQ ID NO: 334845 - DNA, 2415 bp, Artificial Sequence
  derived and/or modified sequence
atgccacccaatattaactggaaggagattatgaaagtggaccctgatgatctgccgcggcaagaagagctggccgacaatctgctcatttctctgtcaaaggtcgaggttaatgagttgaagtccgaaaagcaggaaaacgtcattcacctgttcaggatcacacagtcactgatgaaaatgaaggcccaggaagtggagctcgctctggaagaagtggagaaagctggcgaagaacaggcgaagtttgagaatcagttaaagaccaaagtcatgaagctcgaaaatgaattggaaatggcgcagcagtcagccgggggtagagacacaagattcctgcgcaatgagatctgccagctggagaagcagcttgagcagaaagatagggagttagaggacatggaaaaagagctcgaaaaagagaagaaagtcaacgagcagctggcactcagaaatgaggaggccgaaaatgaaaacagtaaacttagaagggagaacaagcgtttaaaaaaaaaaaatgagcagctctgtcaggatatcattgactaccagaaacagatcgacagtcagaaggagaccctgttgtcccgacgtggtgaggatagcgattaccggtcacagcttagcaagaaaaattacgagctgatccagtacctggacgaaattcagacccttacagaggcgaacgaaaagatagaggtccagaatcaggaaatgcggaagaatctggaagagagcgtgcaggaaatggaaaagatgacagacgaatacaatcggatgaaagctattgtacaccagactgacaatgtaattgaccaacttaaaaaggagaacgatcattatcagttacaggttcaggaattgaccgatcttctcaagtccaagaatgaggaagacgatccaatcatggtcgcagtaaatgcgaaggtggaagagtggaaattaatactgtccagcaaagacgacgaaattatcgaataccagcagatgctccataacctccgggagaagctaaagaatgctcagctggacgctgacaaaagcaacgtaatggcactacaacagggaatccaggagagggactcccagatcaaaatgctcaccgaacaggtggagcagtatactaaagagatggaaaaaaacacttgcattattgaggatctcaagaacgaactgcagaggaacaagggggctagcaccctctctcagcagacccatatgaaaatccaatcgacattagacattctgaaggaaaaaactaaagaggcagaacgcacagcagagttagcagaggccgatgcgagggaaaaggataaggagctggtcgaggcgttaaagcgcctgaaggattacgagtctggggtgtacgggctggaagatgcagtcgtcgaaataaagaattgtaagaatcaaatcaaaatacgggatcgagagattgaaattctgaccaaggagatcaataagttggaactcaaaatttccgacttcctggatgagaacgaggctctcagggagcgcgttggactggaacctaagaccatgatcgacctcactgagttcaggaatagtaagcatctgaaacagcagcagtaccgcgcagagaaccaaatactcttaaaggagatcgagtctctcgaggaagagagattggatctcaaaaagaaaatcagacaaatggcacaagaaaggggcaaaaggtcagccacgtccggtttgactaccgaggatttgaatttaactgaaaacatttctcagggagaccgcatctcagaaagaaagctggatctcctgtctttaaaaaatatgtctgaagcccagagcaagaacgagttcttaagtagggagctgattgaaaaggagcgggacttggagcgcagcagaacggtcattgccaagtttcaaaacaaattaaaagagcttgtcgaggaaaataaacagctcgaggagggaatgaaagagatcctccaggccattaaggagatgcagaaggatcccgatgtgaagggaggtgagaccagcctgataatacccagccttgagcgactagtgaacgcaatcgagagtaaaaacgcagagggtatctttgatgcgtctctacatttgaaagcccaggtagaccagttgaccggacgcaatgaggaactccgccaagaacttagggagagcaggaaggaagctattaactatagccagcagctcgccaaagccaatttaaagatcgatcacctagagaaagagacctccctactccgacagtccgaaggaagcaatgtggtgttcaaaggtatcgatctgccggatggcattgccccttcttccgctagcataattaatagccagaacgaatacctcatccacttgctgcaggaactcgaaaataaggagaaggtgaaggagttcaggaggttctcctag

SEQ ID NO: 334846 - DNA, 2415 bp, Artificial Sequence
  derived and/or modified sequence
atgccacccaacatcaactggaaggagatcatgaaggtggaccctgatgacctgccccggcaggaggagctggccgacaacctgctgatcagcctgagcaaggtggaggtgaatgagctgaagtctgagaagcaggagaatgtcatccacctgttccgcatcacccagagcctgatgaagatgaaggcccaggaggtggagctggccctggaggaggtggagaaggccggggaggagcaggccaagtttgagaaccagctgaagaccaaggtgatgaagctggagaatgagctggagatggcccagcagagcgctgggggccgggacacccgcttcctgagaaatgagatctgccagctggagaagcagctggagcagaaggaccgggagctggaggacatggagaaggagctggagaaggagaagaaggtgaatgagcagctggccctgagaaatgaggaggccgagaatgaaaacagcaagctgcggcgggagaacaagaggctgaagaagaagaatgagcagctgtgccaggacatcatcgactaccagaagcagattgacagccagaaggagaccctgctgagcagaagaggagaggacagcgactaccgcagccagctgagcaagaagaactatgagctgatccagtacctggatgagatccagaccctgacagaggccaatgagaagattgaggtgcagaaccaggagatgaggaagaacctggaggagagcgtgcaggagatggagaagatgacagatgagtacaacaggatgaaggccatcgtgcaccagacagacaacgtgattgaccagctgaagaaggaaaatgaccactaccagctgcaggtgcaggagctgacagacctgctgaagagcaagaatgaggaggatgaccccatcatggtggccgtgaatgccaaggtggaggagtggaagctgatcctgagcagcaaggatgatgagatcatcgagtaccagcagatgctgcacaacctgcgggagaagctgaagaatgcccagctggatgctgacaagagcaatgtgatggccctgcagcagggcatccaggagcgggacagccagatcaagatgctgacagagcaggtggagcagtacaccaaggagatggagaagaacacctgcatcatcgaggacctgaagaatgagctgcagaggaacaagggggccagcaccctgagccagcagacccacatgaagatccagagcaccctggacatcctgaaggagaagaccaaggaggccgagaggacagctgagctggccgaggctgatgcccgggagaaggacaaggagctggtggaggccctgaagaggctgaaggactatgaaagtggagtgtatggcctggaggatgctgtggtggagatcaagaactgcaagaaccagatcaagatccgggaccgggagattgagatcctgaccaaggagatcaacaagctggagctgaagatcagtgacttcctggatgaaaatgaggccctgcgggagcgggtgggcctggagcccaagaccatgattgacctgacagagttcaggaacagcaagcacctgaagcagcagcagtacagagctgagaaccagatcctgctgaaggagattgagagcctggaggaggagcggctggacctgaagaagaagatccggcagatggcccaggagcggggcaagaggtctgccaccagcggcctgaccacagaggacctgaacctgacagagaacatcagccagggcgaccgcatcagcgagaggaagctggacctgctgagcctgaagaacatgtctgaggcccagagcaagaatgagttcctgagccgggagctgattgagaaggagcgggacctggagaggagcaggacagtcatcgccaagttccagaacaagctgaaggagctggtggaggagaacaagcagctggaggagggcatgaaggagatcctgcaggccatcaaggagatgcagaaggaccctgatgtgaagggcggggagaccagcctcatcatccccagcctggagcggctggtgaatgccatcgagagcaagaatgctgagggcatctttgatgccagcctgcacctgaaggcccaggtggaccagctgactggaagaaatgaggagctgcggcaggagctgcgggagagcaggaaggaggccatcaactacagccagcagctggccaaggccaacctgaagattgaccacctggagaaggagaccagcctgctgcggcagagcgagggcagcaatgtggtgttcaagggcatcgacctgcctgatggcatcgcccccagcagcgccagcatcatcaacagccagaatgagtacctgatccacctgctgcaggagctggagaacaaggagaaggtgaaggagttccgccgcttctcctag

SEQ ID NO: 334847 - DNA, 2415 bp, Artificial Sequence
  derived and/or modified sequence
atgccccccaacatcaactggaaggagatcatgaaggtggaccccgacgacctcccgcgccaggaagagctggcagataatcttctcatctcgctttccaaagttgaggtgaacgagctcaaaagcgaaaagcaggaaaatgtgattcacctgtttcggataactcagagcctgatgaagatgaaagctcaggaggtggagctggccttggaggaagtggagaaagccggcgaggaacaggctaaatttgagaaccagttgaaaacgaaggtcatgaaactggagaatgaactagaaatggcccagcagagcgcgggtggtcgcgatacccgattcctccggaacgaaatttgtcaactggagaaacagcttgaacagaaagatcgggagctcgaggatatggaaaaagaactagagaaggaaaagaaagtgaatgaacaactggcacttcgcaatgaggaagctgagaatgagaactcaaaactgcgcagggaaaataaacgactgaaaaagaaaaacgagcagctctgtcaagacattattgactaccagaagcagatcgattctcagaaggagaccttgctgagccgccgaggagaggattctgactatcgtagtcagctgagcaagaaaaactacgaactgatccagtacctggacgaaattcagacactcacagaggccaacgaaaaaatcgaagttcagaaccaggagatgcggaagaacctggaagagtctgtgcaggagatggaaaaaatgaccgacgaatacaaccgcatgaaggctatagtgcatcagaccgacaacgtaatcgatcagctgaagaaggaaaatgaccattatcagctgcaggttcaggaactgacagacctactgaaatctaaaaacgaggaagatgatcctatcatggtggccgtgaatgctaaagtggaagaatggaaattgatactgtctagtaaagatgacgaaattattgaataccaacagatgctccataatctcagggagaagctcaaaaatgcacagctggacgcagataagagcaatgtgatggctttgcagcagggtatccaggaaagggactctcagatcaaaatgctgacggagcaagttgagcagtacaccaaggagatggagaagaatacatgcatcatagaagacctgaaaaacgagttgcagaggaacaaaggcgcctccacgctgtcccagcagactcatatgaaaatccagtccaccctagatatcctgaaggagaagacgaaagaggctgagcgcactgccgaactagctgaggctgatgcccgcgaaaaggacaaggaactggtggaagctctgaagaggctgaaggactacgagtccggagtgtacgggttagaagatgccgtcgtggagatcaagaactgtaagaaccagataaagattcgcgaccgagaaattgagatactgactaaggaaattaataagctggaactcaagatttcagactttctggacgagaatgaggccctgcgcgaaagagtaggccttgaaccaaagaccatgattgatctgaccgaatttcgcaatagtaagcaccttaaacagcagcaataccgggcggagaaccagatcctgttgaaagagattgaaagcctggaggaagaaaggctcgatctgaagaagaaaattcgacagatggcccaggagcgcggtaaaagatccgccacaagtgggttgaccacggaagatcttaacttgaccgagaacatcagccagggggaccgtatttcggagcggaaactggacctgctgtctctgaagaatatgagtgaagctcagtcaaagaacgagttcctttccagagagctcattgaaaaagaacgagacttggaaaggtccaggactgttattgcaaagtttcagaacaagctcaaggaattagtcgaggaaaataagcagctcgaagaggggatgaaagagattctgcaggccataaaagagatgcagaaggaccccgatgtcaagggtggcgagacttcgcttatcattccctccctcgaaagactggtgaacgccatcgaaagcaagaacgcagaggggatttttgatgcatccctgcacctgaaggctcaagtggaccagctcactggccgaaacgaggagttgcgtcaagaactaagggagagtcgcaaggaggccatcaattactcacagcagttagccaaggcaaacctcaaaatcgaccatctcgaaaaggagacttctttactcagacagagtgagggctccaatgtcgtattcaaagggatcgatttgcccgacggcatagctcccagctccgcgtctatcatcaatagccaaaatgagtacctgatccacctgctgcaggagctagaaaataaggaaaaagtgaaggagtttagaagatttagctag

SEQ ID NO: 334848 - DNA, 2415 bp, Artificial Sequence
  derived and/or modified sequence
atgcctcccaatataaactggaaagagatcatgaaagtggaccctgacgaccttcccaggcaagaagagttggccgacaatctgcttatttccctctccaaggttgaggtgaatgaactcaagtccgagaagcaagaaaacgtgattcacctcttccgcattactcaaagcctgatgaaaatgaaggcacaggaagtggaattggcgctggaggaagttgagaaagcgggtgaagagcaggctaaatttgaaaatcagctgaagacaaaggttatgaaactggaaaatgagctggaaatggctcaacagagcgcaggcggacgagacaccagatttctccgcaacgaaatctgccagcttgagaagcagctagaacagaaggaccgggaactggaagatatggaaaaagaactcgaaaaagaaaaaaaagttaacgaacagctggctctcagaaacgaagaggccgaaaatgagaactccaagcttagaagggaaaataaaaggctgaagaagaagaacgaacagctctgtcaggacattattgattatcagaaacagatcgattctcagaaggaaactttgctctcaagaagaggcgaagatagcgattacaggtcccaactgagcaagaaaaactacgaactgattcagtacttagacgagatccaaacattaacagaggctaacgagaagatagaggtccagaaccaggagatgagaaaaaacctggaagagtcagtgcaagagatggaaaagatgactgacgagtataacagaatgaaggctatcgtccatcagacagataatgttatcgatcagttgaaaaaggaaaatgaccattatcagttgcaggtgcaagagctcacagacctgctaaaatcgaagaacgaagaagacgatccgatcatggttgctgtcaatgccaaggtggaggagtggaagttgatcctcagctccaaagacgacgaaattattgagtatcaacagatgcttcacaacctgagagaaaaactgaagaatgctcagctcgacgcggataagagtaatgtgatggcactgcagcaaggtatacaggaacgggacagtcagatcaaaatgctcacagagcaggtggagcaatatacgaaagaaatggaaaaaaacacctgtatcatcgaagacttaaaaaacgagctccagcgtaacaaaggagccagtactctctcacaacagactcatatgaagattcagagtaccctcgacattctcaaggagaagacaaaggaggcagagagaaccgccgaactggcagaggctgatgccagagagaaagacaaagagttggttgaagctctgaagagactaaaggactacgaatctggtgtctacggactggaggatgccgtggtagaaattaagaattgtaaaaaccaaattaaaatcagggaccgggagattgaaatcctgactaaggagatcaacaagctagagctgaaaattagcgacttcctggacgagaacgaggccctgagggagcgtgtgggcctagaacccaaaacaatgatcgatctgaccgagtttaggaacagcaaacatctgaaacagcagcaatacagggccgagaatcagatcctcctgaaggagattgaaagtctggaggaggagaggctcgatcttaagaaaaaaattcgacagatggcccaagaacgaggaaaacggtccgcaacaagcggacttacaaccgaagacctcaacctaacagagaacatttcacaaggggacagaatctcagaacggaaactggaccttctctcgctcaaaaacatgtccgaagctcaaagcaagaatgagttcctgagccgtgagctaattgagaaggaacgagatctggaacgcagtcgcacagtaatcgccaaattccagaacaagctgaaagaactcgtagaggaaaataaacagctggaggagggaatgaaagagatcctgcaggctattaaagaaatgcagaaggaccccgatgtaaagggcggagaaacctcacttatcattcctagcctcgaaagattagtgaatgcaatcgagtccaagaacgcagagggaatctttgacgccagcctgcacctcaaagcacaggtggaccagctgacaggccgtaacgaggagctaagacaggaactgagggaatcccgcaaagaggcgataaactattctcagcagctggcgaaagcgaacctgaagattgatcatttggaaaaagaaacctccctgctgaggcaatctgaaggatccaacgtggtatttaagggaatcgacctgcctgatggtattgcgccttcaagcgccagtatcattaactcccagaatgagtatcttattcacctgctgcaggaactggaaaacaaagagaaagtcaaggaattcaggcgcttctcctag

SEQ ID NO: 334849 - DNA, 2826 bp, Artificial Sequence
  derived and/or modified sequence
ggcccgcggccgggtccagcttggtggttgcggtagtgagaggcctccgctggttgccaggcttggtctagaggtggagcacagtgaaagaattcaagatgccacctaatataaactggaaagaaataatgaaagttgacccagatgacctgccccgtcaagaagaactggcagataatttattgatttccttatccaaggtggaagtaaatgagctaaaaagtgaaaagcaagaaaatgtgatacaccttttcagaattactcagtcactaatgaagatgaaagctcaagaagtggagctggctttggaagaagtagaaaaagctggagaagaacaagcaaaatttgaaaatcaattaaaaactaaagtaatgaaactggaaaatgaactggagatggctcagcagtctgcaggtggacgagatactcggtttttacgtaatgaaatttgccaacttgaaaaacaattagaacaaaaagatagagaattggaggacatggaaaaggagttggagaaagagaagaaagttaatgagcaattggctcttcgaaatgaggaggcagaaaatgaaaacagcaaattaagaagagagaacaaacgtctaaagaaaaagaatgaacaactttgtcaggatattattgactaccagaaacaaatagattcacagaaagaaacacttttatcaagaagaggggaagacagtgactaccgatcacagttgtctaaaaaaaactatgagcttatccaatatcttgatgaaattcagactttaacagaagctaatgagaaaattgaagttcagaatcaagaaatgagaaaaaatttagaagagtctgtacaggaaatggagaagatgactgatgaatataatagaatgaaagctattgtgcatcagacagataatgtaatagatcagttaaaaaaagaaaacgatcattatcaacttcaagtgcaggagcttacagatcttctgaaatcaaaaaatgaagaagatgatccaattatggtagctgtcaatgcaaaagtagaagaatggaagctaattttgtcttctaaagatgatgaaattattgagtatcagcaaatgttacataacctaagggagaaacttaagaatgctcagcttgatgctgataaaagtaatgttatggctctacagcagggtatacaggaacgagacagtcaaattaagatgctcaccgaacaagtagaacaatatacaaaagaaatggaaaagaatacttgtattattgaagatttgaaaaatgagctccaaagaaacaaaggtgcttcaaccctttctcaacagactcatatgaaaattcagtcaacgttagacattttaaaagagaaaactaaagaggctgagagaacagctgaactggctgaggctgatgctagggaaaaggataaagaattagttgaggctctgaagaggttaaaagattatgaatcgggagtatatggtttagaagatgctgtcgttgaaataaagaattgtaaaaaccaaattaaaataagagatcgagagattgaaatattaacaaaggaaatcaataaacttgaattgaagatcagtgatttccttgatgaaaatgaggcacttagagagcgtgtgggccttgaaccaaagacaatgattgatttaactgaatttagaaatagcaaacacttaaaacagcagcagtacagagctgaaaaccagattcttttgaaagagattgaaagtctagaggaagaacgacttgatctgaaaaaaaaaattcgtcaaatggctcaagaaagaggaaaaagaagtgcaacttcaggattaaccactgaggacctgaacctaactgaaaacatttctcaaggagatagaataagtgaaagaaaattggatttattgagcctcaaaaatatgagtgaagcacaatcaaagaatgaatttctttcaagagaactaattgaaaaagaaagagatttagaaaggagtaggacagtgatagccaaatttcagaataaattaaaagaattagttgaagaaaataagcaacttgaagaaggtatgaaagaaatattgcaagcaattaaggaaatgcagaaagatcctgatgttaaaggaggagaaacatctctaattatccctagccttgaaagactagttaatgctatagaatcaaagaatgcagaaggaatctttgatgcgagtctgcatttgaaagcccaagttgatcagcttaccggaagaaatgaagaattaagacaggagctcagggaatctcggaaagaggctataaattattcacagcagttggcaaaagctaatttaaagatagaccatcttgaaaaagaaactagtcttttacgacaatcagaaggatcaaatgttgtttttaaaggaattgacttacctgatgggatagcaccatctagtgccagtatcattaattctcagaatgaatatttaatacatttgttacaggaactagaaaataaagaaaaagttaaagaatttagaagattctcttgaagattacaacagaaaatttgctgtaattcgtcatcaacaaagtttgttgtataaagaatacctaagtgaaaaggagacctggaaaacagaatctaaaacaataaaagaggaaaagagaaaacttgaggatcaagtccaacaagatgctataaaagtaaaagaatataataatttgctcaatgctcttcagatggattcggatgaaatgaaaaaaatacttgcagaaaatagtaggaaaattactgttttgcaagtgaatgaaaaatcacttataaggcaatatacaaccttagtagaattggagcgacaactt

SEQ ID NO: 334850 - DNA, 2415 bp, Artificial Sequence
  derived and/or modified sequence
atgccccccaacatcaactggaaggagatcatgaaggtggaccccgacgacctgcccagacaggaggagctggccgacaacctgctgatcagcctgagcaaggtggaggtgaacgagctgaagagcgagaagcaggagaacgtgatccacctgttcagaatcacccagagcctgatgaagatgaaggcccaggaggtggagctggccctggaggaggtggagaaggccggcgaggagcaggccaagttcgagaaccagctgaagaccaaggtgatgaagctggagaacgagctggagatggcccagcagagcgccggcggcagagacaccagattcctgagaaacgagatctgccagctggagaagcagctggagcagaaggacagagagctggaggacatggagaaggagctggagaaggagaagaaggtgaacgagcagctggccctgagaaacgaggaggccgagaacgagaacagcaagctgagaagagagaacaagagactgaagaagaagaacgagcagctgtgccaggacatcatcgactaccagaagcagatcgacagccagaaggagaccctgctgagcagaagaggcgaggacagcgactacagaagccagctgagcaagaagaactacgagctgatccagtacctggacgagatccagaccctgaccgaggccaacgagaagatcgaggtgcagaaccaggagatgagaaagaacctggaggagagcgtgcaggagatggagaagatgaccgacgagtacaacagaatgaaggccatcgtgcaccagaccgacaacgtgatcgaccagctgaagaaggagaacgaccactaccagctgcaggtgcaggagctgaccgacctgctgaagagcaagaacgaggaggacgaccccatcatggtggccgtgaacgccaaggtggaggagtggaagctgatcctgagcagcaaggacgacgagatcatcgagtaccagcagatgctgcacaacctgagagagaagctgaagaacgcccagctggacgccgacaagagcaacgtgatggccctgcagcagggcatccaggagagagacagccagatcaagatgctgaccgagcaggtggagcagtacaccaaggagatggagaagaacacctgcatcatcgaggacctgaagaacgagctgcagagaaacaagggcgccagcaccctgagccagcagacccacatgaagatccagagcaccctggacatcctgaaggagaagaccaaggaggccgagagaaccgccgagctggccgaggccgacgccagagagaaggacaaggagctggtggaggccctgaagagactgaaggactacgagagcggcgtgtacggcctggaggacgccgtggtggagatcaagaactgcaagaaccagatcaagatcagagacagagagatcgagatcctgaccaaggagatcaacaagctggagctgaagatcagcgacttcctggacgagaacgaggccctgagagagagagtgggcctggagcccaagaccatgatcgacctgaccgagttcagaaacagcaagcacctgaagcagcagcagtacagagccgagaaccagatcctgctgaaggagatcgagagcctggaggaggagagactggacctgaagaagaagatcagacagatggcccaggagagaggcaagagaagcgccaccagcggcctgaccaccgaggacctgaacctgaccgagaacatcagccagggcgacagaatcagcgagagaaagctggacctgctgagcctgaagaacatgagcgaggcccagagcaagaacgagttcctgagcagagagctgatcgagaaggagagagacctggagagaagcagaaccgtgatcgccaagttccagaacaagctgaaggagctggtggaggagaacaagcagctggaggagggcatgaaggagatcctgcaggccatcaaggagatgcagaaggaccccgacgtgaagggcggcgagaccagcctgatcatccccagcctggagagactggtgaacgccatcgagagcaagaacgccgagggcatcttcgacgccagcctgcacctgaaggcccaggtggaccagctgaccggcagaaacgaggagctgagacaggagctgagagagagcagaaaggaggccatcaactacagccagcagctggccaaggccaacctgaagatcgaccacctggagaaggagaccagcctgctgagacagagcgagggcagcaacgtggtgttcaagggcatcgacctgcccgacggcatcgcccccagcagcgccagcatcatcaacagccagaacgagtacctgatccacctgctgcaggagctggagaacaaggagaaggtgaaggagttcagaagattcagctag

SEQ ID NO: 334851 - DNA, 1417 bp, Artificial Sequence
  derived and/or modified sequence
tgatgaatttgtgtgtgttgtggctgatgtgcattttggtgctttgtatgcaagtttaagaatatcttagcaataggaaaggaagatttatggcagtttaattaatgaatataatgaaggctaaaacttgtagataaatttataaggtgcttaagagctcttcaatttgttaatggaaagaaacaccatttacaccggatggctacaaagcaaccttattctgagagagaggatctcattctgtcacccaggctggagtgcatgatcatagctcactgcagcctcgacctcctgggctcaagtgatcctcctgctccagcctctcaagtagctaggactacagatcttttctcagaatagcagtctgtaggctgtcacctaaagtgtcctgttttcagtgctgcacctgctctgagcttcatctttttacgaagacgtcatggtgtgctatctgtactgggaaactttccccagcatcagccatctcctgaagataacattgtctgctagagattgtcatgtatgtggattgaatctctttatcttcatggatccagttgaaaatcaggcattgcatccagttatcatggctttaatcttaatgccttccctgcactgttttgggaatatcttaatactgctatttttgaagagtccagctcagttattctgcagaatgtctgttgatttggctttgctgtttcctcataagtagatccagattatacgtttttgttgatgttgggttcttctcagtgaatcacatccgatgatgtcagcacgaggcctgatcatttggtttaggtagctttcactagactttttcattgtaaaggtacctatcccttttctaattaataagtaatatgttgggtgatagtttgtgtgtgaatatccttttctccagtgacctttcatccaatggtttcagcattttaaatgatcctgggctgagtcagttttcagtggtggctgcagacttgtggttttccaattctttcatcacttttacatttattaattggcagtctatgacttcttatagccacataaagataattcaggaattatctgaacctatgaatgttaccttatttggaaaaagagtctttgcagatacaattcaattaagaatcttgagatgaggagattatcctggattatccaatgggccctaaatccaatgacaaatgtccttggcagagggagatttgagacaggagaagagaagacacgaaggagggaaggaagtgatgtgaccacagaggcagcgattggagtgatgtagtcacaagccaaggagcaccaacagccaccaggagctggaagagcccaagagtatatactaatacctggatttgggacttgggacttctggtctctagaagtaggaaagaataaacatctgttttttgtt

SEQ ID NO: 334852 - DNA, 441 bp, Artificial Sequence
  derived and/or modified sequence
atggactcccaaaagcttgccggagaagataaggactcggagccagccgccgacggacccgcagcttccgaggacccatctgcaaccgaaagtgatctgccaaatccccacgtgggggaggtgagcgtactgtcttccgggagccctaggctgcaggagactcctcaagactgttcgggtgggcctgtgcgccggtgtgctctttgtaattgcggtgagcctagcctgcatggccaaagggaacttagacggtttgaactgccatttgattggcctcgatgccctgtggtgtccccagggggctcccccgggcctaatgaggctgtgcttccttccgaagacctcagtcagataggctttcctgaggggctgacccccgcccacttgggagagcctggaggatcctgttgggctcaccactggtgcgcagcctggtcttag

SEQ ID NO: 334853 - DNA, 441 bp, Artificial Sequence
  derived and/or modified sequence
atggacagccagaagctggccggggaggacaaggacagcgagcctgctgctgatggccctgctgccagcgaggaccccagcgccacagaaagtgacctgcccaacccccacgtgggggaggtgtctgtgctgagcagcggcagcccccggctgcaggagaccccccaggactgcagcggcggccctgtgcggcgctgtgccctgtgcaactgtggggagcccagcctgcacggccagcgggagctgcggagatttgagctgccctttgactggccccgctgccctgtggtgtccccaggcggcagccctggccccaatgaggccgtgctgcccagcgaggacctgagccagatcggcttccctgagggcctgaccccagcccacctgggggagcccggcggcagctgctgggcccaccactggtgtgccgcctggagctag

SEQ ID NO: 334854 - DNA, 636 bp, Artificial Sequence
  derived and/or modified sequence
ggggggagggtggccactccgacctggatttaccgttcttggcccccctaagcccccccgtgcggggggcggctgtgatcgctctggcggttggaggtcggggagcggcccgggctctggccatgttctcggatgaggatttctggatcgccctgtgaagaggtctccccgagagggccctgcccagtcggagagagggatggacagccagaagctggctggtgaggataaagattcagaaccggcagctgatggacctgcagcttctgaggacccaagtgccactgagtcagacctgcccaacccacatgtgggagaggtctctgtccttagttctgggagtcccaggcttcaggagactcctcaggactgcagtgggggtccggtgcggcgttgtgctctctgtaactgcggggagcccagtctacacgggcagcgggagctacggcgctttgagttgccatttgattggccccggtgtccagtggtgtcccctggggggagcccagggcccaatgaggcagtgctgcccagtgaggacctatcacagattggtttccctgagggccttacacctgcccacctaggagaacctggagggtcctgctgggctcaccattggtgtgctgcatggtc

SEQ ID NO: 334855 - DNA, 441 bp, Artificial Sequence
  derived and/or modified sequence
atggacagccagaagctggccggcgaggacaaggacagcgagcccgctgcagatgggccagcggccagcgaggatccatcggccacagaatcggacctccctaacccacatgtcggggaggtttccgtccttagcagcggcagccctaggctgcaagaaacaccacaggactgttcgggcgggcccgtgagaagatgtgctttatgcaactgtggcgagccaagccttcatggccagagagaactgcggcgctttgagttgcctttcgactggccacgctgtccagttgtctcacctggcgggtctcctggaccaaatgaagctgtgctgccctccgaagatctctcccagatcgggttcccagaggggctgactccggcccatctaggcgaaccagggggatcttgctgggcccaccactggtgcgcagcctggagctag

SEQ ID NO: 334856 - DNA, 441 bp, Artificial Sequence
  derived and/or modified sequence
atggatagccagaagctggccggtgaggataaggattccgaaccagctgctgacggaccggcagcctccgaagaccctagcgcaactgagtctgacctgcctaacccgcatgtgggggaagtttcagtcttgtctagtggatctcctagactgcaggaaacgccccaagactgtagcggaggacccgtgcggaggtgtgcactatgtaactgcggcgagccgtcactgcatggccagcgggagctccggagattcgagctgccattcgactggccacgttgcccagttgtgtcaccgggaggaagtcctggtcccaatgaggctgttctgccctctgaggatctttcccagattgggtttcccgagggcctgacacctgctcacctgggggaaccgggtggttcttgctgggcccaccactggtgtgctgcatggtcctag

SEQ ID NO: 334857 - DNA, 441 bp, Artificial Sequence
  derived and/or modified sequence
atggacagccagaagctggccggcgaggacaaggacagcgagcccgccgccgacggccccgccgccagcgaggaccccagcgccaccgagagcgacctgcccaacccccacgtgggcgaggtgagcgtgctgagcagcggcagccccagactgcaggagaccccccaggactgcagcggcggccccgtgagaagatgcgccctgtgcaactgcggcgagcccagcctgcacggccagagagagctgagaagattcgagctgcccttcgactggcccagatgccccgtggtgagccccggcggcagccccggccccaacgaggccgtgctgcccagcgaggacctgagccagatcggcttccccgagggcctgacccccgcccacctgggcgagcccggcggcagctgctgggcccaccactggtgcgccgcctggagctag

SEQ ID NO: 334858 - DNA, 533 bp, Artificial Sequence
  derived and/or modified sequence
  misc_feature (31)..(31): n is a, c, g, or t
  misc_feature (95)..(95): n is a, c, g, or t
  misc_feature (256)..(256): n is a, c, g, or t
  misc_feature (346)..(346): n is a, c, g, or t
  misc_feature (374)..(374): n is a, c, g, or t
  misc_feature (392)..(392): n is a, c, g, or t
  misc_feature (435)..(435): n is a, c, g, or t
  misc_feature (455)..(455): n is a, c, g, or t
  misc_feature (513)..(513): n is a, c, g, or t
  misc_feature (515)..(515): n is a, c, g, or t
  misc_feature (520)..(520): n is a, c, g, or t
agtagatatacattgcataggcagcaacagnaatattctggtggggctggatccctggctggcccttcagggggcttcttccctggcaaccttgntcttcgaagcctcggacctgattcaaggtttttacaggaaaggcagctgcagctgcagcagcaacgtatgcagctggcccagaaactgcagcagcagcagcagcagcaacagcagcagcagcaccttctaggacaggtggcaatccagcagcaacagcagnagggtcctggagtacagacaaaccaagttctgggtcccaagccccagggtcttatgcctcccagcagccaccaaggtctcctggtccagnaggtgtcccctcaacccaccccaggggncccagggtatgcttgggncctgccccaggttggcttgttgttgcagcagcagcaccctggngctttggggccccccagggncctcacaggacaggtgttttatgacccagtcccgggtggtcaagttcccccctaggtngnacagnagggtcaagggcc

SEQ ID NO: 334859 - DNA, 204 bp, Artificial Sequence
  derived and/or modified sequence
atgttccacctgtgcaagctgaaccccagctacctgaagatcacctgtgggaagaggagcaagcagatcacccccacctactaccccagccggctgccccctgtgaagaggaagttctctgtgtatgatgccaagctgaccatcgtgcacctgagcaccttcagcattgaggacttccccctgtacctgtccatggccggctag

SEQ ID NO: 334860 - DNA, 219 bp, Artificial Sequence
  derived and/or modified sequence
atgtcttaccagcagcagcagtgcaaacagccctgtcagcccccccccgtgtgtcccacccccaagtgcccagaaccctgtcccccgccaaagtgtcccgagccctgcccccctccaaagtgtccccaaccatgccccccgcaacagtgccagcagaagtatcccccggtgacccctagtcccccgtgccagccgaagtatcccccaaagagtaagtag

SEQ ID NO: 334861 - DNA, 489 bp, Artificial Sequence
  derived and/or modified sequence
atgaacagcaacgccagcgagcacaccggcatgctgcggacctgctggtcacactctcactgggatcctttttctagcgggagcgtgacagctatgtgggcaacccactctcctacttcaaaagcgtgggccggtattcagggaagaggaagatgggctctcggtttcccctggcggggtcaaggggttctccacgtcatcgcttcccagaaagcagctgtgacggaggccgttgatctgcgtacgggcgcggcctcacaggcaatgtccgaggcctttgttaggtcagggatgttctatctgcgtccagcattcgtccttctgtgctacaagtgggggaagctgaggcacagtgaggtgtccaatctcctaggagtggcctggccagtttctgaagaagcatgtatgggcacttgggggtccctggcagtcgccgtgaccttaccagcccaggggctgggtacctgggggcgcgatgagggtgagtag

SEQ ID NO: 334862 - protein, 514 aa, Artificial Sequence
  derived and/or modified sequence
MGKDFRYYFQHPWSRMIVAYLVIFFNFLIFAEDPVSHSQTEANVIVVGNCFSFVTNKYPRGVGWRILKVLLWLLAILTGLIAGKFLFHQRLFGQLLRLKMFREDHGSWMTMFFSTILFLFIFSHIYNTILLMDGNMGAYIITDYMGIRNESFMKLAAVGTWMGDFVTAWMVTDMMLQDKPYPDWGKSARAFWKKGNVRITLFWTVLFTLTSVVVLVITTDWISWDKLNRGFLPSDEVSRAFLASFILVFDLLIVMQDWEFPHFMGDVDVNLPGLHTPHMQFKIPFFQKIFKEEYRIHITGKWFNYGIIFLVLILDLNMWKNQIFYKPHEYGQYIGPGQKIYTVKDSESLKDLNRTKLSWEWRSNHTNPRTNKTYVEGDMFLHSRFIGASLDVKCLAFVPSLIAFVWFGFFIWFFGRFLKNEPRMENQDKTYTRMKRKSPSEHSKDMGITRENTQASVEDPLNDPSLVCIRSDFNEIVYKSSHLTSENLSSQLNESTSATEADQDPTTSKSTPTN

SEQ ID NO: 334863 - protein, 262 aa, Artificial Sequence
  derived and/or modified sequence
MYIKDWEFPHFMGDVDVNLPGLHTPHMQFKIPFFQKIFKEEYRIHITGKWFNYGIIFLVLILDLNMWKNQIFYKPHEYGQYIGPGQKIYTVKDSESLKDLNRTKLSWEWRSNHTNPRTNKTYVEGDMFLHSRFIGASLDVKCLAFVPSLIAFVWFGFFIWFFGRFLKNEPRMENQDKTYTRMKRKSPSEHSKDMGITRENTQASVEDPLNDPSLVCIRSDFNEIVYKSSHLTSENLSSQLNESTSATEADQDPTTSKSTPTN

SEQ ID NO: 334864 - DNA, 1545 bp, Artificial Sequence
  derived and/or modified sequence
atgggcaaggacttcagatactacttccagcacccctggagcagaatgatcgtggcctacctggtgatcttcttcaacttcctgatcttcgccgaggaccccgtgagccacagccagaccgaggccaacgtgatcgtggtgggcaactgcttcagcttcgtgaccaacaagtaccccagaggcgtgggctggagaatcctgaaggtgctgctgtggctgctggccatcctgaccggcctgatcgccggcaagttcctgttccaccagagactgttcggccagctgctgagactgaagatgttcagagaggaccacggcagctggatgaccatgttcttcagcaccatcctgttcctgttcatcttcagccacatctacaacaccatcctgctgatggacggcaacatgggcgcctacatcatcaccgactacatgggcatcagaaacgagagcttcatgaagctggccgccgtgggcacctggatgggcgacttcgtgaccgcctggatggtgaccgacatgatgctgcaggacaagccctaccccgactggggcaagagcgccagagccttctggaagaagggcaacgtgagaatcaccctgttctggaccgtgctgttcaccctgaccagcgtggtggtgctggtgatcaccaccgactggatcagctgggacaagctgaacagaggcttcctgcccagcgacgaggtgagcagagccttcctggccagcttcatcctggtgttcgacctgctgatcgtgatgcaggactgggagttcccccacttcatgggcgacgtggacgtgaacctgcccggcctgcacaccccccacatgcagttcaagatccccttcttccagaagatcttcaaggaggagtacagaatccacatcaccggcaagtggttcaactacggcatcatcttcctggtgctgatcctggacctgaacatgtggaagaaccagatcttctacaagccccacgagtacggccagtacatcggccccggccagaagatctacaccgtgaaggacagcgagagcctgaaggacctgaacagaaccaagctgagctgggagtggagaagcaaccacaccaaccccagaaccaacaagacctacgtggagggcgacatgttcctgcacagcagattcatcggcgccagcctggacgtgaagtgcctggccttcgtgcccagcctgatcgccttcgtgtggttcggcttcttcatctggttcttcggcagattcctgaagaacgagcccagaatggagaaccaggacaagacctacaccagaatgaagagaaagagccccagcgagcacagcaaggacatgggcatcaccagagagaacacccaggccagcgtggaggaccccctgaacgaccccagcctggtgtgcatcagaagcgacttcaacgagatcgtgtacaagagcagccacctgaccagcgagaacctgagcagccagctgaacgagagcaccagcgccaccgaggccgaccaggaccccaccaccagcaagagcacccccaccaactag

SEQ ID NO: 334865 - DNA, 1545 bp, Artificial Sequence
  derived and/or modified sequence
atgggcaaggactttaggtactactttcagcatccttggtccagaatgattgtagcctacttagtcatcttcttcaacttcttgatattcgccgaggatcccgtaagccactcccagaccgaggccaatgtaatcgtggtgggcaattgtttcagctttgttaccaataagtacccacggggcgtcggatggcgaatcctcaaagttctgctgtggttacttgctatcttaactgggctcatcgccggcaaattccttttccaccagaggctttttggccagttgctcagattgaaaatgtttagagaagatcacggctcatggatgacaatgtttttctcgacgatcctgttcctgttcatcttttcacacatttacaatacaattcttctcatggatggtaatatgggtgcatatatcatcaccgactacatgggcattcggaatgaatcattcatgaagcttgccgctgttgggacgtggatgggtgacttcgtgaccgcatggatggtaactgacatgatgctacaggacaagccctatcctgactggggtaaatccgcaagagccttctggaaaaagggtaatgtgcggatcactttgttttggaccgtactgtttactctgactagtgttgtcgtcctggtgataactactgactggataagctgggacaagctgaaccgcggcttcctaccttccgatgaggtgtctcgcgccttcctagcttccttcattctggtctttgacctgctgatcgtgatgcaagactgggaatttcctcatttcatgggggacgtggacgtgaacttgcccgggctgcataccccccacatgcaatttaaaattccattcttccagaagatcttcaaagaagaataccgcattcatattaccggaaaatggttcaattacggcatcatcttccttgtgctcatactcgacctcaatatgtggaagaaccagatcttctacaagccacacgagtacggccagtatatcggccctggccagaaaatctacacagttaaagatagtgagtcccttaaagacctcaatagaaccaaactctcatgggagtggaggtccaatcataccaaccccaggacaaacaagacatacgtagaaggcgatatgtttctgcatagtcgattcatcggggctagcctcgatgtgaagtgtttggcctttgtgccatctctgatcgcttttgtatggtttggattcttcatctggtttttcggcaggttcttaaaaaacgagccacggatggagaaccaggataaaacttacactaggatgaagcggaagtcaccatccgaacacagtaaagacatggggattactcgggaaaatacacaggcctctgtggaggacccactgaacgatcccagcttagtgtgcattaggtccgatttcaacgaaattgtgtacaaatccagccacctgaccagcgaaaatttgagcagtcaactcaacgaatcaacgtcggcgacggaggccgaccaggatcccactacatccaagtccactccaactaattag

SEQ ID NO: 334866 - DNA, 1545 bp, Artificial Sequence
  derived and/or modified sequence
atgggcaaggacttccgctactacttccagcacccctggagcaggatgattgtggcctacctggtgatcttcttcaacttcctgatctttgctgaggaccctgtgagccacagccagacagaggccaacgtgattgtggtgggcaactgcttctcctttgtgaccaacaagtacccccggggcgtgggctggaggatcctgaaggtgctgctgtggctgctggccatcctgaccggcctgattgctgggaagttcctgttccaccagaggctgtttggccagctgctgcggctgaagatgttcagagaagatcatggctcctggatgaccatgttcttcagcaccatcctcttcctgttcatcttcagccacatctacaacaccatcctgctgatggatggcaacatgggcgcctacatcatcacagactacatgggcatcagaaatgaaagcttcatgaagctggccgctgtgggcacctggatgggagactttgtgacagcctggatggtgacagacatgatgctgcaggacaagccctacccagactggggcaagagcgcccgggccttctggaagaagggaaatgtgcgcatcaccctcttctggacagtgctcttcaccctgacctctgtggtggtgctggtgatcaccacagactggatctcctgggacaagctgaacagaggcttcctgcccagtgatgaggtgtcccgggccttcctggccagcttcatcctggtgtttgacctgctgattgtgatgcaggactgggagttcccccacttcatgggagatgtggatgtgaacctgcccggcctgcacaccccccacatgcagttcaagatccccttcttccagaagatcttcaaggaggagtaccgcatccacatcaccgggaagtggttcaactacggcatcatcttcctggtgctgatcctggacctgaacatgtggaagaaccagatcttctacaagccccatgaatatggccagtacatcggccctggccagaagatctacacagtgaaggacagcgagagcctgaaggacctgaacagaaccaagctgtcctgggagtggaggagcaaccacaccaaccccaggaccaacaagacctacgtggagggggacatgttcctgcacagccgcttcatcggggccagcctggatgtgaagtgcctggcctttgtgcccagcctcatcgcctttgtgtggtttggcttcttcatctggttcttcggccgcttcctgaagaatgagcccaggatggagaaccaggacaagacctacaccaggatgaagaggaagagccccagcgagcacagcaaggacatgggcatcacccgggagaacacccaggcctctgtggaggaccccctgaatgaccccagcctggtgtgcatccgcagtgacttcaatgagatcgtgtacaagagcagccacctgaccagcgagaacctgagcagccagctgaatgaaagcaccagcgccacagaagctgaccaggaccccaccaccagcaagagcacccccaccaactag

SEQ ID NO: 334867 - DNA, 1545 bp, Artificial Sequence
  derived and/or modified sequence
atgggcaaggacttccggtactacttccagcacccctggagccggatgattgttgcttatctggtgatctttttcaactttctgatatttgctgaagaccctgtgagtcattcgcagacagaagctaatgtcatagttgtcgggaattgtttcagttttgtcacaaacaaatacccaaggggcgtgggatggagaatactcaaagttctcttgtggctgctcgcaatcctcactggtttgattgcaggtaagtttctattccaccagaggctcttcggccagttgctaaggctgaagatgttcagggaggatcacggttcttggatgactatgtttttcagtacaattctctttctatttattttcagccacatatataacacaatcctgctgatggatggcaacatgggtgcctacattattacggattatatgggaattcgaaacgaatctttcatgaagcttgccgcagtgggtacttggatgggtgattttgttacagcgtggatggtgactgatatgatgctgcaggacaaaccctaccccgactggggtaagtccgcccgcgcattttggaagaaggggaacgttaggatcactttgttttggacagtcctgttcacactcacatcagtcgtggtcctcgtcatcactaccgattggatatcttgggataagctgaacagaggtttcctgcctagtgatgaagtgtcccgggcatttctggccagtttcatcctggtgttcgacctccttatcgtgatgcaggactgggaattccctcatttcatgggagatgtcgatgtcaatttgccaggtctgcacacaccccacatgcagttcaagatccctttttttcaaaagattttcaaagaagagtatagaatacatatcaccggtaaatggttcaattatggaatcatttttctggtgctcattctggacctgaacatgtggaagaaccagatcttttacaagccacatgaatacggacagtacatcggtccagggcagaagatctacaccgttaaggatagtgaaagtctgaaggatttaaatagaacaaagctttcatgggagtggaggtcgaatcataccaaccctaggactaacaagacttacgtggagggtgacatgttcttacattctagattcatcggagcatccctggacgtaaagtgcctagcgttcgtgcccagccttatcgcattcgtttggtttggctttttcatctggttttttgggcgcttcctgaagaatgagccgcgcatggagaatcaggataagacatacactagaatgaagcgaaagtcaccatctgagcactcaaaggacatggggattacccgggaaaatacccaggcgtccgttgaagaccccttgaacgaccccagcttagtgtgtatccgctcggattttaacgagattgtatacaagtcatctcatctcacatccgaaaatctctcctctcagcttaacgaatctacctcagctaccgaagctgatcaagatcccactacctctaagtctactcccaccaactag

SEQ ID NO: 334868 - DNA, 1545 bp, Artificial Sequence
  derived and/or modified sequence
atgggtaaggactttaggtactattttcagcacccctggagtaggatgatcgttgcgtatttggttatctttttcaactttctcatatttgctgaagatccagtctcccattctcagaccgaggctaacgtgattgtggtcggtaactgtttttcttttgtcactaataagtaccccaggggagtgggctggcgtatcctgaaggtactgctgtggctgctggccattctcacaggcctcatcgcaggcaagtttttattccatcagagattgttcggtcagctgttacgcctcaagatgttccgggaggaccatggttcctggatgaccatgtttttctcgaccatcctcttcctgttcatcttcagccatatctacaacacaatcctgttgatggacggaaacatgggcgcttatatcatcaccgattacatgggtattcgaaacgagagctttatgaagctggcggctgtcgggacttggatgggcgacttcgtcacggcctggatggtaacggacatgatgctgcaggataagccttatcctgactggggaaagtctgcccgtgccttctggaaaaaagggaatgtgagaatcacgctcttctggaccgtgctatttacgctgacatcagtggtggttctggtgatcactacggattggatctcctgggacaaactgaaccgcggattcttgccctccgatgaggtcagcagagccttcctggcctcattcatcctcgtgttcgatctgcttatagttatgcaggactgggagtttccccatttcatgggtgatgtcgatgtgaacctccctggtctccacactccgcacatgcagttcaagattcccttcttccagaaaattttcaaggaggagtatcgaatccacattacaggcaagtggttcaattacgggattatctttcttgttttaatcctggatctgaatatgtggaagaatcagatattctataaaccacatgaatatgggcagtatattggacccggacagaaaatctacaccgtgaaagacagcgaaagtctcaaggatctcaatcggactaagttgtcttgggaatggcggtccaatcacacaaatccacgcacaaataagacatatgtcgagggagacatgtttctacattccagattcattggggcttccttggatgtgaaatgtctggctttcgtgccttctctgattgcgttcgtgtggtttgggtttttcatctggttcttcggaaggtttttaaaaaatgagcctaggatggagaatcaggataaaacctacactcgtatgaaacggaagtctcccagcgagcattctaaagacatgggtattacgcgggagaacactcaagcctcggtagaagatccacttaatgatcccagcttagtgtgtataagatccgacttcaatgaaattgtatataagtcaagtcatttgacgtctgagaacctctccagtcagctaaatgaatctacgtcagccacagaagccgaccaagacccaaccacatccaaatccacgcctaccaactag

SEQ ID NO: 334869 - DNA, 2758 bp, Artificial Sequence
  derived and/or modified sequence
gtctcgccgcgcttcccagcgaggccgccggcgcgccgagggctgtgctcgaccgcgaatcccgtgtgcagtcgccccgcgccccgcgcgacccttcgggtaaactacgaactgggagttctgaagaatgggtaaagactttcgttactatttccagcatccctggtctcgcatgattgtggcttacttggtgatcttctttaacttcttaatatttgcggaggacccagtttctcatagccaaacagaagccaatgttattgttgttggaaactgtttttcatttgttacaaataaataccctagaggagttggctggaggattttgaaggtgcttctatggctacttgccattctcacaggactaatagctggcaaatttctgttccatcagcgtttgtttggtcagttgctccgattaaaaatgtttcgagaagatcatgggtcgtggatgacaatgttcttcagcacaattctctttctcttcatattttctcacatatacaacacgattcttctaatggatgggaacatgggagcatatatcattacagactatatgggcatccgaaatgaaagtttcatgaaattagctgcagtagggacctggatgggggactttgtcacagcttggatggtcactgatatgatgcttcaggacaaaccctatcctgactggggaaaatcagcaagagctttctggaagaaaggaaatgttaggatcactttattctggacagttctttttactctgacgtctgtggttgtacttgtgattacaacggactggatcagctgggacaagctgaatcggggatttttgcccagtgatgaagtttccagagcattccttgcttcttttatcttggtctttgaccttcttattgtgatgcaggactgggaattcccacatttcatgggagatgttgatgtaaatctccctggtttgcacacccctcacatgcagttcaagattcctttcttccagaaaatcttcaaggaggaatatcgtattcacataacaggcaaatggtttaactatggaattatcttcctcgtcttgattttggatcttaatatgtggaagaaccaaatattttataaacctcatgaatatgggcaatatatcggcccggggcagaagatatatacagtgaaagactcagaaagtttaaaagatttgaacagaaccaagctatcctgggaatggaggtccaatcacactaaccctcggactaataaaacatatgttgagggagacatgttcttacacagcaggttcataggagccagtcttgatgtcaagtgtctggcctttgttccaagcctgatagcctttgtgtggtttggattctttatttggttctttggacgatttttgaaaaatgagccacgcatggagaatcaagacaaaacttacactcgcatgaaaagaaaatctccatcagaacatagcaaagacatgggaatcactcgagaaaacacccaggcttcagtagaagaccccttgaatgacccttctttggtttgcatcaggtctgacttcaatgagatcgtctacaagtcttcccacctaacctcggaaaacttgagctcacagttgaacgaatctactagtgcaacagaagctgatcaagacccaacgacttctaaaagtacacctacgaactagactcggagatagacttggagataacacaaaaagcaaccttgagtgtaactttaaaaatttagtctttccttttgtatatgtaaggtttacgtagtgttaggtaaaaatatgaacaatgccacaacggtgctcaacatgctttttctaggattcattgttttctatttgtattataatacacgtgcctactgtatactcaacagtcctctagagattgcttttcacaattgcacaagctattactgactttacagcatagtggaagattagctgatgacccatgtatctgatgttcaaccatagtggtgccttgagacattaaactgtttttaactgtaccagaaatgaagtgtggaacagttacctaacctatttcacatgggcgttttgtatacaactattttgatctacacttgatgtctgagcagaaaacagaaatagctaaatgtgactcaggaagtatctcttggtttcttattcagcagcagagttggtgactttgacaactggactgcagagaaacatggtgatcaccttttaatttttattggctgtctgccaaatataaatacagatgcaaaattcagtaataggagatccataacccaacatgggtcactactcgtgaaatgtgactttctcccaccagtaattgaaatgaggtgatgatacctaattatgttttcctaattaaagataaattgctacttgattaaaaatcctgcccttcacctttgggaacaaaggttaagagacacagttgggcgaactctcaaatttattggcatttacacaaagtcccagacaaccaaggaactgaagttttcatcatatgagagcagcacatcccaccatttacaatattcgtatatctttctgcaaatatggctctggatagtgaaaattgaaaaacatatgccaaccctgagcaagggaactcctcaaaaaatcatgcagcggaaccttgtcaggtagagaagccgtgcatgaaagaatttgtttaatgtcttgttttgcgtatgtgttttttgtttttgttttttaagaactaaatattgcacattaataaataagaattatacagca

SEQ ID NO: 334870 - protein, 498 aa, Artificial Sequence
  derived and/or modified sequence
MALPTLPSYWCSQQRLNQQLARQREQEARLRQQWEQNSRYFRMSDICSSKQAEWSSKTSYQRSMHAYQREKMKEEKRRSLEARREKLRQLMQEEQDLLARELEELRLSMNLQERRIREQHGKLKSAKEEQRKLIAEQLLYEHWKKNNPKLREMELDLHQKHVVNSWEMQKEEKKQQEATAEQENKRYENEYERARREALERMKAEEERRQLEDKLQAEALLQQMEELKLKEVEATKLKKEQENLLKQRWELERLEEERKQMEAFRQKAELGRFLRHQYNAQLSRRTQQIQEELEADRRILQALLEKEDESQRLHLARREQVMADVAWMKQAIEEQLQLERAREAELQMLLREEAKEMWEKREAEWARERSARDRLMSEVLTGRQQQIQEKIEQNRRAQEESLKHREQLIRNLEEVRELARREKEESEKLKSARKQELEAQVAERRLQAWEADQQEEEEEEEARRVEQLSDALLQQEAETMAEQGYRPKPYGHPKIAWN

SEQ ID NO: 334871 - protein, 174 aa, Artificial Sequence
  derived and/or modified sequence
MALPTLPSYWCSQQRLNQQLARQREQEARLRQQWEQNSRYFRMSDICSSKQAEWSSKTSYQRSMHAYQREKMKEEKRRSLEARREKLRQLMQEEQDLLARELEELRLSMNLQERRIREQHGKLKSAKEEQRKLIAEQLLYEHWKKNNPKLREMELDLHQKHVVNSWEMQKEEKK

SEQ ID NO: 334872 - protein, 220 aa, Artificial Sequence
  derived and/or modified sequence
MALPTLPSYWCSQQRLNQQLARQREQEARLRQQWEQNSRYFRMSDICSSKQAEWSSKTSYQRSMHAYQREKMKEEKRRSLEARREKLRQLMQEEQDLLARELEELRLSMNLQERRIREQHGKLKSAKEEQRKLIAEQLLYEHWKKNNPKLREMELDLHQKHVVNSWEMQKEEKKQQEATAEQENKRYENEYERARREALERMKAEEERRLSRTDGHKRNP

SEQ ID NO: 334873 - DNA, 1497 bp, Artificial Sequence
  derived and/or modified sequence
atggccctgcccaccctgcccagctactggtgcagccagcagagactgaaccagcagctggccagacagagagagcaggaggccagactgagacagcagtgggagcagaacagcagatacttcagaatgagcgacatctgcagcagcaagcaggccgagtggagcagcaagaccagctaccagagaagcatgcacgcctaccagagagagaagatgaaggaggagaagagaagaagcctggaggccagaagagagaagctgagacagctgatgcaggaggagcaggacctgctggccagagagctggaggagctgagactgagcatgaacctgcaggagagaagaatcagagagcagcacggcaagctgaagagcgccaaggaggagcagagaaagctgatcgccgagcagctgctgtacgagcactggaagaagaacaaccccaagctgagagagatggagctggacctgcaccagaagcacgtggtgaacagctgggagatgcagaaggaggagaagaagcagcaggaggccaccgccgagcaggagaacaagagatacgagaacgagtacgagagagccagaagagaggccctggagagaatgaaggccgaggaggagagaagacagctggaggacaagctgcaggccgaggccctgctgcagcagatggaggagctgaagctgaaggaggtggaggccaccaagctgaagaaggagcaggagaacctgctgaagcagagatgggagctggagagactggaggaggagagaaagcagatggaggccttcagacagaaggccgagctgggcagattcctgagacaccagtacaacgcccagctgagcagaagaacccagcagatccaggaggagctggaggccgacagaagaatcctgcaggccctgctggagaaggaggacgagagccagagactgcacctggccagaagagagcaggtgatggccgacgtggcctggatgaagcaggccatcgaggagcagctgcagctggagagagccagagaggccgagctgcagatgctgctgagagaggaggccaaggagatgtgggagaagagagaggccgagtgggccagagagagaagcgccagagacagactgatgagcgaggtgctgaccggcagacagcagcagatccaggagaagatcgagcagaacagaagagcccaggaggagagcctgaagcacagagagcagctgatcagaaacctggaggaggtgagagagctggccagaagagagaaggaggagagcgagaagctgaagagcgccagaaagcaggagctggaggcccaggtggccgagagaagactgcaggcctgggaggccgaccagcaggaggaggaggaggaggaggaggccagaagagtggagcagctgagcgacgccctgctgcagcaggaggccgagaccatggccgagcagggctacagacccaagccctacggccaccccaagatcgcctggaactag

SEQ ID NO: 334874 - DNA, 525 bp, Artificial Sequence
  derived and/or modified sequence
atggccctgcccaccctgcccagctactggtgcagccagcagagactgaaccagcagctggccagacagagagagcaggaggccagactgagacagcagtgggagcagaacagcagatacttcagaatgagcgacatctgcagcagcaagcaggccgagtggagcagcaagaccagctaccagagaagcatgcacgcctaccagagagagaagatgaaggaggagaagagaagaagcctggaggccagaagagagaagctgagacagctgatgcaggaggagcaggacctgctggccagagagctggaggagctgagactgagcatgaacctgcaggagagaagaatcagagagcagcacggcaagctgaagagcgccaaggaggagcagagaaagctgatcgccgagcagctgctgtacgagcactggaagaagaacaaccccaagctgagagagatggagctggacctgcaccagaagcacgtggtgaacagctgggagatgcagaaggaggagaagaagtag

SEQ ID NO: 334875 - DNA, 663 bp, Artificial Sequence
  derived and/or modified sequence
atggccctgcccaccctgcccagctactggtgcagccagcagagactgaaccagcagctggccagacagagagagcaggaggccagactgagacagcagtgggagcagaacagcagatacttcagaatgagcgacatctgcagcagcaagcaggccgagtggagcagcaagaccagctaccagagaagcatgcacgcctaccagagagagaagatgaaggaggagaagagaagaagcctggaggccagaagagagaagctgagacagctgatgcaggaggagcaggacctgctggccagagagctggaggagctgagactgagcatgaacctgcaggagagaagaatcagagagcagcacggcaagctgaagagcgccaaggaggagcagagaaagctgatcgccgagcagctgctgtacgagcactggaagaagaacaaccccaagctgagagagatggagctggacctgcaccagaagcacgtggtgaacagctgggagatgcagaaggaggagaagaagcagcaggaggccaccgccgagcaggagaacaagagatacgagaacgagtacgagagagccagaagagaggccctggagagaatgaaggccgaggaggagagaagactgagcagaaccgacggccacaagagaaacccctag

SEQ ID NO: 334876 - DNA, 1497 bp, Artificial Sequence
  derived and/or modified sequence
atggcactgccaaccctccccagttattggtgctcccagcagcgcctgaatcaacagctggcccggcagcgggagcaggaggcaaggttaaggcagcagtgggaacagaatagtcgttatttcaggatgtctgatatctgctcctcaaaacaggccgagtggtcatcaaagacatcctaccagcgttcaatgcacgcctaccagcgcgaaaagatgaaggaagagaagcgcaggtccctggaggcacgtagggaaaagctcaggcaattaatgcaggaggaacaggatctgctggccagggagttggaggagctccgccttagcatgaacttgcaagagcgaagaatccgcgagcagcacggcaagcttaagagcgcaaaagaagagcagaggaaactgattgcggagcagttactgtacgagcactggaagaaaaataaccccaagctgcgagagatggagctagacttacatcagaagcacgttgttaattcctgggaaatgcagaaagaggagaagaagcagcaggaagcaactgcagagcaggagaacaagcggtatgaaaatgagtacgagcgcgctcgaagggaagcactcgaaagaatgaaagccgaagaggagagacggcagctggaggacaaacttcaggccgaggccctgctccagcagatggaagaactgaagctgaaagaagtggaagcgaccaaactaaaaaaagaacaggagaatctgttaaagcagcggtgggagttggagcgccttgaggaagaaaggaaacagatggaagcttttcggcagaaagccgagctggggcgctttctgcgacaccagtataatgcccagttgtcacggaggacccagcagattcaggaggagctagaggccgataggcgcatcttacaagctctgttagagaaagaggacgaatcccagaggttgcacttagcaaggagagaacaggtcatggccgacgtggcatggatgaagcaggccatcgaagagcagctacaactggaaagggctcgagaagccgagcttcagatgttgctgcgtgaggaggctaaagagatgtgggagaagagggaagcggaatgggcgcgcgagcgcagtgctcgcgaccgcctgatgtctgaagtactcacaggcagacagcaacagatccaagagaaaatcgagcagaacagacgcgcccaggaggagtctctgaagcatcgggagcaactcattaggaatttggaagaagtcagagaactagcgagacgcgaaaaggaagaatctgaaaaattaaaaagcgccagaaagcaagagctcgaagcccaagtggctgagcgaaggttacaggcgtgggaggctgatcagcaggaggaagaggaagaagaagaggcacggcgcgtggaacagctgtccgacgccctgttacagcaagaggcggagaccatggctgaacaaggatatagaccaaaaccctacggccatccaaaaattgcctggaattag

SEQ ID NO: 334877 - DNA, 1497 bp, Artificial Sequence
  derived and/or modified sequence
atggcactgcccactctgccttcctactggtgctcccagcagcgactcaaccagcagctcgctagacaacgggaacaggaggcacgcctgcggcagcagtgggagcagaactcacgctattttagaatgtcggatatatgttcatccaaacaagccgagtggtcctctaagacttcctaccagcgctctatgcacgcatatcaaagagagaaaatgaaggaagaaaaaaggcgttctcttgaagccagaagagagaaactccgccagctcatgcaggaggaacaggacctgttggctagggagctggaggaactcaggctgagtatgaatctccaggaaaggagaatccgcgagcaacacggcaaattgaaatccgctaaagaggaacaaaggaaactgattgccgaacaactgctgtacgagcactggaaaaagaacaaccctaagctgcgggaaatggaactggatctgcatcagaagcacgtggtgaatagttgggagatgcaaaaggaggagaaaaagcagcaggaagcaacagccgagcaggagaacaagcgctacgagaacgagtacgaacgggcaagaagggaagctttagaacggatgaaggcggaagaggagcggcgacagcttgaggataaactgcaagcggaggcgttgctgcagcaaatggaggagctcaaattaaaggaagtggaagctactaagctcaaaaaagaacaagagaatctccttaaacagaggtgggagttggaacggctggaagaggagcgcaagcaaatggaagccttccggcagaaggcagagctgggcaggttcctcagacaccagtacaacgctcagctgtccagacggacacagcaaatccaggaggaactggaagctgatagacgcatcctacaggccctgctggaaaaagaggatgagtctcagaggctgcacctggctcgcagggagcaggtcatggccgacgtggcatggatgaagcaagccattgaagaacaactccagcttgaacgggcccgtgaggcggaactccagatgcttctgagggaagaggccaaagagatgtgggaaaagcgggaggctgagtgggccagagaaagatccgctcgagaccgactcatgagcgaggtcctgacaggacgacagcagcagattcaggagaagatcgaacagaacaggcgtgcacaggaagagagtctaaaacatcgcgagcaactgattagaaacctggaagaagttcgggagttggccagacgcgagaaagaagagtccgaaaaattgaagtctgccagaaagcaggagctggaggcacaggtggctgaacggcgtctgcaggcctgggaggctgaccagcaagaagaggaagaggaagaagaagcacgtagagtagagcagctgtccgatgcactcctgcagcaggaggccgaaacaatggccgagcagggctataggcctaaaccatacgggcacccaaaaatagcttggaattag

SEQ ID NO: 334878 - DNA, 525 bp, Artificial Sequence
  derived and/or modified sequence
atggcactgcctacactgccctcctattggtgttctcaacagcggttgaaccagcaacttgctaggcagcgtgaacaggaggcacgactgaggcaacaatgggaacagaattcccggtattttaggatgtctgacatatgcagctcaaagcaagcagaatggtcatccaaaaccagctatcagcgcagcatgcacgcataccagcgggaaaagatgaaggaggagaagcggcgatccctcgaggcgagaagagagaagttgagacagttgatgcaagaggagcaggacctccttgctcgtgagttggaggaactgcggctttcaatgaacctccaggagagaaggatacgagagcagcatggaaagctgaaaagcgccaaagaagagcagagaaagctgatcgcagagcagctgctctatgaacactggaaaaaaaacaatcccaaactccgcgaaatggagctggacctccaccaaaaacatgtcgtgaattcgtgggagatgcaaaaagaggagaaaaaatag

SEQ ID NO: 334879 - DNA, 663 bp, Artificial Sequence
  derived and/or modified sequence
atggcactcccaacgcttcctagctattggtgttcccaacaacgccttaatcagcagctcgcacggcagcgagaacaggaagcccggctcagacaacagtgggaacagaactcgaggtactttagaatgagtgatatctgcagttccaagcaggcagaatggagctccaaaacgtcataccaacgatcaatgcacgcttatcagcgcgagaagatgaaagaggagaaaaggaggtcgctcgaagcccgcagagaaaagcttcgacaactgatgcaggaggaacaggatttacttgcaagagaactggaggagctcaggctatctatgaatctccaggagagaaggatacgggagcagcacggaaagctgaagagcgccaaggaagaacagcggaaattgatcgcggagcagctcctgtatgagcactggaaaaaaaataacccgaagttacgcgaaatggaactggatctgcaccaaaagcacgtggtgaattcatgggagatgcagaaggaagaaaaaaagcagcaagaggctacagcagagcaggagaacaagaggtacgagaacgagtacgagcgcgcccgccgcgaagctctggaacgcatgaaggccgaggaggagagaagactgtcacggaccgatggccacaagagaaatccatag

SEQ ID NO: 334880 - DNA, 1497 bp, Artificial Sequence
  derived and/or modified sequence
atggcactcccaacattaccttcctattggtgcagccaacaacgattaaaccaacaactggccagacagagggaacaggaagctagattgcggcagcaatgggagcagaacagcagatacttccgtatgtcagacatctgctccagcaagcaggcagaatggagttcaaaaacctcataccagcgcagcatgcacgcctatcaaagggaaaagatgaaagaagaaaaacggagaagcctggaagctaggcgagaaaaactaaggcaactgatgcaagaggagcaggacctattagctcgggagttggaagagctgcgtctgagtatgaacctgcaggaaagacgcatcagagaacaacacggaaagctcaagtctgcaaaggaagagcagcggaagctcatagccgaacaattattatatgaacattggaagaaaaacaaccccaaactcagagagatggaactggatctccaccagaaacatgtagtgaactcttgggagatgcagaaagaggagaaaaagcagcaggaggctaccgctgaacaggagaataaaagatatgaaaacgagtacgagagggccaggcgagaagcattagaacgcatgaaggccgaggaagagcgaagacagttggaagacaagttgcaggccgaggcactgttgcagcagatggaagagcttaagctgaaagaagtggaagccacaaagctcaagaaggagcaggagaatctattgaagcagaggtgggaactcgagcgtcttgaagaggagcgtaaacagatggaagcctttcggcagaaggctgagctggggagattccttcgccatcaatacaatgctcagctatcacggcggactcagcaaattcaagaagaattggaggcagaccgtcgcatcctgcaagctttgttggaaaaagaggacgaaagccaaaggctgcacctcgctagaagagagcaggtgatggccgatgtggcctggatgaagcaagccatagaagagcagttacaactagagcgggcaagggaagctgagttgcagatgttactccgtgaagaagccaaggagatgtgggagaagcgcgaagctgagtgggcacgggagcggagcgcccgcgataggttgatgagcgaggtgctgactggacggcaacagcaaattcaggagaaaatcgagcaaaaccgccgtgcccaggaagaaagtctcaagcaccgggaacagctgattaggaatctggaagaggtgcgggaactcgcacgacgcgagaaagaagaatccgagaagctcaaatctgccagaaagcaggaactcgaagctcaggttgcggagagacggcttcaggcttgggaagcggaccagcaggaagaagaggaggaagaggaagccaggcgcgttgagcagctgtcagacgcactacttcaacaggaagcagaaacaatggcggaacaaggatacagacctaagccatacggacacccaaagatcgcatggaattag

SEQ ID NO: 334881 - DNA, 1497 bp, Artificial Sequence
  derived and/or modified sequence
atggccctgcccaccctgcccagctactggtgcagccagcagaggctgaaccagcagctggcccggcagcgggagcaggaggcccggctgcggcagcagtgggagcagaacagccgctacttcaggatgtctgacatctgcagcagcaagcaggccgagtggagcagcaagaccagctaccagaggtccatgcacgcctaccagcgggagaagatgaaggaggagaagagaagaagcctggaggcccggcgggagaagctgcggcagctgatgcaggaggagcaggacctgctggcccgggagctggaggagctgcggctgtccatgaacctgcaggagcggcgcatccgggagcagcacggcaagctgaagagcgccaaggaggagcagaggaagctgattgctgagcagctgctgtatgagcactggaagaagaacaaccccaagctgcgggagatggagctggacctgcaccagaagcacgtggtgaacagctgggagatgcagaaggaggagaagaagcagcaggaggccacagctgagcaggagaacaagagatatgaaaatgaatatgagcgggcccggcgggaggccctggagaggatgaaggccgaggaggagcggcggcagctggaggacaagctgcaggccgaggccctgctgcagcagatggaggagctgaagctgaaggaggtggaggccaccaagctgaagaaggagcaggagaacctgctgaagcagcgctgggagctggagcggctggaggaggagaggaagcagatggaggccttccggcagaaggccgagctgggccgcttcctgcggcaccagtacaatgcccagctgagcaggaggacccagcagatccaggaggagctggaggccgaccggcgcatcctgcaggccctgctggagaaggaggatgagagccagaggctgcacctggcccggcgggagcaggtgatggctgatgtggcctggatgaagcaggccatcgaggagcagctgcagctggagcgggcccgggaggccgagctgcagatgctgctgcgggaggaggccaaggagatgtgggagaagcgggaggccgagtgggcccgggagaggtctgcccgggaccggctgatgtctgaggtgctgaccggccggcagcagcagatccaggagaagattgagcagaacagaagagcccaggaggagagcctgaagcaccgggagcagctgatccggaacctggaggaggtgcgggagctggcccggcgggagaaggaggagagcgagaagctgaagagcgccaggaagcaggagctggaggcccaggtggccgagcggcggctgcaggcctgggaggccgaccagcaggaggaggaggaggaggaggaggccaggagagtggagcagctgagtgatgccctgctgcagcaggaggccgagaccatggccgagcagggctaccggcccaagccctacggccaccccaagatcgcctggaactag

SEQ ID NO: 334882 - DNA, 525 bp, Artificial Sequence
  derived and/or modified sequence
atggccctgcccaccctgcccagctactggtgcagccagcagaggctgaaccagcagctggcccggcagcgggagcaggaggcccggctgcggcagcagtgggagcagaacagccgctacttcaggatgtctgacatctgcagcagcaagcaggccgagtggagcagcaagaccagctaccagaggtccatgcacgcctaccagcgggagaagatgaaggaggagaagagaagaagcctggaggcccggcgggagaagctgcggcagctgatgcaggaggagcaggacctgctggcccgggagctggaggagctgcggctgtccatgaacctgcaggagcggcgcatccgggagcagcacggcaagctgaagagcgccaaggaggagcagaggaagctgattgctgagcagctgctgtatgagcactggaagaagaacaaccccaagctgcgggagatggagctggacctgcaccagaagcacgtggtgaacagctgggagatgcagaaggaggagaagaagtag

SEQ ID NO: 334883 - DNA, 663 bp, Artificial Sequence
  derived and/or modified sequence
atggccctgcccaccctgcccagctactggtgcagccagcagaggctgaaccagcagctggcccggcagcgggagcaggaggcccggctgcggcagcagtgggagcagaacagccgctacttcaggatgtctgacatctgcagcagcaagcaggccgagtggagcagcaagaccagctaccagaggtccatgcacgcctaccagcgggagaagatgaaggaggagaagagaagaagcctggaggcccggcgggagaagctgcggcagctgatgcaggaggagcaggacctgctggcccgggagctggaggagctgcggctgtccatgaacctgcaggagcggcgcatccgggagcagcacggcaagctgaagagcgccaaggaggagcagaggaagctgattgctgagcagctgctgtatgagcactggaagaagaacaaccccaagctgcgggagatggagctggacctgcaccagaagcacgtggtgaacagctgggagatgcagaaggaggagaagaagcagcaggaggccacagctgagcaggagaacaagagatatgaaaatgaatatgagcgggcccggcgggaggccctggagaggatgaaggccgaggaggagcggcggctgagcaggacagatggccacaagaggaacccctag

SEQ ID NO: 334884 - DNA, 1497 bp, Artificial Sequence
  derived and/or modified sequence
atggccctgcccaccctgcccagctactggtgcagccagcagcggttgaaccagcagctcgcgcgtcagcgagagcaggaggctagactcagacagcagtgggagcaaaacagccggtactttcgcatgagtgacatatgctccagcaaacaggctgaatggtctagtaagacttcttatcaacgttcgatgcatgcctaccagcgcgagaagatgaaggaggaaaagaggcgctccctggaggctcggagagagaaacttcgacagctgatgcaggaagagcaagatctgctcgcccgggaactggaagagctacggctgagcatgaatcttcaagaacgtaggatccgtgagcaacacgggaagctcaaaagcgcaaaggaagaacagaggaaactcatcgcggagcaactactctatgagcactggaaaaagaataatcctaaattgagagagatggagctcgaccttcaccagaagcacgtggttaattcgtgggaaatgcagaaggaggagaaaaagcagcaggaggctacagctgagcaggagaataagcgctatgagaacgaatacgaacgggcccgtcgggaggctttggagcgcatgaaagcagaggaggaaaggcggcagctcgaagacaaactgcaggcagaagctctcctgcaacagatggaagaactgaagctgaaagaagtggaagctacgaagctcaagaaggaacaggaaaacttgctgaaacagcgctgggagctggaacggctggaagaggaacgcaaacagatggaagctttccggcagaaagcagaactggggcgcttcctgagacaccagtataacgctcagctgagcagaagaacccagcagatccaggaagagcttgaggccgaccggagaattctccaggccctgctggagaaagaagacgagtcccagcgtctacatctggcccgccgggagcaggtcatggccgatgtcgcatggatgaaacaagccatagaagagcagctgcagttggagagagccagagaggccgaacttcagatgctgctgagggaggaggccaaggaaatgtgggaaaagcgtgaggcggaatgggctcgggagagatctgctagggatagacttatgtcggaagtgctgacaggccgtcaacagcaaattcaagagaaaattgagcaaaaccgccgcgcgcaagaagaatctctgaagcacagagagcagctgataaggaacctcgaagaagttcgcgagctggcaaggcgcgagaaagaggaatccgagaagctgaagtctgcgcgcaagcaagaactcgaagcacaggtggcggagaggcgcctgcaagcgtgggaggcagaccagcaggaggaggaggaagaagaggaagcccgacgagtcgaacagctgtccgacgctttacttcagcaggaagcagaaacgatggcagaacagggctacaggcctaagccttacgggcacccaaaaattgcctggaattag

SEQ ID NO: 334885 - DNA, 1497 bp, Artificial Sequence
  derived and/or modified sequence
atggccctgcccaccctgcccagctactggtgcagccagcagcggctgaatcagcagctggcccggcagagggagcaagaagctcgcctgaggcagcagtgggaacaaaattccagatactttaggatgtcagacatatgcagtagtaaacaggcagaatggtccagtaaaacgtcctatcaacggagtatgcacgcctaccagcgggagaaaatgaaagaagagaagagaaggtccctggaagccaggagggagaagcttcggcagctaatgcaggaggaacaggatctccttgcccgggagttagaagaattgcggctttccatgaacctgcaggaaaggcggatcagggagcagcatggaaaactgaaatcagccaaggaggagcagcgtaagttgatagccgaacagctcctttatgagcattggaagaagaacaacccaaagctgcgcgagatggagctcgacctacaccagaaacatgtggtcaattcctgggaaatgcagaaggaagagaagaagcagcaggaggcaactgcggaacaagagaacaagaggtatgaaaacgagtacgagagggcccggagggaggccctcgagagaatgaaagccgaagaggaaagaaggcagctggaggataagctccaggcagaagctctattgcagcaaatggaggaactgaaactcaaagaagtagaagccacaaaactgaagaaagagcaagaaaatctcctgaaacagaggtgggagctagaacgacttgaggaggaaagaaaacaaatggaagcctttcgccagaaagccgagctcggaagattcttgagacaccagtataatgcccaactttctaggagaacgcagcagatccaagaggaacttgaagcagatcgcagaattctacaagcgttacttgaaaaggaggatgaatcccaacgcctacacctggcgagacgtgagcaggtaatggcggatgtcgcatggatgaaacaagctattgaagaacagctccagcttgaaagagcccgggaagctgaactccagatgctccttcgggaagaggccaaggagatgtgggaaaagcgcgaggcagagtgggcgagagagcggtctgcacgcgatcgactcatgtcagaggtgctcactggcagacagcagcagatacaagagaagattgaacaaaatcgccgcgcacaggaagagtccctaaagcacagggagcagctaatcaggaacctggaagaggtccgtgagctggcccgacgagagaaggaggaaagtgagaagttgaaaagcgcaagaaagcaggagctggaggcccaagtcgccgagcggcgattacaggcgtgggaggctgaccagcaagaggaagaggaggaggaagaggccaggagagtggaacaattatccgatgcactgctccagcaggaggctgagaccatggccgagcagggctacaggcctaaaccctacggtcacccaaagattgcttggaactag

SEQ ID NO: 334886 - DNA, 525 bp, Artificial Sequence
  derived and/or modified sequence
atggccctgcccaccctgcccagctactggtgcagccagcagcggctgaaccagcagttggcgagacagcgcgagcaagaggccagattaagacagcaatgggaacagaatagccgctattttagaatgagcgacatctgtagttcgaagcaggctgaatggtccagtaagacgtcatatcagcggtctatgcatgcgtaccaacgagagaaaatgaaggaggagaagcggaggagtttagaagctcgaagggaaaagctgagacagctcatgcaggaagagcaggacttgttggctcgcgagttggaggagttacggctgtcaatgaacctgcaagagcgccggataagggaacagcatgggaagctgaagtcagcgaaagaagaacagcgtaagttgattgcagaacaattgttgtacgagcattggaagaagaacaatcccaaattgcgcgagatggagctggacctccatcagaagcacgtggtgaattcctgggaaatgcaaaaagaggagaaaaaatag

SEQ ID NO: 334887 - DNA, 663 bp, Artificial Sequence
  derived and/or modified sequence
atggccctgcccaccctgcccagctactggtgcagccagcagcggttaaatcagcagttggcaaggcagcgcgagcaggaggccagactgcggcagcagtgggagcagaactctcgatatttccgcatgagcgatatttgcagcagcaaacaggctgagtggtcgagtaagacaagctaccagaggagtatgcatgcctatcagagagagaagatgaaagaggagaaacggcgctccctggaggcccggagggaaaagctgcgccagctgatgcaggaggagcaggacctgttggcacgcgagttggaagaactcaggctgtccatgaacctgcaggaacgacgcatccgggagcagcacggcaaactgaagagcgccaaagaggaacaaagaaagctgattgccgagcagcttctttatgagcattggaaaaaaaataatcccaaactgagggagatggagcttgacctgcatcagaaacacgttgtgaatagttgggaaatgcagaaggaggagaagaagcagcaggaggcgacggctgagcaggaaaataagagatatgagaatgagtatgaaagggcccgcagagaagcactggaacggatgaaggccgaggaagaacggaggctatcgaggaccgacggccacaagcggaacccctag

SEQ ID NO: 334888 - DNA, 1497 bp, Artificial Sequence
  derived and/or modified sequence
atggccctgcccaccctgcccagctactggtgcagccagcagcggcttaatcagcagttagccaggcagcgggagcaggaagcaaggttaagacaacagtgggagcagaatagtcggtactttaggatgagtgatatatgttcctccaagcaagccgagtggtcctccaaaaccagctaccagcgtagtatgcacgcttaccagcgagaaaagatgaaggaggagaagaggcgaagtctcgaggctagacgtgagaagcttagacagctgatgcaggaggagcaggacctactggcccgggagttggaggagctgcgactgtcaatgaacctgcaggaacgcaggatccgggagcaacatgggaaattaaagtcagcgaaggaggaacagaggaaactgattgccgaacagctgctgtacgagcattggaaaaaaaacaacccaaagttgcgcgaaatggagctagacctgcaccagaagcacgtggtgaactcatgggagatgcagaaggaagagaaaaaacagcaggaggccaccgctgagcaagaaaacaagagatatgaaaacgaatacgagcgcgcacgacgggaggccctagagagaatgaaagcagaagaggagaggcgccaattggaagacaaactgcaggccgaggccctactacagcagatggaagagttgaagttgaaggaagttgaggccacaaaactaaagaaggagcaggaaaatctcctgaaacaacgttgggaactcgagaggctggaggaggagcggaagcaaatggaggctttcagacagaaggctgaactggggcgattcttacgccatcagtataatgcccagctgtctagacgaacacagcaaatacaggaggagttagaggcagaccgcagaattctgcaggcgctcctggagaaggaagacgaatcacagcgcctgcatctggcccggcgggagcaggttatggcggacgttgcctggatgaagcaggctattgaggaacagctgcagttggaaagggcccgggaagccgaattgcaaatgcttttacgagaggaagcgaaagaaatgtgggaaaaaagggaggctgagtgggcgagagaaaggtcagctcgagacaggttaatgtcagaagttctcaccgggaggcagcagcagatccaggaaaagatagaacagaaccgccgcgcccaagaagagtcactgaagcaccgcgaacagctcattcgaaatctcgaggaagtgagagagcttgccagaagagagaaagaagagtctgaaaaacttaaatctgcccggaagcaggagttggaagctcaggtggcagagcgtcgactgcaggcgtgggaggctgaccagcaggaagaggaggaagaggaagaagcaagaagagttgagcagctgagtgacgctctgttgcagcaggaggctgaaaccatggctgagcaggggtacagaccaaagccatatggacacccaaagatcgcatggaattag

SEQ ID NO: 334889 - DNA, 1497 bp, Artificial Sequence
  derived and/or modified sequence
atggctctccctactctccccagctactggtgttcacagcaacgactgaaccagcagctggcccgtcagcgggagcaagaggcaaggctgcgtcagcagtgggagcagaattcacggtattttcgcatgagtgatatatgcagcagcaagcaggcagaatggagcagtaagacaagttatcagcggtccatgcacgcataccagcgagagaagatgaaggaagagaagcgacgatcactggaggccaggcgcgagaagctccgtcaactcatgcaggaagagcaggatctgttggccagggagctagaggaacttcgcttgtctatgaatttacaagagcgacgaatacgggagcagcacggaaagttgaagtccgccaaggaagaacagcggaagctgatcgccgaacagttactgtacgagcattggaagaagaacaaccctaagctaagggaaatggaacttgacctccaccagaaacacgtggtcaatagctgggagatgcagaaggaagagaagaagcagcaagaggccacagcggagcaggaaaataaacgatacgaaaacgaatatgagcgggctaggagagaggctctggagcgcatgaaagccgaggaggaaaggcgacagctggaagacaaattgcaggcggaggctctgctgcagcagatggaggagctaaagcttaaagaagtagaagctacgaaactcaagaaagagcaggagaacttgctcaaacagcgctgggagctcgaaagactggaggaggagcggaaacagatggaggcattccgccaaaaggctgagcttggacgattcctccggcaccaatataacgcccaactgtcccgaagaacccagcagatccaggaggagcttgaagccgaccggaggattctacaagcactgctcgagaaagaggatgaatcacagcgattacatctggccaggagggagcaggtaatggcagacgtcgcgtggatgaagcaggcaatagaagagcagttgcaacttgagagggccagagaagccgaactgcagatgctgctcagggaagaggccaaggagatgtgggaaaaacgagaggcagaatgggctagagaaaggtccgcacgagaccgcctgatgtcagaggtcttaaccgggcgacagcagcagatacaggagaagatagagcagaaccggagggcacaggaggagagcttgaagcaccgcgagcaactcatcagaaatttagaagaagtacgggagttggcccgtcgagagaaagaggagtctgaaaagctgaagtccgcaagaaaacaagagttagaggcacaggtggctgaaagaaggctacaagcctgggaggcagaccaacaggaagaagaagaggaagaggaagccagacgcgtcgaacagctgtctgatgccctgctgcagcaggaagcagaaacaatggcagaacagggctacagaccgaaaccctacggccaccccaagatcgcttggaattag

SEQ ID NO: 334890 - DNA, 1497 bp, Artificial Sequence
  derived and/or modified sequence
atggcactcccaacactccctagctactggtgtagtcagcagaggcttaaccagcagttggctcgacagcgggagcaggaggccagactgcgtcagcagtgggagcagaacagcaggtacttccgaatgagtgacatttgctccagcaagcaggccgagtggtcaagtaagacatcgtaccagcgatcaatgcacgcatatcagcgggagaaaatgaaggaggagaaacggagatctttggaagctcgacgcgagaaactgcgacaactgatgcaagaggagcaggacttgctcgccagggagttggaagagttacggctgagtatgaacctacaagagcggagaataagggagcaacacggaaagttgaaatccgccaaagaggagcagagaaaactgatcgctgagcagcttctgtatgaacattggaaaaaaaataacccaaaactacgcgaaatggaactggacctgcatcaaaagcatgttgttaattcatgggaaatgcaaaaggaagagaagaaacagcaggaagctacagcagagcaggaaaataagaggtatgaaaatgaatatgagcgcgcacggagagaggcacttgaaaggatgaaagccgaggaggaaaggcggcagctcgaggacaagctgcaagccgaagccctcctccagcaaatggaggaactgaagctcaaagaggtggaagccaccaagctcaagaaggaacaggagaatctcttaaagcagagatgggaactggaacgcctcgaggaagagcgtaagcaaatggaggcattccggcagaaagctgagttaggaagattccttcggcatcaatataatgcacagctgtcccgaaggacacagcaaattcaggaggaactggaagcggaccgccgtatcctgcaggctctgctggagaaagaggacgagtctcagcggctgcatctggcgcgtcgagagcaggtgatggccgatgtagcctggatgaagcaggctattgaagaacagttgcagctggagagagcacgggaggcagaacttcagatgcttctccgcgaagaagccaaggagatgtgggaaaagcgggaagctgaatgggccagagaaaggagcgcgagggataggttgatgagtgaggttctgactgggaggcagcagcagatacaggaaaagatcgagcagaacagacgcgcacaggaggaaagcttgaagcacagagagcagttgatccgaaacctcgaggaggtgcgggaacttgctcgcagggagaaggaggaatcagagaagctaaagagtgcacggaagcaggaattagaggcacaggtcgccgagagaagactccaggcgtgggaggccgatcagcaggaggaggaggaagaggaagaagcacgaagggttgaacagctgtccgatgcactgctgcaacaggaggccgagacgatggccgagcagggctacagacctaagccttacggccacccaaaaatcgcctggaactag

SEQ ID NO: 334891 - DNA, 525 bp, Artificial Sequence
  derived and/or modified sequence
atggccctgccaacgctaccgagttactggtgttcccaacagcggttaaatcagcagctggccaggcaacgcgagcaggaggccagactccgacaacagtgggagcagaattcacgctatttcagaatgtctgacatatgcagctctaaacaagctgaatggagcagcaagacaagttaccagaggtctatgcatgcttaccagcgagagaagatgaaggaagaaaaaagacgaagcttggaggcccgacgggaaaagctcaggcagctgatgcaggaggagcaggacctacttgccagggaactcgaggagcttcgtctctcgatgaaccttcaagagagacggatccgtgaacaacatgggaagttaaagagcgctaaggaggagcagagaaagttgattgctgagcagctgctctacgaacattggaagaagaataaccctaaacttcgggaaatggagctggacttgcaccagaaacacgtcgtgaatagttgggagatgcagaaagaagagaagaagtag

SEQ ID NO: 334892 - DNA, 663 bp, Artificial Sequence
  derived and/or modified sequence
atggccctgcctaccctaccttcctattggtgtagtcagcagagactgaatcagcagctcgcaagacagcgggaacaggaggccaggcttaggcagcagtgggagcagaattctagatactttaggatgagcgacatatgttcctcaaagcaggctgagtggagctcaaagacttcctatcaaagaagtatgcacgcctaccaacgggagaaaatgaaggaggagaagcgcaggtcgctggaggccagaagagagaaattgcggcagctcatgcaggaagaacaagaccttctggcaagggaactcgaggagctcagactgtctatgaatcttcaggaacgcaggattagagagcagcacgggaagctaaaaagcgcaaaagaagaacaacggaagctgattgccgaacagctgctgtacgaacattggaagaagaacaatcccaagttgcgggagatggagcttgatctccaccaaaaacatgtcgtgaatagctgggaaatgcagaaggaggaaaagaagcagcaggaagctacagccgaacaagagaacaagcggtatgaaaacgaatacgagcgagcaagaagagaggctctagagcggatgaaggctgaagaggaacgcagactgagtcggacagatggtcacaaacgcaatccatag

SEQ ID NO: 334893 - DNA, 1497 bp, Artificial Sequence
  derived and/or modified sequence
atggcattgcctaccctgccaagctattggtgttctcagcaacggctcaaccagcagcttgctcgtcaacgggagcaggaggccagactgcgccagcagtgggagcagaatagcagatactttaggatgagcgacatttgcagcagcaaacaggcagagtggtcctctaagacgagttaccagaggtccatgcatgcatatcagcgcgagaagatgaaagaggaaaagcgacggagtctcgaagccaggagggagaaacttagacagcttatgcaggaggagcaagacctgctcgcgagggaactcgaggaattacgtctttcgatgaatctgcaggagcgaagaatcagggagcagcatggtaagcttaagagcgccaaggaggaacaacgtaaattgattgctgagcagctgctctatgagcactggaaaaagaataatccgaagctgcgcgaaatggagctggatttacatcagaagcacgtggtcaactcttgggagatgcaaaaggaagagaagaagcagcaggaggcaacagcagagcaggagaataaaaggtacgaaaatgagtacgaacgcgctcgaagagaagcgctggaacgcatgaaggcagaagaggagcgcagacaactggaagataaactgcaagctgaagccttgctccagcagatggaagaacttaagcttaaagaggtagaagctactaaacttaaaaaggagcaggagaacctcctgaaacaaaggtgggaacttgagcgactggaagaggaaagaaaacagatggaggcattccggcagaaggctgaactggggcgatttctgcgccaccagtataatgcgcagctgagcaggcgcacccagcaaattcaggaggaactagaagccgatcgcagaattctgcaggccctgttggaaaaggaagatgagagtcagaggctgcatcttgctcgacgggagcaggtcatggccgatgtggcttggatgaagcaagcaattgaggagcaactacaactggaacgcgcacgggaagcagagcttcagatgctcttgcgcgaagaggctaaggaaatgtgggagaagagagaggccgaatgggctagagagaggagcgcgcgagacaggcttatgagtgaagttctgacgggaagacagcagcagatacaggagaaaatcgagcagaatcggagagctcaggaggagtccctgaaacaccgcgagcagctgatacggaatttagaagaggtgcgggagctggcaagacgtgaaaaagaagaatcagagaagctaaaatctgctcggaagcaagagctggaggcccaggtcgccgaacgaagactgcaggcctgggaagccgaccaacaagaggaggaagaagaagaggaggcacgcagggttgagcagctgtcagatgcactcttgcaacaggaggccgagacgatggcagagcaagggtaccggcctaaaccctacggtcaccccaagatcgcttggaattag

SEQ ID NO: 334894 - DNA, 3151 bp, Artificial Sequence
  derived and/or modified sequence
gggcgcgagctcagggcgcctccggggtcctcactgcgctccccacgcgctgtgaccccatttgttgcacgtgcatgttcaggtcgagagagggatgcgacgtgttcggggagcagcccaccttgtgggtggccaatccgggacgggaatcttaaacttttaactcttggtgcaaagactgatccactggcggctttacgggagcgggaaaaaaatggcgctcccgacgctgccgtcctactggtgcagccagcagcgcctgaatcagcagctagcacgacagcgagagcaggaggcccggcttcggcagcagtgggagcagaacagccgttacttcaggatgtctgacatctgcagctccaaacaggcagaatggagctctaaaacctcctaccagcggagcatgcatgcctatcagcgggagaagatgaaggaggagaagaggaggagtctggaggcccgacgggaaaagctcaggcagctcatgcaggaggagcaggacctgctggccagagaactggaggagctgaggctgagcatgaacttgcaggaaagaagaatccgggagcagcacgggaagctgaaatcagccaaagaagagcagaggaaactgattgctgaacaacttttgtacgaacactggaaaaagaacaacccgaaacttcgagagatggagctggaccttcaccagaagcatgtcgtaaactcttgggaaatgcagaaagaagaaaaaaaacagcaagaagccaccgcagagcaagagaacaaacggtatgaaaatgaatatgaaagggcccgaagggaggcgctagaaaggatgaaagctgaagaggagaggaggcagctggaggacaagctccaggccgaggcactgctgcaacagatggaggagctgaagctgaaggaggtggaggcgaccaaactaaagaaggagcaggagaatctgttgaagcagcggtgggagctagagaggctggaggaagagcgaaagcagatggaagccttccggcagaaggcagagctggggcgtttcttgagacatcagtataacgctcaactcagcagacgcacacagcagatccaagaggagctggaggcagacaggcggatcctgcaggccctcctcgagaaggaggacgagagccagcgcctccacctggccaggcgggagcaggtcatggccgatgtggcctggatgaagcaggccattgaggagcagctgcagctggagcgggcgcgggaggcagagctgcagatgctgctgagggaggaggccaaggagatgtgggaaaagagagaggcagagtgggcccgagagcgcagcgcacgggacagactgatgagcgaggttctgacagggagacaacagcaaatacaagagaagattgagcagaaccgacgggcacaagaggaatccctgaaacacagggagcaacttattcgaaatcttgaggaggtgagagagttggctcgtcgcgagaaagaggagagtgaaaagctgaaatcggccaggaagcaggagctggaagcccaggttgcagagcgccggctgcaggcatgggaagcagaccagcaggaggaggaggaagaggaggaggcccggcgggtcgagcagctctcagatgccctgctgcagcaggaggcggagactatggctgagcagggctaccggcctaagccttacggacatccaaaaattgcttggaactgacttcatgggtaccataagtacagagaacaagggatgctgaggcttctgatcccagccgccaggcagttttacagggctctgttaacagtaagtgcccggggcactgtcagatggctcagcagtgcctgctcaggttcatcattgaaacatcccagtgtttggccagacattaaggtgtcgtgagagtccctttcatgcctttcttacccaagcaagggtctttgatgggcacgtgtttacagcgctgctgcatagtcttgtaatatattaacagtcacatcaactgaaggtcaatactaagagccacaggttgtacctgtgatggggcgtgtggtttcctgttgtctcacctttaattgtcaacctccagtgttgactctagaaatatgaggaaagcttttcagtttttaaaattgccatttaaatttagtctattaaaaacaaacctagaggtcttggtgcagttgatttcagagtttattaatttagtggtcccaaaagtattacatcttttatattctggaagaaaagaactgtgaacaaattagaaccccggaacactctgacgtccatggacgcattccagaaaagtggcaagagatgagtctttcctcctccaggaagcattttggtagaatttccatagagcattgtctgtgagtgactgatcccaacatgtatgttactaagccccaaaacgaacttcaaactgggtgtggtggcacgtgcctttagtcccagctacccgggaggctgcggcaagaggattgcttgagcccaggagttcgagtccaacctgggcaaaagagtgagaccccatctctaaaaccaaaaaggtaccttagaaggtcacctggttggctaaccttttaaaggcaggggcgtgacacgtaggacacattgggaatgtcttggctactacatgtagccttctgggatatatgtgcccagagggagaagcactgagcctgaagaaactagatgagtctcagaaccacagaccggccagaaatctctcccaccattatatcagcgtgatacaggtctacattcatttctacaaacaggaacaagttccttgcagcaataatattattttatgacttgtatttttactatacccttcctctgaggtttagttttcatcacattatgttcaagattccatatctccgtaaattacagctaattacagggcattgttccatggttattaaaaatcagagtttattaaaaatcctgagtcttaagggctgtcttacctttcacttccactgtcctgtagaaacagatcaagctgcaaaccacgtccttcatctgttgttcattttcttgcaactctttgactctgatcccctgagcagcacgttcatcacgcatgctctctgttgcgttccccatttcagatgtccagtaatggtgaaataaaatcctgcttcg

SEQ ID NO: 334895 - DNA, 3090 bp, Artificial Sequence
  derived and/or modified sequence
gggctcgttgccggtgcaaacagggaggaaacagccggcgttgctgtagcgcgtctgggaattacaccgggggactggccggcccgcttcgtgcctgcgggaagtcgggccgggggactcttcggaaactccgagcctcagagaaatatggcgctcccgacgctgccgtcctactggtgcagccagcagcgcctgaatcagcagctagcacgacagcgagagcaggaggcccggcttcggcagcagtgggagcagaacagccgttacttcaggatgtctgacatctgcagctccaaacaggcagaatggagctctaaaacctcctaccagcggagcatgcatgcctatcagcgggagaagatgaaggaggagaagaggaggagtctggaggcccgacgggaaaagctcaggcagctcatgcaggaggagcaggacctgctggccagagaactggaggagctgaggctgagcatgaacttgcaggaaagaagaatccgggagcagcacgggaagctgaaatcagccaaagaagagcagaggaaactgattgctgaacaacttttgtacgaacactggaaaaagaacaacccgaaacttcgagagatggagctggaccttcaccagaagcatgtcgtaaactcttgggaaatgcagaaagaagaaaaaaaacagcaagaagccaccgcagagcaagagaacaaacggtatgaaaatgaatatgaaagggcccgaagggaggcgctagaaaggatgaaagctgaagaggagaggaggcagctggaggacaagctccaggccgaggcactgctgcaacagatggaggagctgaagctgaaggaggtggaggcgaccaaactaaagaaggagcaggagaatctgttgaagcagcggtgggagctagagaggctggaggaagagcgaaagcagatggaagccttccggcagaaggcagagctggggcgtttcttgagacatcagtataacgctcaactcagcagacgcacacagcagatccaagaggagctggaggcagacaggcggatcctgcaggccctcctcgagaaggaggacgagagccagcgcctccacctggccaggcgggagcaggtcatggccgatgtggcctggatgaagcaggccattgaggagcagctgcagctggagcgggcgcgggaggcagagctgcagatgctgctgagggaggaggccaaggagatgtgggaaaagagagaggcagagtgggcccgagagcgcagcgcacgggacagactgatgagcgaggttctgacagggagacaacagcaaatacaagagaagattgagcagaaccgacgggcacaagaggaatccctgaaacacagggagcaacttattcgaaatcttgaggaggtgagagagttggctcgtcgcgagaaagaggagagtgaaaagctgaaatcggccaggaagcaggagctggaagcccaggttgcagagcgccggctgcaggcatgggaagcagaccagcaggaggaggaggaagaggaggaggcccggcgggtcgagcagctctcagatgccctgctgcagcaggaggcggagactatggctgagcagggctaccggcctaagccttacggacatccaaaaattgcttggaactgacttcatgggtaccataagtacagagaacaagggatgctgaggcttctgatcccagccgccaggcagttttacagggctctgttaacagtaagtgcccggggcactgtcagatggctcagcagtgcctgctcaggttcatcattgaaacatcccagtgtttggccagacattaaggtgtcgtgagagtccctttcatgcctttcttacccaagcaagggtctttgatgggcacgtgtttacagcgctgctgcatagtcttgtaatatattaacagtcacatcaactgaaggtcaatactaagagccacaggttgtacctgtgatggggcgtgtggtttcctgttgtctcacctttaattgtcaacctccagtgttgactctagaaatatgaggaaagcttttcagtttttaaaattgccatttaaatttagtctattaaaaacaaacctagaggtcttggtgcagttgatttcagagtttattaatttagtggtcccaaaagtattacatcttttatattctggaagaaaagaactgtgaacaaattagaaccccggaacactctgacgtccatggacgcattccagaaaagtggcaagagatgagtctttcctcctccaggaagcattttggtagaatttccatagagcattgtctgtgagtgactgatcccaacatgtatgttactaagccccaaaacgaacttcaaactgggtgtggtggcacgtgcctttagtcccagctacccgggaggctgcggcaagaggattgcttgagcccaggagttcgagtccaacctgggcaaaagagtgagaccccatctctaaaaccaaaaaggtaccttagaaggtcacctggttggctaaccttttaaaggcaggggcgtgacacgtaggacacattgggaatgtcttggctactacatgtagccttctgggatatatgtgcccagagggagaagcactgagcctgaagaaactagatgagtctcagaaccacagaccggccagaaatctctcccaccattatatcagcgtgatacaggtctacattcatttctacaaacaggaacaagttccttgcagcaataatattattttatgacttgtatttttactatacccttcctctgaggtttagttttcatcacattatgttcaagattccatatctccgtaaattacagctaattacagggcattgttccatggttattaaaaatcagagtttattaaaaatcctgagtcttaagggctgtcttacctttcacttccactgtcctgtagaaacagatcaagctgcaaaccacgtccttcatctgttgttcattttcttgcaactctttgactctgatcccctgagcagcacgttcatcacgcatgctctctgttgcgttccccatttcagatgtccagtaatggtgaaataaaatcctgcttcgacagca

SEQ ID NO: 334896 - DNA, 973 bp, Artificial Sequence
  derived and/or modified sequence
gggatgcgacgtgttcggggagcagcccaccttgtgggtggccaatccgggacgggaatcttaaacttttaactcttggtgcaaagactgatccactggcggctttacgggagcgggaaaaaagtatgtgaagcttgccacggtctcgagaccgaggtcacacgttagcagcctgccggctacatttggaccatagacgcagagtgtttgcccccaaaactggaggacctccagaatgagattcttggcgtgcaccaggccttttcgctcattcagccggcgttcctacccaggcactgcatcgaccctacacttgaggacagcttttgggtcaggggaattggtgcctggagtgagactgctctctgctttcaaggctccagctgtatccctacattgctcaggcaattcctctctctaggtctcagcttcttcatctgcaagatgaaagatggcgctcccgacgctgccgtcctactggtgcagccagcagcgcctgaatcagcagctagcacgacagcgagagcaggaggcccggcttcggcagcagtgggagcagaacagccgttacttcaggatgtctgacatctgcagctccaaacaggcagaatggagctctaaaacctcctaccagcggagcatgcatgcctatcagcgggagaagatgaaggaggagaagaggaggagtctggaggcccgacgggaaaagctcaggcagctcatgcaggaggagcaggacctgctggccagagaactggaggagctgaggctgagcatgaacttgcaggaaagaagaatccgggagcagcacgggaagctgaaatcagccaaagaagagcagaggaaactgattgctgaacaacttttgtacgaacactggaaaaagaacaacccgaaacttcgagagatggagctggaccttcaccagaagcatgtcgtaaactcttgggaaatgcagaaagaagaaaaaaaa

SEQ ID NO: 334897 - DNA, 1214 bp, Artificial Sequence
  derived and/or modified sequence
aaacagggaggaaacagccggcgttgctgtagcgcgtctgggaattacaccgggggactggccggcccgcttcgtgcctgcgggaagtcgggccgggggactcttcggaaactccgagcctcagagaaatatggcgctcccgacgctgccgtcctactggtgcagccagcagcgcctgaatcagcagctagcacgacagcgagagcaggaggcccggcttcggcagcagtgggagcagaacagccgttacttcaggatgtctgacatctgcagctccaaacaggcagaatggagctctaaaacctcctaccagcggagcatgcatgcctatcagcgggagaagatgaaggaggagaagaggaggagtctggaggcccgacgggaaaagctcaggcagctcatgcaggaggagcaggacctgctggccagagaactggaggagctgaggctgagcatgaacttgcaggaaagaagaatccgggagcagcacgggaagctgaaatcagccaaagaagagcagaggaaactgattgctgaacaacttttgtacgaacactggaaaaagaacaacccgaaacttcgagagatggagctggaccttcaccagaagcatgtcgtaaactcttgggaaatgcagaaagaagaaaaaaaacagcaagaagccaccgcagagcaagagaacaaacggtatgaaaatgaatatgaaagggcccgaagggaggcgctagaaaggatgaaagctgaagaggagagaagattgagcagaaccgacgggcacaagaggaatccctgaaacacagggagcaacttattcgaaatcttgaggaggtgagagagttggctcgtcgcgagaaagaggagagtgaaaagctgaaatcggccaggaagcaggagctggaagcccaggtagggctgagcccaagggcgggaggcaccgggcctgccaggttctctgcatcatcatgggacagggttcagagccgctggactgcctggcagggcttgcgcacgtttgagagcacggtgctcccgtttccatcccagctgcagtcctcatcctcttgactgtggcttctttccctccacatcctccatgtcgtgtgggtgaggccggtactgctgtctgttctctttactctgtctgcttctgcaagcagttggcttaccgggggccatagatctctcttcatttcagtccctgatacataagacag

SEQ ID NO: 334898 - DNA, 2077 bp, Artificial Sequence
  derived and/or modified sequence
gtcgtcgggctcgttgccggtgcaaacagggaggaaacagccggcgttgctgtagcgcgtctgggaattacaccgggggactggccggcccgcttcgtgcctgcgggaagtcgggccgggggactcttcggaaactccgagcctcagagaaatatggcgctcccgacgctgccgtcctactggtgcagccagcagcgcctgaatcagcagctagcacgacagcgagagcaggaggcccggcttcggcagcagtgggagcagaacagccgttacttcaggatgtctgacatctgcagctccaaacaggcagaatggagctctaaaacctcctaccagcggagcatgcatgcctatcagcgggagaagatgaaggaggagaagaggaggagtctggaggcccgacgggaaaagctcaggcagctcatgcaggaggagcaggacctgctggccagagaactggaggagctgaggctgagcatgaacttgcaggaaagaagaatccgggagcagcacgggaagctgaaatcagccaaagaagagcagaggaaactgattgctgaacaacttttgtacgaacactggaaaaagaacaacccgaaacttcgagagatggagctggaccttcaccagaagcatgtcgtaaactcttgggaaatgcagaaagaagaaaaaaaacagcaagaagccaccgcagagcaagagaacaaacggtatgaaaatgaatatgaaagggcccgaagggaggcgctagaaaggatgaaagctgaagaggagaggaggcagctggaggacaagctccaggccgaggcactgctgcaacagatggaggagctgaagctgaaggaggtggaggcgaccaaactaaagaaggagcaggagaatctgttgaagcagcggtgggagctagagaggctggaggaagagcgaaagcagatggaagccttccggcagaaggcagagctggggcgtttcttgagacatcagtataacgctcaactcagcagacgcacacagcagatccaagaggagctggaggcagacaggcggatcctgcaggccctcctcgagaaggaggacgagagccagcgcctccacctggccaggcgggagcaggtcatggccgatgtggcctggatgaagcaggccattgaggagcagctgcagctggagcgggcgcgggaggcagagctgcagatgctgctgagggaggaggccaaggagatgtgggaaaagagagaggcagagtgggcccgagagcgcagcgcacgggacagactgatgagcgaggttctgacagggagacaacagcaaatacaagagaagattgagcagaaccgacgggcacaagaggaatccctgaaacacagggagcaacttattcgaaatcttgaggaggtgagagagttggctcgtcgcgagaaagaggagagtgaaaagctgaaatcggccaggaagcaggagctggaagcccaggttgcagagcgccggctgcaggcatgggaagcagaccagcaggaggaggaggaagaggaggaggcccggcgggtcgagcagctctcagatgccctgctgcagcaggaggcggagactatggctgagcagggctaccggcctaagccttacggacatccaaaaattgcttggaactgacttcatgggtaccataagtacagagaacaagggatgctgaggcttctgatcccagccgccaggcagttttacagggctctgttaacaaaatctgaagagttctgcgtctgaatttgaaattggactttataaagcctagaaaacagaggaggcggtgccctgcccttgtcagttgttgttctctttggtggtgatggtaaccagctgcttggcagccttggcgatgtcgtacgcacactggatgacctgctgcgtgaccagctgaacgtctgtggtggtttccaaatctgtgtcttcgtctgatgccacgctgtcatagtcgggctgatcgttgtcttgactctcaacgctgtgctggttattgatggttttcagtatgagctccacattgtctatcaataaaagcaaacaactttacttcaggctt

SEQ ID NO: 334899 - protein, 273 aa, Artificial Sequence
  derived and/or modified sequence
MATWDEKAVTRRAKVAPAERMSKFLRHFTVVGDDYHAWNINYKKWENEEEEEEEEQPPPTPVSGEEGRAAAPDVAPAPGPAPRAPLDFRGMLRKLFSSHRFQVIIICLVVLDALLVLAELILDLKIIQPDKNNYAAMVFHYMSITILVFFMMEIIFKLFVFRLEFFHHKFEILDAVVVVVSFILDIVLLFQEHQFEALGLLILLRLWRVARIINGIIISVKTRSERQLLRLKQMNVQLAAKIQHLEFSCSEKEQEIERLNKLLRQHGLLGEVN

SEQ ID NO: 334900 - protein, 78 aa, Artificial Sequence
  derived and/or modified sequence
MATWDEKAVTRRAKVAPAERMSKFLRHFTVVGDDYHAWNINYKKWENEEEEEEEEQPPPTPVSGEEGRAAAPDVAPAP

SEQ ID NO: 334901 - DNA, 822 bp, Artificial Sequence
  derived and/or modified sequence
atggccacctgggacgaaaaagccgttacccgacgcgcaaaggtggcacccgccgagcgcatgagtaagttcttacggcacttcactgtggtgggcgatgactaccacgcctggaatattaattataaaaaatgggagaatgaggaggaggaagaggaggaggagcagccccccccaacccccgtgagcggggaggaggggagagctgccgcccctgatgtcgcaccggctcccgggccggcacctagggctccgttagattttaggggaatgctgcgaaaactgttcagctctcaccgtttccaggtgattatcatttgtctggtggtgttggatgctttactcgtccttgcagaactcattctagatctgaagattatccagcccgacaagaataattatgccgccatggtcttccactacatgtccatcacaatcctggtcttcttcatgatggagattatcttcaaactattcgtgttcaggctcgaattctttcatcataaattcgaaatactcgatgctgtggtggttgttgtgagttttatcctagacatcgtgctcttgttccaagaacaccagtttgaggcgctgggcctcctgattttgctcagactatggcgcgtggcccgtatcatcaatggtataataatatccgtcaagactcggagtgagagacagctgttgcgtttaaagcagatgaatgtacaattggctgccaagattcagcacttggagtttagctgctccgagaaggagcaagaaatagaacgccttaataagctgcttaggcaacatggcctcctgggggaggtgaactag

SEQ ID NO: 334902 - DNA, 822 bp, Artificial Sequence
  derived and/or modified sequence
atggctacttgggacgaaaaagcagtgacccgtcgtgctaaagtagctccagccgaacggatgagcaaattcctgagacatttcaccgtggtgggggatgactaccacgcgtggaatatcaattacaaaaagtgggaaaatgaagaagaggaggaggaggaggagcagccaccacccactcccgtgagcggagaagaaggccgtgctgccgcccccgacgtcgcccccgccccggggcctgccccgagagccccgctggacttccgcggcatgctgcgaaagctgtttagctctcatcggttccaggttattattatctgtctggtggtgctggatgccctcctcgttttggcagagctaatactcgacctgaagataatccaaccagacaaaaataattatgccgcgatggtattccattatatgagtatcacaatccttgtgttcttcatgatggaaataatttttaagctgttcgttttccggctcgaattcttccatcataagtttgaaatcctcgacgcagtcgtggtggtcgtgtcatttatcctggacatcgtgctcctctttcaggaacaccagttcgaagcactgggtttgctaatcctgctgaggctttggcgggtggcccgtatcattaacggcattattatttcggtgaagacgcgtagtgaaaggcaattactgcgattgaagcaaatgaacgttcagctcgccgccaagattcagcacctcgaattttcgtgctctgagaaggagcaggagatcgaaagattaaataaactcctgcggcagcacgggttgctcggagaggttaactag

SEQ ID NO: 334903 - DNA, 237 bp, Artificial Sequence
  derived and/or modified sequence
atggctacttgggatgagaaagccgttacccgccgggcaaaggtggccccagccgaacgcatgagtaagtttctgaggcattttacggtcgtcggggatgattaccatgcgtggaatattaattacaagaagtgggaaaatgaggaggaagaagaagaggaggaacagccgccacctacacccgtgagcggcgaagagggtagggcagctgctcccgacgtagcacccgccccctag

SEQ ID NO: 334904 - DNA, 1634 bp, Artificial Sequence
  derived and/or modified sequence
acggggcgggacgggctgggccggacctgctctgaggctcccagtcgcagcggtgaccgcgggcgggtggggcgccgggtgaagaaaccaagacgcagagaggccaagccccttgccttgggtcacacagccaaaggaggcagagccagaactcacaaccagatccagaggcaacagggacatggccacctgggacgaaaaggcagtcacccgcagggccaaggtggctcccgctgagaggatgagcaagttcttaaggcacttcacggtcgtgggagacgactaccatgcctggaacatcaactacaagaaatgggagaatgaagaggaggaggaggaggaggagcagccaccacccacaccagtctcaggcgaggaaggcagagctgcagcccctgacgttgcccctgcccctggccccgcacccagggccccccttgacttcaggggcatgttgaggaaactgttcagctcccacaggtttcaggtcatcatcatctgcttggtggttctggatgccctcctggtgcttgctgagctcatcctggacctgaagatcatccagcccgacaagaataactatgctgccatggtattccactacatgagcatcaccatcttggtcttttttatgatggagatcatctttaaattatttgtcttccgcctggagttctttcaccacaagtttgagatcctggatgccgtcgtggtggtggtctcattcatcctcgacattgtcctcctgttccaggagcaccagtttgaggctctgggcctgctgattctgctccggctgtggcgggtggcccggatcatcaatgggattatcatctcagttaagacacgttcagaacggcaactcttaaggttaaaacagatgaatgtacaattggccgccaagattcaacaccttgagttcagctgctctgagaaggaacaagaaattgaaagacttaacaaactattgcgacagcatggacttcttggtgaagtgaactagacccggaccagctcccctcaaaaagaagacactgtctcatgggcctgtgctgtcacgagaggaacagctgcccctcctgggccgcttggtgagaggtttggtttgatacctctgcctccctcctgccagcatggattctgggtggacacagccttgtggaaggtccagtaccaccaagagctgcccatccactcccaccccacactgtatcaaatgtatcacattttctcatgttgaacactttagccttaattgaaaatgagcaacaaagctggacaattgctagttgtatataaaatttaatctcaccgaatgtacagttttcaaatttcacgtgtatattaaggaactgatgcatctgagcattctgaaagaaagaaaaagaagctactttagctgccaccccattctagaaaagtctcttattttcaagctgttctaaatagcttcgtctcagtttccccaaaaggggtacccaggcccctcctctgtgtgccccagctgcatcagccagcttctaggtggctccattgttttctgccacctgacaacatttttcctcaattactgtacaactactgtataaaataaaacaactactgtataaaataaactctctcttttccctgga

SEQ ID NO: 334905 - DNA, 2189 bp, Artificial Sequence
  derived and/or modified sequence
ggtgaagaaaccaagacgcagagaggccaagccccttgccttgggtcacacagccaaaggaggcagagccagaactcacaaccaggtctgtgtcccctaagtcctcggatgcatcgtccctgccccgctgccctcccgggagattgtaggagagaagcaggggcagaggcagtgctggatgtcccgggagaaggctgcaatgagcaggcccagccatccctgaaggaggagccccggggaagcaaactcttccctagaaacactttaaaagcacccacctgttggagacagagatgctgaggaacaagagtgattggggccagggtaaacgccaagacagagaggggagagcagttcctcagtggaactccctccaacattgcccccaccacttttaccagtgctgggtgtgggggatcttgcaggctcagcttcgtgacttggcctgtctctgcctcagtttccgcatctgtcccatgaggttaagcatgtacctacctcgcaggattgctgagaagatgatataagatgcttggtgtacaggcttagcccctggcaccaggttactaccaaaagttcatggttccagtgcttcctccaccctccgtcctgcccctctgagagtacttctctgtcctgggcacctttaacttcaggttgttcagggctatctgagatctgcaggatttccggacagccccaccagcaactaggagctgcttgagtaagaccaagatccagaggcaacagggacatggccacctgggacgaaaaggcagtcacccgcagggccaaggtggctcccgctgagaggatgagcaagttcttaaggcacttcacggtcgtgggagacgactaccatgcctggaacatcaactacaagaaatgggagaatgaagaggaggaggaggaggaggagcagccaccacccacaccagtctcaggcgaggaaggcagagctgcagcccctgacgttgcccctgcccctggccccgcacccagggccccccttgacttcaggggcatgttgaggaaactgttcagctcccacaggtttcaggtcatcatcatctgcttggtggttctggatgccctcctggtgcttgctgagctcatcctggacctgaagatcatccagcccgacaagaataactatgctgccatggtattccactacatgagcatcaccatcttggtcttttttatgatggagatcatctttaaattatttgtcttccgcctggagttctttcaccacaagtttgagatcctggatgccgtcgtggtggtggtctcattcatcctcgacattgtcctcctgttccaggagcaccagtttgaggctctgggcctgctgattctgctccggctgtggcgggtggcccggatcatcaatgggattatcatctcagttaagacacgttcagaacggcaactcttaaggttaaaacagatgaatgtacaattggccgccaagattcaacaccttgagttcagctgctctgagaaggaacaagaaattgaaagacttaacaaactattgcgacagcatggacttcttggtgaagtgaactagacccggaccagctcccctcaaaaagaagacactgtctcatgggcctgtgctgtcacgagaggaacagctgcccctcctgggccgcttggtgagaggtttggtttgatacctctgcctccctcctgccagcatggattctgggtggacacagccttgtggaaggtccagtaccaccaagagctgcccatccactcccaccccacactgtatcaaatgtatcacattttctcatgttgaacactttagccttaattgaaaatgagcaacaaagctggacaattgctagttgtatataaaatttaatctcaccgaatgtacagttttcaaatttcacgtgtatattaaggaactgatgcatctgagcattctgaaagaaagaaaaagaagctactttagctgccaccccattctagaaaagtctcttattttcaagctgttctaaatagcttcgtctcagtttccccaaaaggggtacccaggcccctcctctgtgtgccccagctgcatcagccagcttctaggtggctccattgttttctgccacctgacaacatttttcctcaattactgtacaactactgtataaaataaaacaactactgtataaaataaa

SEQ ID NO: 334906 - DNA, 539 bp, Artificial Sequence
  derived and/or modified sequence
gcttctttcccagcctgcctcctggaggtgaacatgtgcaggtggagaagtgcccactgcatcggggccaaaagagagaacgctgcctacctcaccccaacggcatttgaaagtagactggctcatctgaaatgcttatttgcaagcatctaacttcctgaccctgtgtcacagatggccccacttggccccaagcccctggtgaagaaaccaagacgcagagaggccaagccccttgccttgggtcacacagccaaaggaggcagagccagaactcacaaccagatccagaggcaacagggacatggccacctgggacgaaaaggcagtcacccgcagggccaaggtggctcccgctgagaggatgagcaagttcttaaggcacttcacggtcgtgggagacgactaccatgcctggaacatcaactacaagaaatgggagaatgaagaggaggaggaggaggaggagcagccaccacccacaccagtctcaggcgaggaaggcagagctgcagcccctgacgttgcccctgcccctg

SEQ ID NO: 334907 - DNA, 822 bp, Artificial Sequence
  derived and/or modified sequence
atggccacctgggatgagaaggctgtgacccggcgggccaaggtggccccagctgagaggatgagcaagttcctgcggcacttcaccgtggtgggagatgactaccacgcctggaacatcaactacaagaagtgggagaatgaggaggaggaggaggaggaggagcagcccccacccacccctgtgtctggagaggagggccgggccgccgccccagatgtggccccagcccctggccctgccccccgggcccccctggacttccggggcatgctgaggaagctgttcagcagccaccgcttccaggtgatcatcatctgcctggtggtgctggatgccctgctggtgctggccgagctgatcctggacctgaagatcatccagcctgacaagaacaactatgctgccatggtgttccactacatgagcatcaccatcctggtgttcttcatgatggagatcatcttcaagctgtttgtgttccggctggagttcttccaccacaagtttgagatcctggatgctgtggtggtggtggtgtccttcatcctggacatcgtgctgctcttccaggagcaccagtttgaggccctgggcctgctgatcctgctgcggctgtggagggtggcccgcatcatcaatggcatcatcatctctgtgaagaccaggtctgagcggcagctgctgcggctgaagcagatgaatgtgcagctggccgccaagatccagcacctggagttcagctgcagcgagaaggagcaggagattgaaaggctgaacaagctgctgcggcagcacggcctgctgggggaggtgaactag

SEQ ID NO: 334908 - DNA, 237 bp, Artificial Sequence
  derived and/or modified sequence
atggccacctgggatgagaaggctgtgacccggcgggccaaggtggccccagctgagaggatgagcaagttcctgcggcacttcaccgtggtgggagatgactaccacgcctggaacatcaactacaagaagtgggagaatgaggaggaggaggaggaggaggagcagcccccacccacccctgtgtctggagaggagggccgggccgccgccccagatgtggccccagccccctag

SEQ ID NO: 334909 - DNA, 822 bp, Artificial Sequence
  derived and/or modified sequence
atggccacctgggacgagaaggccgtgacccggcgggccaaggtggctcccgccgaaagaatgtccaagttcctgagacactttacggttgttggtgatgactaccacgcttggaacatcaattataaaaagtgggagaatgaggaagaagaagaggaggaggagcaaccacccccgacccccgtctcgggggaggagggaagagcagcagccccggacgtcgcccccgcacccggcccagcgccccgggcccctttggatttcaggggcatgttaaggaagctgttctcctctcaccgatttcaggttatcatcatttgtctcgtggtactggatgccctcctagtactggccgaactgatcctggacctgaagataatccaacccgataagaacaactatgccgctatggtgtttcattacatgtccataacaattctggtgtttttcatgatggaaatcatcttcaaactatttgtatttcgtctcgaatttttccatcataagtttgagattttggacgcagtagtggtagtagtcagctttatcctggatattgttctgttgtttcaagagcaccagttcgaggctcttggtctgctgattctcctgagactttggagggtggccagaatcatcaatggaatcataatttccgtgaagacgcgatctgagcgacaattgctgcggttgaaacaaatgaatgtgcaattagctgccaagatccaacatcttgaattttcatgcagtgagaaggagcaagagatcgaacgcttaaataaattgctgaggcaacacggtctgctcggggaggtgaactag

SEQ ID NO: 334910 - DNA, 822 bp, Artificial Sequence
  derived and/or modified sequence
atggccacctgggacgagaaggccgtgacccggcgggccaaggtggctcctgccgagcgaatgtctaaatttcttcgacactttaccgtggtgggtgatgattaccacgcctggaatatcaactacaagaagtgggagaacgaggaagaagaggaagaggaagagcagcccccacccaccccagtctcaggtgaggaggggcgggctgcagcccctgacgtggctcccgcccctggtcctgctcctagggcaccgctggattttcgaggcatgctgagaaaactgttctcatctcaccgctttcaagtgatcataatttgtctcgttgttcttgatgcccttcttgtgctcgcagagctgatcctggacctaaagataatccagcccgacaagaacaattacgctgcgatggtgttccactacatgtctatcacaattctggtgttttttatgatggagataattttcaaactctttgttttccgcctcgagttcttccatcacaagttcgagattctagacgccgtggttgtggtggtgagcttcatcctagacatcgtcctgctcttccaggaacaccagtttgaggcattaggcctgctgatcctgttgaggctgtggcgcgtggctaggattataaatggtatcataatttccgttaaaactaggtccgagcgtcagttgctcagactcaagcagatgaacgtgcagctcgcagccaagattcagcatttggaattctcatgctctgagaaggagcaggaaatagaaaggctgaataagctactgagacaacacggactgctcggggaagtgaactag

SEQ ID NO: 334911 - DNA, 237 bp, Artificial Sequence
  derived and/or modified sequence
atggccacctgggacgagaaggccgtgacccggcgggccaaggtggcaccagcggagaggatgtccaagttcctgaggcatttcaccgtggtgggcgacgactaccacgcctggaatatcaactacaagaaatgggaaaatgaggaggaggaggaagaagaggagcagccccctccaactcccgttagcggagaggaaggcagagctgctgcccctgatgtggctccagcaccctag

SEQ ID NO: 334912 - DNA, 822 bp, Artificial Sequence
  derived and/or modified sequence
atggcaacctgggacgagaaggccgtgacgcggagagctaaagtggcacccgctgaaaggatgagcaagttcttgcgacactttacggttgttggggacgattaccacgcttggaatattaactacaagaagtgggagaatgaggaggaagaggaggaagaggaacagcctccaccaacacctgtatccggcgaggaaggccgagccgctgctcccgatgttgcccctgcacctggccctgctccgcgagccccattggatttccggggaatgctccgtaagctgttctcatcacacaggttccaggtcatcataatctgcctggttgtactagacgcattgcttgtgctggcggaattgatattagacctgaaaattattcagcccgacaaaaataattatgcagcaatggtgtttcattatatgtcgattacaattctggttttttttatgatggagatcatttttaagctgttcgtgttcaggttagaattctttcatcataagttcgaaattctcgacgccgtcgtagttgtcgtctcctttatccttgatatcgtgctccttttccaggagcaccagtttgaagctctggggttgttgatactcttgcgactttggagggtcgctcgcatcataaacgggatcatcattagtgtgaagaccagatccgagcgtcagctgctcaggctaaaacagatgaacgtgcagctggcagccaaaatccagcatttggaattctcctgctcggaaaaagagcaggagatcgagaggttgaataaactgttgagacaacacggtcttctgggcgaggtaaactag

SEQ ID NO: 334913 - DNA, 822 bp, Artificial Sequence
  derived and/or modified sequence
atggccacttgggatgagaaggccgtaaccagaagagcaaaggtagctcccgctgagagaatgagcaagtttctgaggcactttaccgtggtgggtgatgattaccacgcttggaacatcaactacaagaaatgggagaacgaagaagaagaggaagaagaggagcaacctccacctactccagtgagcggagaggagggacgggctgcagcaccagacgtcgcaccggcaccaggacctgctcctcgtgctccactcgattttcgtggaatgctgcgcaagcttttcagttcgcaccgatttcaggtgatcatcatttgtctcgtcgtccttgacgcgcttcttgtcttggccgagctaatactagatctgaaaatcattcaaccagataagaataattacgctgcaatggtgtttcattatatgtctatcacaatcctcgtattctttatgatggagatcatctttaagttgtttgttttccggctggagttctttcatcacaaattcgagatcctggatgctgtcgttgtggtggtctcatttatcctggatattgtccttctcttccaggagcatcagtttgaggcgttgggcctcctgattctcttgagactttggcgagtggcccgaatcatcaacggcatcatcatttccgtgaaaacacggtccgagcgtcagctcctgagattaaaacaaatgaatgtgcagctggcagcaaaaattcagcaccttgaattctcttgttccgagaaagagcaggagatcgagcggctgaacaagctccttcgccaacacgggcttctcggagaagtaaactag

SEQ ID NO: 334914 - DNA, 237 bp, Artificial Sequence
  derived and/or modified sequence
atggctacctgggatgagaaggcagtgacgcgcagggcaaaggtagctcccgctgaaaggatgtctaagttcctgagacacttcacggtagtaggtgatgactatcatgcgtggaatattaattacaaaaaatgggagaacgaggaagaagaggaagaagaggagcagccaccaccaacacctgtgtccggggaagagggacgagccgctgcacctgacgtagccccagctccgtag

SEQ ID NO: 334915 - DNA, 822 bp, Artificial Sequence
  derived and/or modified sequence
atggccacctgggacgagaaggccgtgaccagaagagccaaggtggcccccgccgagagaatgagcaagttcctgagacacttcaccgtggtgggcgacgactaccacgcctggaacatcaactacaagaagtgggagaacgaggaggaggaggaggaggaggagcagcccccccccacccccgtgagcggcgaggagggcagagccgccgcccccgacgtggcccccgcccccggccccgcccccagagcccccctggacttcagaggcatgctgagaaagctgttcagcagccacagattccaggtgatcatcatctgcctggtggtgctggacgccctgctggtgctggccgagctgatcctggacctgaagatcatccagcccgacaagaacaactacgccgccatggtgttccactacatgagcatcaccatcctggtgttcttcatgatggagatcatcttcaagctgttcgtgttcagactggagttcttccaccacaagttcgagatcctggacgccgtggtggtggtggtgagcttcatcctggacatcgtgctgctgttccaggagcaccagttcgaggccctgggcctgctgatcctgctgagactgtggagagtggccagaatcatcaacggcatcatcatcagcgtgaagaccagaagcgagagacagctgctgagactgaagcagatgaacgtgcagctggccgccaagatccagcacctggagttcagctgcagcgagaaggagcaggagatcgagagactgaacaagctgctgagacagcacggcctgctgggcgaggtgaactag

SEQ ID NO: 334916 - DNA, 237 bp, Artificial Sequence
  derived and/or modified sequence
atggccacctgggacgagaaggccgtgaccagaagagccaaggtggcccccgccgagagaatgagcaagttcctgagacacttcaccgtggtgggcgacgactaccacgcctggaacatcaactacaagaagtgggagaacgaggaggaggaggaggaggaggagcagcccccccccacccccgtgagcggcgaggagggcagagccgccgcccccgacgtggcccccgccccctag

SEQ ID NO: 334917 - DNA, 189 bp, Artificial Sequence
  derived and/or modified sequence
atgtgtggcagttattacgggaactactatggtgatcatggctatggttgctgcggatatgagggtttgggctacggttacggcagccttcggtgtggatatagttcctgttgcggctacgggcacggatacgggtcacggttcttttgcggttgtggctacggctgtggaagtgggtactactactag

SEQ ID NO: 334918 - DNA, 513 bp, Artificial Sequence
  derived and/or modified sequence
atgggatgctgcggttgctctggcggatgcgggagtggttgcggaggatgcgggagcggctgtggcggatgtgggtccggatgcggcggttatggatctggctgtgggggttgcgggtccagctgttgtgttccggtttgttgctgcaagccagtgtgttgctgcgtgccagcctgttcttgtagctcttgcgggagctgcggcggaagtaaaggcgactgtggctgtggatcttgtggaggcagtaaggggggatgtggctcatgcggatgtagtcagtgtaactgttgcaagccatgttgctgtagttccggatgcggctcctgttgccagagcagttgttgtaacccttgctgttgccagtctagctgctgcgtgccggtgtgctgtcaatccagttgctgcaagccctgctgttgccagtcttcttgttgcgtgccgagttcctgctgtcggagctgctgtagcaaaagtagttgttgcgtccctatatgttgccagtataaaatctag

SEQ ID NO: 334919 - DNA, 375 bp, Artificial Sequence
  derived and/or modified sequence
atgactccccaaggcaggggaaccgttgccgcagcagccgttgctgcaaccgccagtatcgcaggggctcccacccagtaccccccaggccgtggtacacctcctccacccgttggtagagctacaccgcctcccggtatcatggcaccacctcctggaatgcggccaccgatgggtccacctatagggctgcccccagcaaggggcacacctatcggaatgcctcctcctggtatgcggcctcctcccccagggattcggggagaggcattcctgctggctctggtatgctggtacggctggcccttagatttcggtatgagtgattatgccgcttacttgaaaaaaacatgcttccaggacttgtttaactag

SEQ ID NO: 334920 - DNA, 1338 bp, Artificial Sequence
  derived and/or modified sequence
atgcctaattcctccccaaaagatcccaccaccgccagtggcaacggaagcaaggtggaacgggaaaagcgcaaagatgaacttctaaacatagccaaatccaagcaggagcggacaaattccgaactgcacaacctcagacagatatacgtgaaacaacagagcgatcttcaatttctcaatttcaacgtggaaaattctcaggagctcattcaaatgtacgactcaaaaatggaggagagcaaagccctagacagttcacgtgacatgtgcctcagcgacctagagaataaccaccctaaagtggatattaaacgggaaaagaatcagaaatcgcttttcaaggaccagaaatttgaagccatgttggttcagcaaaataggtccgataagtcctcatgcgacgagtgtaaagagaagaagcagcagattgatactgtgtttggcgagaagagcgtgattacattgtcgagtatcttcactaaagaccttgtcgaaaagcataatcttccatggagcctaggcggtaaaacccaaatagaacctgaaaacaaaattacactgtgtaaaatccacacgaagtctccaaagtgtcacggcaccggggtgcagaatgaagggaagcaaccaagcgagacaccaacgctatcggacgaaaagcagtggcacgacgtgagcgtatatctggggctcaccaactgccctagtagtaaacatcctgaaaaactcgacgtcgaatgccaggatcaaatggaaaggagcgaaatatcttgctgtcagaaaaatgaagcctgtctcggcgaatctggaatgtgcgatagtaagtgttgccacccatcaaactttatcatcgaagcgccaggacacatgagcgacgttgaatggatgtcaatctttaagccatccaagatgcagaggattgtgcgacttaagtctggttgcacgtgctccgagagtatatgcgggacccaacacgacagcccagcctcagagctgatcgcaattcaagacagccactcactaggatcctcaaagtccgccctccgcgaggacgagaccgaatctagcagcaacaaaaagaatagtcctactagtctattaatctacaaggacgcacctgcatttaacgaaaaagcctctattgtcctgccgagccaggatgatttttctccaacctctaagttgcagaggctactcgccgaatccaggcaaatggtcaccgatttggaactgtcaacgcttcttcctattagtcacgagaaccttacaggtagtgccacaaacaaatccgaagtgccggaagagtcagcccagaaaaatacgtttgtgtcatattag

SEQ ID NO: 334921 - DNA, 1338 bp, Artificial Sequence
  derived and/or modified sequence
atgcccaacagcagccccaaggaccccaccacagccagcggaaatggcagcaaggtggagcgggagaagaggaaggatgagctgctgaacatcgccaagagcaagcaggagaggaccaacagcgagctgcacaacctgcggcagatctacgtgaagcagcagagcgacctgcagttcctgaacttcaacgtggagaacagccaggagctgatccagatgtatgacagcaagatggaggagagcaaggccctggacagcagccgggacatgtgcctgagtgacctggagaacaaccaccccaaggtggacatcaagcgggagaagaaccagaagagcctcttcaaggaccagaagtttgaggccatgctggtgcagcagaacagaagtgacaagagcagctgtgatgagtgcaaggagaagaagcagcagattgacacagtgtttggagagaagagcgtcatcaccctgagcagcatcttcaccaaggacctggtggagaagcacaacctgccctggagcctgggcggcaagacccagatcgagcctgagaacaagatcaccctgtgcaagatccacaccaagagccccaagtgccacggcactggagtgcagaatgaaggcaagcagcccagcgagacccccaccctgagtgatgagaagcagtggcatgatgtgtctgtgtacctgggcctgaccaactgccccagcagcaagcaccctgagaagctggatgtggagtgccaggaccagatggagaggtctgagatcagctgctgccagaagaatgaggcctgcctgggggagagcggcatgtgtgacagcaagtgctgccaccccagcaacttcatcatcgaggcccctggccacatgtctgatgtggagtggatgagcatcttcaagcccagcaagatgcagagaattgtgcggctgaagagcggctgcacctgcagcgagagcatctgtggcacccagcacgacagccctgccagcgagctgattgccatccaggacagccacagcctgggcagcagcaagagcgccctgcgggaggatgaaacagagagcagcagcaacaagaagaacagccccaccagcctgctgatctacaaggatgccccagccttcaatgagaaggccagcatcgtgctgcccagccaggatgacttcagccccaccagcaagctgcagaggctgctggccgagagccggcagatggtgacagacctggagctgagcaccctgctgcccatcagccatgagaacctgactggaagtgccaccaacaagtctgaggtgcctgaggagagcgcccagaagaacacctttgtgtcctactag

SEQ ID NO: 334922 - DNA, 1338 bp, Artificial Sequence
  derived and/or modified sequence
atgcccaacagcagccccaaggaccccaccaccgccagcggcaacgggtccaaggttgagcgtgagaaaagaaaggatgaactgctgaacattgccaagtcaaagcaggaacgaactaattccgagctacacaaccttcggcagatctacgttaagcaacaatccgaccttcagttcttgaactttaatgtggaaaacagtcaggagctaatccagatgtatgactctaaaatggaagagtccaaggcgctcgatagttcccgagatatgtgccttagtgacctagaaaataaccaccccaaagtggatatcaagcgggagaagaaccagaaatcattgttcaaggaccagaaatttgaggccatgctcgtgcagcaaaacagatccgacaagtcctcatgcgacgaatgtaaggaaaaaaagcagcaaatcgacacagtgttcggagaaaaatcagtgattaccctgagctcaatttttacgaaagatttggtggagaagcataacctgccttggtcccttggtgggaagacgcagatcgagcctgaaaataaaattaccttgtgcaagatacatacaaaaagtcctaaatgccacggaacaggagtgcaaaacgaggggaaacagccatccgagacacccacccttagtgatgaaaaacaatggcatgatgtctcagtgtatctgggactcacaaattgcccttcatcaaagcaccctgaaaagcttgacgtcgagtgccaggatcaaatggagagatcggaaatatcatgctgccagaaaaacgaggcttgcttaggtgaatcaggcatgtgtgattctaagtgctgtcacccatcaaattttattatcgaggcccccgggcacatgtccgacgtcgagtggatgagtatttttaagcccagtaagatgcagagaattgtgcgactgaaaagcgggtgtacttgtagcgagagcatatgtggaacccagcatgatagcccggcctccgaacttatcgctatccaggattcccatagtctgggatcaagtaaaagtgctctgcgagaggacgaaaccgagtcttctagcaacaaaaagaactctcccacctcgctgcttatctataaggacgctcccgcattcaatgaaaaggccagcattgtgcttccgagtcaggacgacttctctcctacaagtaagttgcagaggctgctggcggagtccaggcagatggtcacagaccttgaactgtccacactgctgccgatatcccacgagaacctgactgggagtgctactaataagagcgaggtgccagaggagtcggcccagaagaacacattcgtgtcatattag

SEQ ID NO: 334923 - DNA, 1338 bp, Artificial Sequence
  derived and/or modified sequence
atgccgaattcatccccgaaggaccccacaaccgccagtgggaacgggagcaaagtggagcgggagaaaaggaaggacgaactcttgaatatcgcgaaatccaaacaggaaaggacaaatagcgagctgcacaacttacggcagatctatgtgaagcagcagagcgacctgcagttcctcaacttcaatgtagagaactcccaggagctgatccagatgtacgattccaagatggaggagtccaaggcgctcgacagttcaagagacatgtgcttatcagatttggagaacaaccacccaaaggtcgatattaagcgtgaaaaaaatcagaagtcactatttaaggatcagaagttcgaagccatgctggtccaacagaaccgatcagacaaatcttcatgtgacgagtgcaaggaaaaaaaacagcagatagatactgtattcggggagaagtccgtcatcacactgtcctccatattcactaaggacctggtcgagaagcataacctcccttggagcctggggggaaaaacccaaatcgaacccgagaacaagattacactttgtaaaattcacactaagagccccaaatgtcatggaacgggcgtgcagaatgaagggaagcagccttccgaaacacctacactttctgatgagaaacagtggcacgatgtgagcgtatatcttggcttgacgaactgcccctctagcaagcatccggaaaagcttgatgtcgaatgccaagatcagatggaacggagcgagatcagttgttgccagaagaatgaggcatgccttggcgaatccggcatgtgcgactccaaatgctgtcatcccagcaacttcattattgaagcgccagggcacatgagtgatgtggagtggatgagcatcttcaaacccagcaaaatgcagcgcattgtcagactgaagagtggatgcacctgttctgaatccatttgtgggacacagcacgattcaccggcttcagagttgatagccatccaggactctcactccctgggctcgagtaaatccgccctgagagaggatgaaactgagtcttctagtaataagaagaatagtcctacgagtctcctgatctataaggatgccccagcctttaacgaaaaagcaagtattgtcctcccttctcaagacgacttttcccccacctctaagctgcagcgcctgctggctgagtctaggcagatggtgacagatttagagttatctactctactccctatcagtcacgagaacctgaccggatccgcaactaacaaatccgaggtgcccgaagagagcgcgcagaaaaatactttcgtctcgtactag

SEQ ID NO: 334924 - DNA, 2339 bp, Artificial Sequence
  derived and/or modified sequence
atgccaaacagctctccaaaagacccaactacagcttcaggaaatggctcaaaagtagagagagaaaagaggaaagatgaattgcttaatattgcgaagtcaaagcaagaacgcacaaattcagaactgcacaatctgagacagatttatgtaaaacaacagagtgatctgcagtttcttaatttcaatgtggaaaattctcaggaattaatacagatgtatgactcaaagatggaggaatcaaaggctctggactccagcagagacatgtgtttatcagaccttgaaaataaccacccaaaagtcgatattaagagggaaaaaaatcagaagtcactgtttaaggaccagaaatttgaagccatgttggttcagcaaaataggtcagacaagagctcttgcgatgaatgcaaagagaagaaacaacagatcgatactgtgtttggggagaaaagtgtaattacgctgtcatccatattcaccaaagacttagtagagaaacacaacctcccttggtctctgggaggaaaaacccagattgaacccgaaaacaaaattacattgtgcaagatccacacaaaatcaccaaaatgtcatggcactggggttcagaacgaaggaaaacaaccctcagaaacacccactttatctgatgagaagcagtggcatgatgtcagtgtttacctgggcctgaccaactgtccaagttcaaaacatccagaaaagctggatgtagaatgtcaagatcagatggaaaggtccgaaatctcatgctgccagaaaaatgaagcctgtctgggcgaaagtggcatgtgtgactccaagtgctgccacccgagtaacttcataattgaagccccaggccacatgtctgacgtggagtggatgagtattttcaagccttccaaaatgcagagaattgtccgcctcaaatctgggtgcacctgttcagaaagcatctgtggcacacaacatgactccccggcaagtgagctaattgccatccaagattcccactctttgggttcttcaaaatctgccttgagagaagatgagacggagtcctcttccaataaaaagaactcacctacgagtttgttaatctacaaagatgcaccagcattcaatgaaaaggcttcaattgtgttaccctcccaggatgatttctcgcccacgagcaagctccagcgtttgctggcggaatctcgtcagatggtgacggacctggagctgagcacactgctgcccatcagccatgagaatctcactggcagtgccacaaataagtcagaggtcccagaagagtcagctcaaaaaaatacctttgtcagttattgaaggaaacaaaaggcaacttcagtattcatcgtgatcacgaatttctcatctatgtggaaggcagaaagcagacaccaatactgaatgaatacttaaccgtaaaactgaaagaggattctagttcttcataaacggcacttaattccagctgggagcagaactagaaagttaatttttaaacatctacacttcattttcaagttaaccatttttgtgctgaagaaatattttcatgtgtaagaaagtagaccttattgtacatatagaaagttggaattatgctaagaatgaaaaagacttctctgtaaagatacggactacagttaaatgctagagaagctctttaaaaatgtgaatgtcaaatagagaaagaaccctgcatagaaagtgctgttttaactatctgatttttaaaaaatctgtgcatacatttaaattctaaacaatagcttatcagagtcagctcaaaatatatgagaaacagtattctctcatggttttagcttttgactttgctgtgtaaatagacataaggtgctttgatataaaatataaaatgtaactggaaaatagctcgaggtccttctgtcccaagctgagcagagccccatctttctgggtctatattagtcccacctactgacacaaacaaaagcttgctggaagatcgagttttagacgcatttttaaaaatcttaaagactaaaacacttccattttaacttgtaaagtaatttaattttttaaagattatactatatgcctctgtgtcttctctaaaagaatagatcaacttcagtccataaaagatatttttaatattaaagaaaaaatatgtttccttggtttctttttattttacaggagtaaaataaggaaggaacgttcatcactttaaactgaacctggcaagttaatttcctcaggaatggggatgtatttttttaagcattgcagatatcaaagttctattgtgctgaataaatgcccctttgttaaca

SEQ ID NO: 334925 - DNA, 1338 bp, Artificial Sequence
  derived and/or modified sequence
atgcccaacagcagccccaaggaccccaccaccgccagcggcaacggcagcaaggtggagagagagaagagaaaggacgagctgctgaacatcgccaagagcaagcaggagagaaccaacagcgagctgcacaacctgagacagatctacgtgaagcagcagagcgacctgcagttcctgaacttcaacgtggagaacagccaggagctgatccagatgtacgacagcaagatggaggagagcaaggccctggacagcagcagagacatgtgcctgagcgacctggagaacaaccaccccaaggtggacatcaagagagagaagaaccagaagagcctgttcaaggaccagaagttcgaggccatgctggtgcagcagaacagaagcgacaagagcagctgcgacgagtgcaaggagaagaagcagcagatcgacaccgtgttcggcgagaagagcgtgatcaccctgagcagcatcttcaccaaggacctggtggagaagcacaacctgccctggagcctgggcggcaagacccagatcgagcccgagaacaagatcaccctgtgcaagatccacaccaagagccccaagtgccacggcaccggcgtgcagaacgagggcaagcagcccagcgagacccccaccctgagcgacgagaagcagtggcacgacgtgagcgtgtacctgggcctgaccaactgccccagcagcaagcaccccgagaagctggacgtggagtgccaggaccagatggagagaagcgagatcagctgctgccagaagaacgaggcctgcctgggcgagagcggcatgtgcgacagcaagtgctgccaccccagcaacttcatcatcgaggcccccggccacatgagcgacgtggagtggatgagcatcttcaagcccagcaagatgcagagaatcgtgagactgaagagcggctgcacctgcagcgagagcatctgcggcacccagcacgacagccccgccagcgagctgatcgccatccaggacagccacagcctgggcagcagcaagagcgccctgagagaggacgagaccgagagcagcagcaacaagaagaacagccccaccagcctgctgatctacaaggacgcccccgccttcaacgagaaggccagcatcgtgctgcccagccaggacgacttcagccccaccagcaagctgcagagactgctggccgagagcagacagatggtgaccgacctggagctgagcaccctgctgcccatcagccacgagaacctgaccggcagcgccaccaacaagagcgaggtgcccgaggagagcgcccagaagaacaccttcgtgagctactag

SEQ ID NO: 334926 - protein, 1306 aa, Artificial Sequence
  derived and/or modified sequence
MAGPQMGGSAEDHPPRKRHAAEKQKKKTVIYTKCFEFESATQRPIDRQRYDENEDLSDVEEIVSVRGFSLEEKLRSQLYQGDFVHAMEGKDFNYEYVQREALRVPLIFREKDGLGIKMPDPDFTVRDVKLLVGSRRLVDVMDVNTQKGTEMSMSQFVRYYETPEAQRDKLYNVISLEFSHTKLEHLVKRPTVVDLVDWVDNMWPQHLKEKQTEATNAIAEMKYPKVKKYCLMSVKGCFTDFHIDFGGTSVWYHVFRGGKIFWLIPPTLHNLALYEEWVLSGKQSDIFLGDRVERCQRIELKQGYTFFIPSGWIHAVYTPVDSLVFGGNILHSFNVPMQLRIYEIEDRTRVQPKFRYPFYYEMCWYVLERYVYCVTQRSHLTQEYQRESMLIDAPRKPSIDGFSSDSWLEMEEEACDQQPQEEEEKDEEGEGRDRAPKPPTDGSTSPTSTPSEDQEALGKKPKAPALRFLKRTLSNESEESVKSTTLAVDYPKTPTGSPATEVSAKWTHLTEFELKGLKALVEKLESLPENKKCVPEGIEDPQALLEGVKNVLKEHADDDPSLAITGVPVVTWPKKTPKNRAVGRPKGKLGPASAVKLAANRTTAGARRRRTRCRKCEACLRTECGECHFCKDMKKFGGPGRMKQSCIMRQCIAPVLPHTAVCLVCGEAGKEDTVEEEEGKFNLMLMECSICNEIIHPGCLKIKESEGVVNDELPNCWECPKCNHAGKTGKAYKQKRGPGFKYASNLPGSLLKEQKMNRDNKEGQEPAKRRSECEEAPRRRSDEHSKKVPPDGLLRRKSDDVHLRKKRKYEKPQELSGRKRASSLQTSPGSSSHLSPRPPLGSSLSPWWRSSLTYFQQQLKPGKEDKLFRKKRRSWKNAEDRMALANKPLRRFKQEPEDELPEAPPKTRESDHSRSSSPTAGPSTEGAEGPEEKKKVKMRRKRRLPNKELSRELSKELNHEIQRTENSLANENQQPIKSEPESEGEEPKRPPGICERPHRFSKGLNGTPRELRHQLGPSLRSPPRVISRPPPSVSPPKCIQMERHVIRPPPISPPPDSLPLDDGAAHVMHREVWMAVFSYLSHQDLCVCMRVCRTWNRWCCDKRLWTRIDLNHCKSITPLMLSGIIRRQPVSLDLSWTNISKKQLSWLINRLPGLRDLVLSGCSWIAVSALCSSSCPLLRTLDVQWVEGLKDAQMRDLLSPPTDNRPGQMDNRSKLRNIVELRLAGLDITDASLRLIIRHMPLLSKLHLSYCNHVTDQSINLLTAVGTTTRDSLTEINLSGFFVGRVFGLQFWGICEPQARKNAGWA

SEQ ID NO: 334927 - protein, 706 aa, Artificial Sequence [sequence omitted]

SEQ ID NO: 334928 - DNA, 4025 bp, Artificial Sequence
  derived and/or modified sequence
gtgtgtccacatctttgagtgccgggagtttaaaagttaggcagtccttataggtatggaagccgagctaatttccttctgagccccccaaatgcctcctccacatggcgggtccgcaaatggggggatctgcagaggatcaccccccacgaaaaagacatgcagcagaaaagcaaaaaaagaaaacagttatatatacaaaatgctttgaatttgagtcggccacacagcgcccgattgaccgccagcgatacgacgagaacgaggacttgtcggacgtggaggagatcgtcagcgtccgcggcttcagcctggaggagaagcttcgcagccagctgtaccagggggacttcgtgcacgccatggagggcaaagatttcaactatgagtacgtacagagagaagctctcagggttcccctgatatttcgagaaaaggatggactgggaattaagatgcctgaccctgatttcacagtccgagacgtcaaactcctagtggggagccggcggcttgtggacgtgatggatgtgaacacccagaagggcacggagatgagcatgtcccagtttgtgcgttactacgagacgcccgaggcccagcgggacaagctgtacaacgtcatcagcctagagttcagccacaccaagctggagcacttggtcaagcgtccgactgtggtagacctggtggactgggtggacaacatgtggccccagcatctgaaggagaagcagacagaagccacgaacgccattgcagagatgaagtacccgaaagtgaaaaagtactgtctgatgagcgtgaaaggttgtttcaccgacttccacatcgactttggaggcacttccgtttggtaccatgttttccggggtgggaagattttttggctgattcctccaacgctgcacaatttggcgctgtacgaggagtgggtgctgtcaggcaaacagagtgacatctttctgggagaccgtgtggaacgatgccaaagaattgagctgaagcagggctacacatttttcatcccttccggttggatccatgccgtctacacccctgtagactctttggtgttcggcggaaacatcctgcacagctttaacgtgcccatgcagctgcggatctacgagatcgaggacaggacgcgggtgcagcccaaattccgttaccccttctactatgagatgtgctggtatgtcctggagagatacgtgtactgtgtgacccagcgctcccacctcactcaggaataccagagggagtcgatgcttattgatgccccgaggaagcccagcatagacggcttctcttcggattcctggctggagatggaggaggaggcctgtgatcagcagcctcaggaggaggaggagaaggacgaggagggcgagggcagggacagggcacccaaaccgcccaccgatggctccacttcacccaccagcacgccctctgaggaccaggaggccctcgggaagaagcccaaagcacctgccctgcgattcctcaaaaggactttgtctaatgagtcggaggaaagtgtgaagtccaccacattggccgtagactaccccaagacccccaccggctctcccgccacggaggtctctgccaaatggacccatctcactgagtttgaactgaagggcctgaaagctctggtggagaaactggaatccctcccggagaacaagaagtgtgtccccgagggcatcgaggacccccaggcactcctggagggtgtgaagaacgtcctgaaggagcacgcagatgatgaccctagtctggccatcactggggtccctgtggtgacttggccaaagaagactccaaagaaccgggctgtgggtcggcccaaggggaagctgggcccggcctccgcggtgaagttggccgccaaccggacaacggcaggagctcggcggcgccggacgcgatgccgcaagtgcgaggcctgcctgcggaccgagtgcggagagtgccacttctgcaaggacatgaagaagttcgggggccccgggcgcatgaagcagagctgcatcatgcggcagtgcatcgcgccagtgctgccccacaccgccgtgtgccttgtgtgtggcgaggcggggaaggaagacacggtggaagaggaggaaggcaagtttaacctcatgctcatggagtgctccatctgcaatgaaatcatccaccctggatgccttaagattaaggagtcagagggtgtggtcaacgacgagcttccaaactgctgggagtgtccgaagtgtaaccacgccggcaagaccgggaaagcctacaagcaaaagcgtggccctggctttaagtacgcctccaacctgcccggctccctgctcaaggagcagaagatgaaccgggacaacaaggaagggcaggaacctgccaagcggaggagtgagtgtgaggaggcgccccggcgcaggtcggatgagcactcgaagaaggtgccgccggacggccttctgcgcagaaagtctgacgacgtgcacctgaggaagaagcggaaatacgagaagccccaggagctgagtggacgcaagcgggcctcatcgcttcaaacgtcccccggttcctcctctcacctctcgccgaggccccctctaggcagcagcctcagcccctggtggagatccagtctcacttacttccagcagcagctcaaacctggcaaagaagataagcttttcaggaaaaagcggcggtcctggaagaacgccgaggaccgcatggcgctggccaacaagcccctccggcgcttcaagcaggaacccgaggacgaactgcccgaggcgccccccaagaccagggagagcgaccactcccgctccagctcccccaccgcgggacccagcaccgaaggggccgagggcccggaggagaagaagaaggtgaagatgcgccggaagcggcggcttcccaacaaggagctgagcagggagctgagcaaggagctcaaccacgagatccagaggacggagaacagcctggccaacgagaaccagcagcccatcaagtcggagcctgagagcgagggcgaggagcccaagcggcccccgggcatctgcgagcgtccccaccgcttcagcaaggggctcaacggcaccccccgggagctgcggcaccagctggggcccagcctgcgcagcccgccccgtgtcatctcccggcccccaccctccgtgtccccgcccaagtgtatccagatggagcgccatgtgatccggccaccccccatcagccccccgcctgactcgctacccctggacgatggggcagcccacgtcatgcacagggaggtgtggatggccgtcttcagctacctcagccaccaagacctgtgtgtgtgcatgcgggtctgcaggacctggaaccgctggtgctgcgataagcggttgtggacccgcattgacctgaaccactgcaagtctatcacacccctgatgctgagtggcatcatccggcgacagcccgtctccctcgacctcagctggaccaatatctccaagaagcagctgagctggctcatcaaccggctgcctgggctccgggacttggtgctgtcaggctgctcatggatcgcggtctcggccctttgcagctccagttgtccgctgctccggaccctggatgtccagtgggtggagggactaaaggatgcccagatgcgggatctcctgtccccgcccacagacaacaggccaggtcagatggacaatcggagcaagctccggaacatcgtggagctgcgcctggcaggcctggacatcacagatgcctccctgcggctcatcatccgccacatgcccctgctctccaagctccacctcagttactgtaaccacgtcaccgaccagtctatcaacctgctcactgctgttggcaccaccacccgagactccttaaccgagatcaacctgtctggcttctttgttggaagggtctttgggctccagttttggggaatatgtgaaccacaagccaggaagaatgctggctgggcatga

SEQ ID NO: 334929 - DNA, 2762 bp, Artificial Sequence
  derived and/or modified sequence
gccgagctaatttccttctgagccccccaaatgcctcctccacatggcgggtccgcaaatggggggatctgcagaggatcaccccccacgaaaaagacatgcagcagaaaagcaaaaaaagaaaacagttatatatacaaaatgctttgaatttgagtcggccacacagcgcccgattgaccgccagcgatacgacgagaacgaggacttgtcggacgtggaggagatcgtcagcgtccgcggcttcagcctggaggagaagcttcgcagccagctgtaccagggggacttcgtgcacgccatggagggcaaagatttcaactatgagtacgtacagagagaagctctcagggttcccctgatatttcgagaaaaggatggactgggaattaagatgcctgaccctgatttcacagtccgagacgtcaaactcctagtggggagccggcggcttgtggacgtgatggatgtgaacacccagaagggcacggagatgagcatgtcccagtttgtgcgttactacgagacgcccgaggcccagcgggacaagctgtacaacgtcatcagcctagagttcagccacaccaagctggagcacttggtcaagcgtccgactgtggtagacctggtggactgggtggacaacatgtggccccagcatctgaaggagaagcagacagaagccacgaacgccattgcagagatgaagtacccgaaagtgaaaaagtactgtctgatgagcgtgaaaggttgtttcaccgacttccacatcgactttggaggcacttccgtttggtaccatgttttccggggtgggaagattttttggctgattcctccaacgctgcacaatttggcgctgtacgaggagtgggtgctgtcaggcaaacagagtgacatctttctgggagaccgtgtggaacgatgccaaagaattgagctgaagcagggctacacatttttcatcccttccggttggatccatgccgtctacacccctgtagactctttggtgttcggcggaaacatcctgcacagctttaacgtgcccatgcagctgcggatctacgagatcgaggacaggacgcgggtgcagcccaaattccgttaccccttctactatgagatgtgctggtatgtcctggagagatacgtgtactgtgtgacccagcgctcccacctcactcaggaataccagagggagtcgatgcttattgatgccccgaggaagcccagcatagacggcttctcttcggattcctggctggagatggaggaggaggcctgtgatcagcagcctcaggaggaggaggagaaggacgaggagggcgagggcagggacagggcacccaaaccgcccaccgatggctccacttcacccaccagcacgccctctgaggaccaggaggccctcgggaagaagcccaaagcacctgccctgcgattcctcaaaaggactttgtctaatgagtcggaggaaagtgtgaagtccaccacattggccgtagactaccccaagacccccaccggctctcccgccacggaggtctctgccaaatggacccatctcactgagtttgaactgaagggcctgaaagctctggtggagaaactggaatccctcccggagaacaagaagtgtgtccccgagggcatcgaggacccccaggcactcctggagggtgtgaagaacgtcctgaaggagcacgcagatgatgaccctagtctggccatcactggggtccctgtggtgacttggccaaagaagactccaaagaaccgggctgtgggtcggcccaaggggaagctgggcccggcctccgcggtgaagttggccgccaaccggacaacggcaggagctcggcggcgccggacgcgatgccgcaagtgcgaggcctgcctgcggaccgagtgcggagagtgccacttctgcaaggacatgaagaagttcgggggccccgggcgcatgaagcagagctgcatcatgcggcagtgcatcgcgccagtgctgccccacaccgccgtgtgccttgtgtgtggcgaggcggggaaggaagacacggtggaagaggaggaaggcaagtttaacctcatgctcatggagtgctccatctgcaatgaaatcatccaccctggatgccttaagcgagatcaacctgtctgactgcaataaggtcactgatcagtgcctgtccttcttcaaacgctgtggaaacatctgtcatattgacctgaggtactgcaagcaagtcaccaaggaaggctgtgagcagttcatagccgagatgtctgtgagtgtccagtttgggcaagtagaagaaaaactcctgcaaaaactgagttagtccaaggataagtatgtaaatacggggcgggctctgggaggggagagactttacaaaaatgagggcttttattttccatttggaacgtgggacaacagaccacaacgcaattccattttgcaagtctttccaagggagaagctgttcaaccacccgtttgggggatgagtgagccgacactttcctttggtctttctgaatcgtaactgcactgctttctggaccatttctaaggcggcctttacaagaagacattcctgtcggagaggagggtggacttcggagaaattctcatactgaagcatgagcttaggagtttctgttagtggtagtggtgttttggacacttcattccttgcaacaccgaggttttgggtgttgacataaagtggaccacacaccacatctgctgccgtc

SEQ ID NO: 334930 - DNA, 3921 bp, Artificial Sequence
  derived and/or modified sequence
atggcaggacctcagatgggcggatcagccgaggaccaccctccgcggaagcgccatgctgcagaaaagcaaaagaaaaagacagtcatttacacgaaatgtttcgaattcgagtcggccacccagaggccaattgatcgacagaggtacgacgaaaacgaggatctttctgacgtggaagagatcgtgagcgttagaggttttagcctcgaagaaaaacttcggtcccagctctaccagggcgatttcgtgcatgcgatggagggcaaagatttcaactacgagtatgtgcaacgagaagcccttcgtgtacccctcatcttccgcgagaaagatggactggggatcaaaatgcccgatccggatttcacagttcgcgatgtaaagctgctggtgggctccagacggctggtggatgtgatggacgtgaacactcagaagggcaccgaaatgtcaatgtcgcaattcgtccgatattacgagacacctgaagcccagagagacaagctgtacaatgtgatttctctcgagttctcccataccaagctggagcacctggtgaagaggcctacggtggtagatctggttgattgggtggataacatgtggccacagcacctgaaagaaaagcaaaccgaagccacaaatgccatcgcagagatgaaatatcccaaggtgaagaaatactgcctgatgtcagtaaaaggctgctttacggattttcatattgattttggcgggaccagtgtctggtatcacgtttttagaggaggtaagattttctggctgatcccaccaacactgcataatctggccttgtatgaagagtgggtcctgtcgggcaagcagagcgatattttcctgggggacagagtagagcgctgtcaaaggatcgaactcaagcagggctacacgttcttcatcccttcaggatggatacatgctgtgtatacccccgtggattccttggtctttggtggtaacattttacacagttttaatgtacctatgcagctgcgtatatacgagattgaggataggactcgagtccagcccaagttcaggtatcccttctactacgaaatgtgctggtacgtcctggagaggtacgtgtactgcgttacccagcggagtcatctgacacaagagtatcagcgggaaagcatgctgatcgacgcgcctaggaagccttctatcgacgggttttctagcgatagttggctcgagatggaggaggaagcttgcgatcagcaaccccaggaggaagaagaaaaagacgaagagggcgagggccgggatagggcaccaaagcccccaacggacggttccacgagccctactagcacaccgtctgaggatcaggaagccctgggtaagaagcccaaagctcctgctctgagattcctgaagcggaccttgtctaatgaaagtgaggaaagcgtgaaaagcacaacacttgctgttgattacccaaaaacccctaccggctcccctgctacagaggtatccgctaaatggacccacctcacagagtttgagctgaagggacttaaggctttggtcgaaaagcttgaatctctgccagagaataagaagtgcgttccggagggtatcgaggatcctcaagccctgctggagggcgtgaagaatgtcctgaaagaacatgctgacgacgatccttctctggctataacaggagtccctgtggtgacctggccaaagaagacacccaaaaatagggcagttgggagaccaaaaggtaagttgggtccagcgtctgcggtcaagctggctgccaatagaaccacggccggagcacggagaagaagaactcggtgtagaaagtgcgaagcgtgcctgaggactgaatgcggcgaatgccacttttgtaaggatatgaagaaattcggaggtccgggcagaatgaagcagtcatgtataatgaggcagtgtatcgcacccgtgttgccacatacagctgtgtgcttggtgtgtggggaggcgggaaaagaagatactgtggaggaggaggagggaaagtttaacctgatgctgatggagtgcagcatctgtaacgagatcatccaccctgggtgccttaagatcaaagaatccgaaggcgtggttaatgacgagctgccaaattgctgggaatgtcctaagtgtaatcatgctggaaaaaccggaaaggcatacaaacagaagcgcggcccaggattcaagtatgccagtaacctacctggctcactgctcaaggagcaaaaaatgaaccgggataacaaagaaggccaggaaccagccaagcggagatcagagtgcgaggaagctcctagaaggcgatccgacgagcattcgaagaaagttcccccagacggcctgcttcgaaggaaaagtgatgacgtccacctgaggaagaaacgcaagtatgaaaaacctcaggagctctcagggcgtaaaagagcctcctccctgcagacatcccccggatcttcttcccatctgagcccgcgaccacctctgggctccagccttagcccttggtggcgctcctctctaacgtatttccaacagcaactaaagcccgggaaggaagataagctgtttagaaagaagagaagatcctggaagaatgctgaggaccggatggccctggccaataaacccttgcggcgcttcaaacaggaacccgaagatgagctgcccgaagctcctccaaagacacgagaatccgaccatagtaggtcatcatcacctaccgccgggccctcaaccgagggtgcagagggccccgaggagaagaagaaggtgaagatgcgacgaaagcggagactccctaacaaagaactcagcagggagctctctaaagagctcaatcatgagattcaacggactgagaactctctcgctaatgagaaccagcagcctataaagagtgagccagaaagtgaaggcgaagaacccaagaggcctccaggaatctgcgagagaccacaccgcttttcaaagggccttaatggaaccccccgggaactcagacaccagctcggcccgagcctgcggtccccaccgcgggtgatttctagaccccctcccagtgtatcccccccaaaatgtattcagatggaacggcacgtaattagacccccacctatttcgccgccgcccgattctctccctcttgacgacggggccgcacacgtcatgcacagggaagtgtggatggccgtgttcagttatctgtcacaccaagatctgtgtgtttgcatgcgggtctgccgcacatggaatagatggtgttgcgataagagactgtggacccgaattgacctgaaccactgcaagtccattactccgctgatgttgtccggcatcatcaggcgccaacccgttagtttagatctcagttggaccaatatttccaaaaagcagctgtcctggcttatcaaccggctgcccggcctccgtgatttggtccttagtggctgttcatggattgcggtgagcgctctgtgtagctcctcatgtccactgctccgtaccctggacgtgcagtgggtggaagggctgaaggacgcgcagatgcgagacctgctctcccctccaaccgacaatcgtcctggacagatggataacagaagcaagctgagaaacatcgtggagctcagactggctggtctggatataacggatgcatcacttaggctgataatcagacatatgccactcctctccaagcttcacctctcatactgtaatcatgtgaccgaccagtcgatcaacctgcttaccgctgttggcaccacgacacgcgactccctgaccgagattaatctcagcggcttttttgttggtagggttttcggactacagttttggggaatttgtgagccccaggctcgcaagaacgcaggctgggcttag

SEQ ID NO: 334931 - DNA, 2121 bp, Artificial Sequence
  derived and/or modified sequence
atggcggggccccagatgggaggatctgccgaggaccacccacctcgcaagaggcatgctgctgaaaaacagaagaagaaaaccgtgatctacactaaatgctttgagttcgaatctgctactcagaggcctatcgaccgccaacgctatgacgagaacgaagatctgtccgacgtagaagaaattgtgtcggtgcgaggtttctcactcgaggagaagctgagatcacaactgtatcagggggatttcgtgcacgccatggagggcaaagactttaactacgagtatgttcagagggaggcactgcgcgtgccgctgatctttcgagagaaggatggtttgggaattaagatgccagaccccgacttcacagtccgagatgtgaagcttctggtcggtagcaggaggctggtggacgtaatggatgtaaatacccagaaaggtaccgagatgtctatgagtcagtttgtgcggtattacgagacgcccgaagctcagagagataaactatataatgttatctctctcgagttctcacataccaaactcgagcacctcgttaagcggcctaccgtggtggacctggtagactgggttgacaatatgtggcctcagcacctgaaggagaagcagaccgaagcgacaaatgccatcgctgagatgaagtatccgaaggtgaagaagtactgcctgatgtccgtcaaaggttgctttacggattttcacattgactttggggggacctcagtatggtaccacgtgttccgcgggggtaagatattttggctgattccccccacccttcataatctggcgctgtatgaggaatgggtgctcagtggaaagcaatctgacatcttcctgggagaccgagtggaacgatgtcagagaatcgaactgaaacaggggtacactttctttatcccttcaggctggatacacgctgtgtatacccctgtcgatagcctcgtgtttggtggcaatatactgcacagtttcaacgtgccaatgcagctgagaatctacgagatagaggacaggacaagagtgcagcctaaattcagatatcccttctactacgaaatgtgttggtacgttctggagcgatatgtatactgcgtgactcagcggtcacacctgacacaggagtatcagcgtgagagcatgctgattgatgctcccaggaaaccatctatcgacgggtttagctctgactcctggctagaaatggaggaggaagcttgcgaccagcaaccacaggaagaggaggagaaagatgaggagggggagggccgtgacagggcccccaagccccctaccgatggctcaacctctccaacgtcaacacctagcgaggaccaggaggcattgggaaaaaaaccaaaagcacccgccctgaggttccttaaacgtaccctttctaacgagagcgaggaatccgtgaaatctaccacattagccgtcgattacccaaaaacccctaccggatcaccagccaccgaagtttcagctaagtggacccacctgactgagttcgaactgaaaggcttgaaggctctggtcgaaaagctcgagagcctcccagaaaacaagaaatgtgttcccgagggtatcgaggacccacaagcgctattggaaggagtgaaaaatgtcctgaaggagcatgctgacgatgacccgtctctggctatcaccggcgttccagtggtcacttggccaaaaaaaacccccaagaaccgggcagtgggaagacccaaaggcaagctcggccctgcatcagccgtgaagctggctgccaatcgcacaactgcgggtgccagaagacggaggacccggtgccgcaagtgtgaggcctgcctgcgaactgagtgtggagagtgccatttttgtaaggacatgaagaagtttggaggaccaggccggatgaagcagtcttgcatcatgagacagtgtattgcaccagtccttccccatacagccgtctgcttggtatgcggcgaggcaggcaaggaggatacggtggaggaggaagaaggtaaatttaatttaatgctgatggaatgctccatatgcaacgagattattcatccaggctgtctcaagagagatcagcccgtttag

SEQ ID NO: 334932 - DNA, 3921 bp, Artificial Sequence
  derived and/or modified sequence
atggccggcccccagatgggcggcagcgctgaggaccacccccccaggaagagacatgctgctgagaagcagaagaagaagacagtcatctacaccaagtgctttgaatttgaaagtgccacccagaggcccatcgaccggcagagatatgatgaaaatgaagacctgagtgatgtggaggagatcgtgtctgtgcggggcttcagcctggaggagaagctgcggagccagctgtaccagggcgactttgtgcacgccatggagggcaaggacttcaactatgaatatgtgcagcgggaggccctgcgggtgcccctcatcttccgggagaaggatggcctgggcatcaagatgccagaccctgacttcaccgtgagagatgtgaagctgctggtgggcagccggcggctggtggatgtgatggatgtgaacacccagaagggcacagagatgtccatgagccagtttgtgcgctactatgagaccccagaggcccagagggacaagctgtacaacgtcatcagcctggagttcagccacaccaagctggagcacctggtgaagaggcccaccgtggtggacctggtggactgggtggacaacatgtggccccagcacctgaaggagaagcagacagaggccaccaatgccatcgccgagatgaagtaccccaaggtgaagaagtactgcctgatgtctgtgaagggctgcttcacagacttccacatcgactttggaggcacctctgtgtggtaccacgtgttccggggcggcaagatcttctggctgatcccccccaccctgcacaacctggccctgtatgaggagtgggtgctgagcggcaagcagagcgacatcttcctgggggacagagtggagcgctgccagagaattgagctgaagcagggctacaccttcttcatccccagcggctggattcatgctgtgtacacccctgtggacagcctggtgtttggaggcaacatcctgcacagcttcaacgtgcccatgcagctgcgcatctatgaaattgaggacaggaccagggtgcagcccaagttccgctaccccttctactatgagatgtgctggtacgtgctggagcgctacgtgtactgtgtgacccagaggagccacctgacccaggagtaccagcgggagagcatgctgattgatgcccccaggaagcccagcattgatggcttcagcagtgacagctggctggagatggaggaggaggcctgtgaccagcagccccaggaggaggaggagaaggatgaggagggggagggccgggaccgggcccccaagccacccacagatggcagcaccagccccaccagcaccccatctgaggaccaggaggccctgggcaagaagcccaaggccccagccctgcgcttcctgaagaggaccctgagcaatgaaagtgaggagagcgtgaagagcaccaccctggccgtggactaccccaagacccccaccggcagccctgccacagaggtgtctgccaagtggacccacctgacagaatttgagctgaagggcctgaaggccctggtggagaagctggagagcctgcctgagaacaagaagtgtgtgcctgagggcatcgaggacccccaggccctgctggagggcgtgaagaatgtgctgaaggagcacgcagatgatgaccccagcctggccatcactggagtgcctgtggtgacctggcccaagaagacccccaagaacagagctgtgggccggcccaagggcaagctgggccctgccagcgctgtgaagctggccgccaacagaaccacagctggggccaggagaagaaggacccgctgcaggaaatgtgaggcctgcctgaggacagaatgtggggagtgccacttctgcaaggacatgaagaagtttggaggccctggccgcatgaagcagagctgcatcatgaggcagtgcatcgcccctgtgctgccccacacagctgtgtgcctggtgtgtggggaggccggcaaggaggacacagtggaggaggaggagggcaagttcaacctgatgctgatggagtgcagcatctgcaatgagatcatccaccctggctgcctgaagatcaaggagagcgagggcgtggtgaatgatgagctgcccaactgctgggagtgccccaagtgcaaccacgccggcaagacaggcaaggcctacaagcagaagaggggccctggcttcaagtatgccagcaacctgcccggcagcctgctgaaggagcagaagatgaacagagacaacaaggagggccaggagcccgccaagagaagaagtgaatgtgaggaggcccccaggagaagaagtgatgagcacagcaagaaggtgcccccagatggcctgctgcggaggaagagtgatgatgtgcacctgaggaagaagaggaaatatgagaagccccaggagctgagcggcaggaagagggccagcagcctgcagaccagccctggcagcagcagccacctgagcccccggccccccctgggcagcagcctgagcccctggtggaggagcagcctgacctacttccagcagcagctgaagccaggcaaggaggacaagctgttcaggaagaagaggaggtcctggaagaatgctgaggacaggatggccctggccaacaagcccctgcggcgcttcaagcaggagccagaagatgagctgcctgaggccccacccaagacccgggagagtgaccacagccgcagcagcagccccacagctggccccagcacagagggcgctgagggccctgaggagaagaagaaggtgaagatgaggaggaagaggcggctgcccaacaaggagctgagccgggagctgagcaaggagctgaaccacgagatccagaggacagagaacagcctggccaatgaaaaccagcagcccatcaagtctgagcctgagagcgagggggaggagcccaagaggcctcctggcatctgtgagcggccccaccgcttcagcaagggcctgaatggcaccccccgggagctgcggcaccagctgggccccagcctgcggagcccccccagggtcatcagccggcccccacccagcgtgtccccacccaagtgcatccagatggagcggcacgtgatccggcccccacccatcagccccccaccagacagcctgcccctggatgatggagctgcccacgtgatgcaccgggaggtgtggatggctgtgttctcctacctgagccaccaggacctgtgtgtgtgcatgagggtgtgcaggacctggaaccgctggtgctgtgacaagaggctgtggaccagaattgacctgaaccactgcaagagcatcacccccctgatgctgagcggcatcatccggcggcagcctgtgtccctggacctgtcctggaccaacatcagcaagaagcagctgtcctggctgatcaaccggctgcccggcctgcgggacctggtgctgagcggctgctcctggattgctgtgtctgccctgtgcagcagcagctgccccctgctgcggaccctggatgtgcagtgggtggagggcctgaaggatgcccagatgagggacctgctgagccccccaacagacaaccggcccggccagatggacaacagaagcaagctgaggaacatcgtggagctgcggctggccggcctggacatcacagatgccagcctgcggctcatcatccgccacatgcccctgctgagcaagctgcacctgagctactgcaaccacgtgacagaccagagcatcaacctgctgacagctgtgggcaccaccacccgggacagcctgacagagatcaacctgagcggcttctttgtgggccgggtgtttggcctgcagttctggggcatctgtgagccccaggccaggaagaatgccggctgggcctag

SEQ ID NO: 334933 - DNA, 2121 bp, Artificial Sequence
  derived and/or modified sequence
atggccggcccccagatgggcggcagcgctgaggaccacccccccaggaagagacatgctgctgagaagcagaagaagaagacagtcatctacaccaagtgctttgaatttgaaagtgccacccagaggcccatcgaccggcagagatatgatgaaaatgaagacctgagtgatgtggaggagatcgtgtctgtgcggggcttcagcctggaggagaagctgcggagccagctgtaccagggcgactttgtgcacgccatggagggcaaggacttcaactatgaatatgtgcagcgggaggccctgcgggtgcccctcatcttccgggagaaggatggcctgggcatcaagatgccagaccctgacttcaccgtgagagatgtgaagctgctggtgggcagccggcggctggtggatgtgatggatgtgaacacccagaagggcacagagatgtccatgagccagtttgtgcgctactatgagaccccagaggcccagagggacaagctgtacaacgtcatcagcctggagttcagccacaccaagctggagcacctggtgaagaggcccaccgtggtggacctggtggactgggtggacaacatgtggccccagcacctgaaggagaagcagacagaggccaccaatgccatcgccgagatgaagtaccccaaggtgaagaagtactgcctgatgtctgtgaagggctgcttcacagacttccacatcgactttggaggcacctctgtgtggtaccacgtgttccggggcggcaagatcttctggctgatcccccccaccctgcacaacctggccctgtatgaggagtgggtgctgagcggcaagcagagcgacatcttcctgggggacagagtggagcgctgccagagaattgagctgaagcagggctacaccttcttcatccccagcggctggattcatgctgtgtacacccctgtggacagcctggtgtttggaggcaacatcctgcacagcttcaacgtgcccatgcagctgcgcatctatgaaattgaggacaggaccagggtgcagcccaagttccgctaccccttctactatgagatgtgctggtacgtgctggagcgctacgtgtactgtgtgacccagaggagccacctgacccaggagtaccagcgggagagcatgctgattgatgcccccaggaagcccagcattgatggcttcagcagtgacagctggctggagatggaggaggaggcctgtgaccagcagccccaggaggaggaggagaaggatgaggagggggagggccgggaccgggcccccaagccacccacagatggcagcaccagccccaccagcaccccatctgaggaccaggaggccctgggcaagaagcccaaggccccagccctgcgcttcctgaagaggaccctgagcaatgaaagtgaggagagcgtgaagagcaccaccctggccgtggactaccccaagacccccaccggcagccctgccacagaggtgtctgccaagtggacccacctgacagaatttgagctgaagggcctgaaggccctggtggagaagctggagagcctgcctgagaacaagaagtgtgtgcctgagggcatcgaggacccccaggccctgctggagggcgtgaagaatgtgctgaaggagcacgcagatgatgaccccagcctggccatcactggagtgcctgtggtgacctggcccaagaagacccccaagaacagagctgtgggccggcccaagggcaagctgggccctgccagcgctgtgaagctggccgccaacagaaccacagctggggccaggagaagaaggacccgctgcaggaaatgtgaggcctgcctgaggacagaatgtggggagtgccacttctgcaaggacatgaagaagtttggaggccctggccgcatgaagcagagctgcatcatgaggcagtgcatcgcccctgtgctgccccacacagctgtgtgcctggtgtgtggggaggccggcaaggaggacacagtggaggaggaggagggcaagttcaacctgatgctgatggagtgcagcatctgcaatgagatcatccaccctggctgcctgaagagggaccagcctgtgtag

SEQ ID NO: 334934 - DNA, 3921 bp, Artificial Sequence
  derived and/or modified sequence
atggccggcccccagatgggcggcagcgccgaggaccaccccccccgaaaaaggcacgcagccgaaaagcagaaaaagaagacagttatctatacaaaatgtttcgagtttgaatccgcgacccagaggcctatcgaccgccagcggtatgacgagaacgaagatttgtctgacgttgaagagatcgtgagtgtacgcggtttttctctcgaggagaaacttaggtcccagctatatcagggggatttcgtacatgctatggagggcaaggattttaactatgaatacgtccaaagagaggctcttagagtgccattgatttttagagagaaagacggccttggcatcaaaatgcctgacccagattttaccgttagagatgtcaagcttttggttggttctcggaggttagtggacgtgatggacgttaatactcagaagggcacagaaatgtctatgagccaattcgtgaggtactatgaaacaccagaagcccagagggacaagttatataacgtaatctctctggagttttcccatactaagttggaacatttggtgaaaaggccaactgttgtcgatctcgtggattgggttgataacatgtggccccagcatttaaaggaaaagcagactgaagctacaaatgcaatagcagaaatgaaataccccaaagttaaaaagtactgcttgatgtctgtgaaaggatgcttcactgatttccatatcgacttcggaggaacctccgtgtggtaccacgtcttcagaggtggcaaaattttctggctcataccccccacactgcacaacctggctctgtacgaggagtgggtcctgtccggcaagcagtctgatatcttccttggagatcgtgttgaaagatgccagcggatcgagctgaagcaggggtacactttcttcattcccagcggttggatccacgctgtttataccccggtagattcgctggtgttcgggggcaacatcttgcactcttttaatgtgcctatgcagctgaggatctatgagattgaagaccgcactagggtacaaccaaaatttcggtacccattctactacgagatgtgttggtacgttttggaacggtacgtatactgtgtcacacaacgcagccacttgactcaagagtaccagcgagaaagtatgctgatcgatgcaccccgaaaacctagcatcgacggatttagtagcgactcttggctcgagatggaggaggaggcatgcgatcagcaaccccaggaagaggaggaaaaggatgaggaaggagaaggcagagaccgggcccccaagcctcctaccgacggctctacctcccctactagtaccccttccgaggatcaggaggccctgggaaaaaaaccaaaagcacctgctctgcgtttcctgaagcgtaccctctccaacgaatctgaagaaagcgtcaaatctacgacactggcagtggactatccgaaaacacctacagggtcccccgcaacagaagtgtccgctaagtggactcacctgactgaattcgagctgaaggggctcaaagcgctagtcgagaagctcgaatctctgcccgagaacaagaagtgcgtgccagaagggattgaagaccctcaggcactcctagaaggcgtcaaaaatgtgctgaaagagcatgcggacgacgacccctccctagccattaccggtgtgcccgtcgtgacctggcctaaaaaaacgcccaagaatagggctgtcggaagaccaaagggtaagctgggaccagcaagtgccgtaaaactggctgccaatcggacaaccgctggagctagaaggcggcggacacggtgccgtaaatgcgaggcatgtctgcgaacagaatgtggggagtgtcatttctgtaaagacatgaaaaaatttggagggcccggaaggatgaaacagtcatgtattatgcggcaatgcatcgcccccgttctaccgcacacagcggtttgtctggtttgtggggaggctggtaaggaggacacggtggaggaagaggaaggtaaatttaatttgatgctcatggagtgcagtatttgcaacgaaatcatccacccgggttgcctaaaaattaaggaatccgagggcgtagttaacgacgaactgcccaactgctgggaatgtcccaaatgtaaccacgccggtaaaaccggcaaggcctataagcaaaaaaggggccccggctttaaatatgcgtctaacctccccggttctctgctcaaagaacagaagatgaaccgggataacaaagagggacaggaaccggcaaagaggcgctcagaatgtgaagaggctccgcgcagacgaagcgatgagcacagtaagaaggttccccccgacggactgctgaggagaaaaagtgacgatgtgcatctccgcaagaaacgcaaatatgagaagcctcaagaactaagcggacgcaagagagcctcatccttacagacctcgccaggctcttccagccatctgagcccccgccctcccctgggctcctcactgtctccatggtggagatcctctcttacctacttccagcagcagttaaagccaggaaaggaagataaactcttcagaaagaagagaaggtcttggaagaacgcagaggatcgcatggccttggcaaataaacctctccgacgctttaagcaagaacccgaggatgagttaccagaagccccacccaagacgagagagtctgaccacagtagaagtagctcacctacagccgggcccagcaccgagggagcagaaggacctgaggagaaaaaaaaggttaagatgcgacgaaagcggcgactaccaaacaaagaattgtcacgggagctatccaaggaactcaaccacgaaattcagcggactgaaaactccttagctaatgagaaccagcagccaatcaaatctgagccggaatcagagggcgaagagcccaaaagaccccctgggatatgtgaaagacctcatagattttctaaaggactgaacggtacacctcgcgagctgaggcaccagcttggcccctcgttgcggtcacccccaagggtcatctcacgaccccccccttccgtgtcaccaccaaagtgtattcagatggagcggcatgtcattaggccaccccccatctctcctcctcctgactctctgccactcgacgatggagcagcccacgtcatgcaccgagaagtttggatggctgtcttcagctacctgagccaccaggacttatgtgtatgcatgagagtttgcaggacttggaatagatggtgttgcgacaagaggctgtggactcggatcgatttgaaccactgtaaaagtatcactcccctgatgctgtctggcatcatccggagacaacccgtgagcctggatttatcttggacaaacatctccaagaaacagctgtcctggctcattaacaggctgccgggcctgcgcgatttggtccttagcggatgttcttggattgccgtctctgctctgtgtagctcttcttgccccctcctgaggacccttgacgtacaatgggtcgaaggccttaaggatgcccaaatgcgagacctgctatcccctccgaccgacaacaggcctggccagatggacaataggtcgaaactacggaacatcgtcgagctgcgattagccggcctggacatcactgacgcatcactgcgtttaataatccgtcacatgcccctattatcgaagctgcacctgtcatattgcaaccacgtcacggatcaatccataaatttactaactgcggtgggtacgacgacccgggatagtctcaccgaaatcaatctttctggctttttcgttggacgggtgtttggcctgcagttctgggggatatgcgagccccaggcgcgcaagaatgcggggtgggcctag

SEQ ID NO: 334935 - DNA, 2121 bp, Artificial Sequence
  derived and/or modified sequence
atggccggcccccagatgggcggcagcgccgaggaccaccccccccgaaagcgccacgcagccgagaagcagaaaaaaaagaccgtaatttacaccaagtgtttcgagttcgagagcgcaacccagcgacctattgatcgtcagcggtacgatgaaaacgaggatctaagcgatgtcgaggagatagtgagcgtcagagggttctccctcgaagagaaactgagatcccagctgtaccagggagacttcgtgcacgccatggagggcaaagactttaactatgaatacgttcagcgggaggctcttcgggtgccgttaatttttcgggaaaaggacggtctcggcatcaaaatgcctgacccagacttcaccgtgcgggatgttaagctacttgtaggaagtagaagactagtggacgtgatggatgtgaatactcaaaagggtacagagatgtcgatgagtcagtttgtacggtactatgaaaccccggaggcccagagagataaactgtacaatgttattagcctcgagtttagccatacaaagctggaacacctggtgaaaagaccgaccgtggttgatctggtggattgggtggacaatatgtggcctcaacatttgaaggagaagcaaaccgaagcgacaaacgccattgccgagatgaagtacccaaaggtaaagaagtactgtctcatgagtgtgaaggggtgctttaccgacttccatatcgattttggcggaaccagcgtatggtaccacgtatttcggggcggcaagatcttctggcttatcccacccacactacataatttagctctgtacgaggagtgggtcctcagcggtaagcagtccgatatctttctcggcgatcgtgttgagaggtgtcagaggattgagctgaaacagggttacacatttttcatcccctctggatggatccacgccgtgtacactcccgtcgactccctggtgtttggtggtaacatcttgcactcgtttaatgtccctatgcaactccgaatttatgaaattgaggaccggacgcgtgtacaaccaaagtttcgttaccctttctattacgagatgtgctggtacgtgcttgaacggtacgtctactgcgtcactcaacggtcccacctaactcaggagtaccagcgggaaagtatgttaattgacgctccaaggaagccctcaattgacggattctcaagcgacagctggctcgagatggaagaggaagcatgcgaccagcaaccccaggaagaagaggaaaaggatgaagagggggagggtcgtgaccgggctcctaaaccacccactgatggttccacgtcacctacgtccacacccagtgaggaccaggaggctttaggcaagaagccgaaagcacccgccctccggttcctgaagcggacactgtctaacgagtctgaagaaagcgtcaaatccacgaccctggccgtggactacccaaagacccctacaggttcacccgccaccgaggttagtgccaagtggacacacctcactgagtttgaactaaagggcttaaaggctctggtggaaaaactagagagtctgccggagaacaaaaaatgcgttcctgagggaatcgaagacccacaggccctgctcgaaggcgtgaagaatgtgctgaaagagcacgctgatgacgaccccagcctagcgattacaggggtcccagtggtgacctggcctaaaaagactcccaagaaccgggcagtcggacgcccaaagggcaaactgggccctgcatcggcggttaaactcgcagcgaatcggacaaccgcaggagcaaggcgtcgaagaactcgctgcagaaaatgcgaagcttgcctgcggaccgagtgtggagagtgtcacttttgtaaggatatgaaaaaatttggtggtccggggcgcatgaaacagtcctgcattatgcgccagtgtatcgcgcctgtcctgccgcacacagccgtgtgcctcgtttgcggcgaggccgggaaggaagacactgtggaagaggaggagggtaagttcaacctaatgctgatggagtgctctatctgcaacgaaatcatccatcccggctgcctgaagcgcgatcaacctgtctag

SEQ ID NO: 334936 - DNA, 3921 bp, Artificial Sequence
  derived and/or modified sequence
atggcgggtccgcagatgggaggctcagctgaagatcaccctccacgaaagaggcacgcggcagagaagcagaagaagaaaactgtcatctatacaaaatgctttgaattcgagtcagctacacagcgtcctattgatcgccaacgctacgacgaaaacgaagacctgagtgacgtggaggagattgtctcagttaggggtttttctctagaggaaaagctgaggagccaactctaccagggggacttcgtacacgcaatggaaggaaaggattttaactatgagtatgttcagagggaggccttgcgagtgcccttgattttccgggaaaaagatgggctgggtattaaaatgcctgatcctgactttactgtccgggatgttaaattgctcgtcggatctcgacggctggttgatgtaatggacgtgaacacgcagaagggtaccgagatgagcatgtctcagttcgtcaggtactatgaaacaccagaagcacagcgcgataaactgtataatgtgatcagcctggagttttcgcataccaaactggagcacctcgtaaagcggcctaccgttgtggatctggtagattgggtggataacatgtggcctcagcacctcaaagagaaacaaactgaagcgacaaatgcaatcgcagagatgaaataccccaaggtaaagaagtattgtctaatgagcgtgaagggatgttttaccgattttcatatcgacttcggcggaacctcagtgtggtatcacgtgtttcgcggagggaaaatcttttggttaatccccccaaccttacacaatctggcgctctatgaggaatgggtactgagcggaaagcagtctgatatattcttgggagacagagtcgagcggtgtcagaggatcgaattgaagcagggttatactttctttatccctagcggttggattcacgcagtgtatacacccgtggatagtctggtatttgggggtaatatacttcactcatttaatgtacccatgcagctacgaatctacgagatcgaggacagaacacgagtgcagcctaagttccgttatccgttttattatgaaatgtgttggtacgtgctggaaaggtacgtgtactgtgtgactcagcgctcccatttaactcaagagtatcagcgcgagtcgatgctgatagacgcccctcggaagccaagtatcgacggtttctcaagcgattcttggttagaaatggaagaggaagcctgcgatcagcagccacaggaggaggaagaaaaagacgaagaaggagaaggacgggatcgcgcaccgaagcctcccacagacggcagcactagtcccaccagtaccccctctgaggaccaagaggcacttggcaaaaaaccaaaggctccagccctgcggttcctgaagagaaccctgtccaatgagagcgaagagtctgtgaaaagtactacactggcggtcgactaccctaagacccccactgggtccccggcaaccgaggtctccgcaaagtggacccacctgactgaattcgaattgaaaggcctgaaggcactggtagaaaaacttgagtctctgccagagaacaagaaatgcgtgccagagggtatcgaggatcctcaagctttactcgaaggcgtgaagaacgtgctaaaagaacacgcagatgacgacccttcgcttgctatcacgggagtgccggtcgtgacatggccgaagaaaacgcccaaaaacagagctgtgggccgtcccaaggggaaacttggaccagccagcgctgtcaagcttgccgctaatcgtacaactgccggtgcccgtcgtcgacgcacaagatgtcggaagtgtgaggcatgcctgcgcacagagtgtggggagtgtcatttttgcaaagacatgaagaagttcggtggccctggacgtatgaaacagtcttgtatcatgcggcagtgcattgccccagtgcttccacacactgctgtttgtctcgtgtgcggagaggctggcaaggaagacaccgtggaagaagaggagggtaagtttaaccttatgctcatggaatgttctatttgcaatgaaatcattcacccaggatgcctcaaaatcaaggaaagtgagggcgtggtgaacgatgagttgcctaattgttgggaatgtccgaagtgcaaccacgctgggaagaccggaaaagcgtacaagcagaagcgcggacccggattcaagtacgccagcaatctccccggtagcctgctcaaggagcagaagatgaaccgcgacaataaagaggggcaagagcccgctaagcgacgctctgagtgtgaagaagcgcctaggcggagatccgacgagcactccaaaaaggtacccccagacggactcttgcgaagaaagtcagacgatgtccatctccgtaagaagcgcaagtatgagaaacctcaggaactgagtgggagaaaacgtgctagctctctgcaaaccagtcccggatcctcaagccacctctctcctaggcctccgctcgggagcagccttagtccctggtggcggtcatctctgacatatttccagcagcagctgaagccagggaaagaggataagctgtttcgaaagaagaggcggtcctggaaaaatgccgaagatagaatggccctggctaacaagcctttaagacgctttaagcaggaaccggaagatgagctgcctgaggcccctcctaagacaagagaatccgatcatagccgcagttcttcgcccaccgcgggtcctagcactgaaggtgcagaaggacctgaggaaaagaagaaagttaaaatgcggaggaagagacgtttacctaacaaggaactgtcgcgtgagctatctaaggagcttaaccacgaaattcaacgcactgagaattctttggccaacgagaaccaacagcctataaagagcgaacccgagagcgagggggaggaaccaaagaggcccccagggatatgtgaacggccacatcgattctctaaaggcctcaatggcacccctcgggaattgagacaccaactgggacctagcctgcggagtccaccacgggtaatctcgagaccgccacccagcgtatctccccctaaatgcattcagatggagagacatgtcatccgtcccccaccaatctccccgcctcccgattcattacctcttgatgacggcgcagcacacgtgatgcatagagaagtctggatggccgtgttctcctatctttcacatcaggacctgtgcgtctgcatgcgggtatgtagaacttggaaccgctggtgttgtgataagagactctggacacgcatagatcttaaccattgcaaaagcattactcccctgatgctcagtggaataatacgccgtcagcctgtcagccttgatttatcctggacgaacatttctaagaaacagttgagttggctcataaatcgtctgccaggcctgagggatctcgtgctctccggctgttcctggatagcagtgtcggcactatgctcctcctcatgtcctctgctgcggaccctagatgtccagtgggtggaaggcctcaaggatgcacagatgcgggacctgttaagtccccctaccgataaccgccctggccaaatggacaatcgatctaagctgcgcaatatcgtagagctccgtctggccggattggatataacggatgcatccctgcggcttatcatccgccacatgcctttgctgtctaagctgcacctctcctattgcaaccacgtgacagatcagtctatcaatttactgactgccgtcggtaccactactagagactctctgaccgaaataaacctatctggcttctttgtaggtcgcgtgttcggcctccaattttggggcatctgcgagccacaggcccgaaagaacgcgggttgggcctag

SEQ ID NO: 334937 - DNA, 2121 bp, Artificial Sequence
  derived and/or modified sequence
atggcaggtccccagatgggcggttcagcagaggaccacccacctcgtaagcggcacgctgctgagaaacagaaaaagaaaaccgttatctacaccaagtgcttcgagtttgagtctgccacacaaagacccatagataggcagaggtacgatgagaatgaagatctgtctgacgtcgaggaaatcgtgtccgtgaggggattctcactggaggaaaaactgcggtcccagttgtatcaaggagatttcgtgcacgctatggaagggaaggactttaactatgaatatgtgcagagagaggcactacgcgtccccctgatcttccgtgaaaaggacggcctaggcatcaaaatgccagaccctgatttcacggtcagagatgtcaaactgctcgtcggtagtcggagactcgtcgatgtaatggatgtaaatactcagaagggaaccgagatgtctatgagccagtttgttagatactacgagacgcccgaggctcagcgcgacaagctctataatgtgatctcactggagttcagtcatactaagctggaacacctcgtcaaacgccctaccgttgtagacctagtcgattgggtggacaacatgtggccccagcacctgaaagagaagcagacagaagctacaaatgcgatcgcagaaatgaagtaccctaaggtgaaaaagtattgtcttatgtcagtgaaaggctgttttaccgacttccatatcgattttgggggaacatccgtctggtaccatgtttttcgtggaggcaagatcttttggttgatccctccaaccctccacaatttggccctctatgaagaatgggtcctgagcggaaagcagagcgatattttccttggtgacagagtcgaaaggtgccaacgaatcgagctgaaacagggatatactttttttatcccctctggttggatccacgctgtgtacacccctgtggactccttggtcttcggtggcaacatcctgcatagctttaacgtccctatgcagctccgaatctatgagatcgaagatcgcacaagagtgcagcctaagtttagataccccttttactacgagatgtgttggtatgtgttagagagatacgtgtactgcgttacgcagcgcagtcacttaacacaggagtaccagcgggaatcaatgctcatagacgcccctcggaagccctcaatcgatggcttctccagtgactcttggctagaaatggaggaggaggcttgcgatcaacaaccacaggaggaagaggaaaaggacgaggagggcgagggtcgcgacagggcaccaaaacccccaacggatggctctactagccctactagcacccctagcgaggatcaagaggctttgggaaagaagcccaaagcaccagccctgagatttctaaagcgtaccttatcaaatgagagcgaggagtcggtaaagagcaccaccctggctgtcgactatcccaaaactccgacaggtagccctgctacagaagtaagtgcaaagtggacccatctaaccgagttcgagctgaaaggacttaaggccctggtcgagaagctggagtcactgcctgaaaacaaaaaatgtgtgcctgaaggcattgaagacccacaagccctcctcgaaggagtgaaaaatgtgctgaaagagcatgcagatgacgatccaagcttggccataaccggcgtccctgtggtgacctggccaaagaagaccccaaagaaccgggcagtggggaggcccaaagggaagttgggtccagcttctgcagtgaaactggctgctaacaggaccacagcaggtgcacgaaggcgaaggacccgttgtagaaagtgcgaggcttgtctccggaccgaatgtggagagtgccatttctgtaaggacatgaaaaagttcgggggtcccggacgcatgaaacagtcttgtattatgcgccaatgcatcgccccagtcctcccacataccgcggtgtgccttgtgtgcggtgaagcgggtaaggaagatacagtcgaggaggaagaggggaagtttaacctgatgctgatggagtgctcgatttgcaatgaaatcattcatcccggatgcctgaagcgggatcagcccgtatag

SEQ ID NO: 334938 - DNA, 3921 bp, Artificial Sequence
  derived and/or modified sequence
atggccggcccccagatgggcggcagcgccgaggaccacccccccagaaagagacacgccgccgagaagcagaagaagaagaccgtgatctacaccaagtgcttcgagttcgagagcgccacccagagacccatcgacagacagagatacgacgagaacgaggacctgagcgacgtggaggagatcgtgagcgtgagaggcttcagcctggaggagaagctgagaagccagctgtaccagggcgacttcgtgcacgccatggagggcaaggacttcaactacgagtacgtgcagagagaggccctgagagtgcccctgatcttcagagagaaggacggcctgggcatcaagatgcccgaccccgacttcaccgtgagagacgtgaagctgctggtgggcagcagaagactggtggacgtgatggacgtgaacacccagaagggcaccgagatgagcatgagccagttcgtgagatactacgagacccccgaggcccagagagacaagctgtacaacgtgatcagcctggagttcagccacaccaagctggagcacctggtgaagagacccaccgtggtggacctggtggactgggtggacaacatgtggccccagcacctgaaggagaagcagaccgaggccaccaacgccatcgccgagatgaagtaccccaaggtgaagaagtactgcctgatgagcgtgaagggctgcttcaccgacttccacatcgacttcggcggcaccagcgtgtggtaccacgtgttcagaggcggcaagatcttctggctgatcccccccaccctgcacaacctggccctgtacgaggagtgggtgctgagcggcaagcagagcgacatcttcctgggcgacagagtggagagatgccagagaatcgagctgaagcagggctacaccttcttcatccccagcggctggatccacgccgtgtacacccccgtggacagcctggtgttcggcggcaacatcctgcacagcttcaacgtgcccatgcagctgagaatctacgagatcgaggacagaaccagagtgcagcccaagttcagataccccttctactacgagatgtgctggtacgtgctggagagatacgtgtactgcgtgacccagagaagccacctgacccaggagtaccagagagagagcatgctgatcgacgcccccagaaagcccagcatcgacggcttcagcagcgacagctggctggagatggaggaggaggcctgcgaccagcagccccaggaggaggaggagaaggacgaggagggcgagggcagagacagagcccccaagccccccaccgacggcagcaccagccccaccagcacccccagcgaggaccaggaggccctgggcaagaagcccaaggcccccgccctgagattcctgaagagaaccctgagcaacgagagcgaggagagcgtgaagagcaccaccctggccgtggactaccccaagacccccaccggcagccccgccaccgaggtgagcgccaagtggacccacctgaccgagttcgagctgaagggcctgaaggccctggtggagaagctggagagcctgcccgagaacaagaagtgcgtgcccgagggcatcgaggacccccaggccctgctggagggcgtgaagaacgtgctgaaggagcacgccgacgacgaccccagcctggccatcaccggcgtgcccgtggtgacctggcccaagaagacccccaagaacagagccgtgggcagacccaagggcaagctgggccccgccagcgccgtgaagctggccgccaacagaaccaccgccggcgccagaagaagaagaaccagatgcagaaagtgcgaggcctgcctgagaaccgagtgcggcgagtgccacttctgcaaggacatgaagaagttcggcggccccggcagaatgaagcagagctgcatcatgagacagtgcatcgcccccgtgctgccccacaccgccgtgtgcctggtgtgcggcgaggccggcaaggaggacaccgtggaggaggaggagggcaagttcaacctgatgctgatggagtgcagcatctgcaacgagatcatccaccccggctgcctgaagatcaaggagagcgagggcgtggtgaacgacgagctgcccaactgctgggagtgccccaagtgcaaccacgccggcaagaccggcaaggcctacaagcagaagagaggccccggcttcaagtacgccagcaacctgcccggcagcctgctgaaggagcagaagatgaacagagacaacaaggagggccaggagcccgccaagagaagaagcgagtgcgaggaggcccccagaagaagaagcgacgagcacagcaagaaggtgccccccgacggcctgctgagaagaaagagcgacgacgtgcacctgagaaagaagagaaagtacgagaagccccaggagctgagcggcagaaagagagccagcagcctgcagaccagccccggcagcagcagccacctgagccccagaccccccctgggcagcagcctgagcccctggtggagaagcagcctgacctacttccagcagcagctgaagcccggcaaggaggacaagctgttcagaaagaagagaagaagctggaagaacgccgaggacagaatggccctggccaacaagcccctgagaagattcaagcaggagcccgaggacgagctgcccgaggccccccccaagaccagagagagcgaccacagcagaagcagcagccccaccgccggccccagcaccgagggcgccgagggccccgaggagaagaagaaggtgaagatgagaagaaagagaagactgcccaacaaggagctgagcagagagctgagcaaggagctgaaccacgagatccagagaaccgagaacagcctggccaacgagaaccagcagcccatcaagagcgagcccgagagcgagggcgaggagcccaagagaccccccggcatctgcgagagaccccacagattcagcaagggcctgaacggcacccccagagagctgagacaccagctgggccccagcctgagaagcccccccagagtgatcagcagacccccccccagcgtgagcccccccaagtgcatccagatggagagacacgtgatcagacccccccccatcagccccccccccgacagcctgcccctggacgacggcgccgcccacgtgatgcacagagaggtgtggatggccgtgttcagctacctgagccaccaggacctgtgcgtgtgcatgagagtgtgcagaacctggaacagatggtgctgcgacaagagactgtggaccagaatcgacctgaaccactgcaagagcatcacccccctgatgctgagcggcatcatcagaagacagcccgtgagcctggacctgagctggaccaacatcagcaagaagcagctgagctggctgatcaacagactgcccggcctgagagacctggtgctgagcggctgcagctggatcgccgtgagcgccctgtgcagcagcagctgccccctgctgagaaccctggacgtgcagtgggtggagggcctgaaggacgcccagatgagagacctgctgagcccccccaccgacaacagacccggccagatggacaacagaagcaagctgagaaacatcgtggagctgagactggccggcctggacatcaccgacgccagcctgagactgatcatcagacacatgcccctgctgagcaagctgcacctgagctactgcaaccacgtgaccgaccagagcatcaacctgctgaccgccgtgggcaccaccaccagagacagcctgaccgagatcaacctgagcggcttcttcgtgggcagagtgttcggcctgcagttctggggcatctgcgagccccaggccagaaagaacgccggctgggcctag

SEQ ID NO: 334939 - DNA, 2121 bp, Artificial Sequence
  derived and/or modified sequence
atggccggcccccagatgggcggcagcgccgaggaccacccccccagaaagagacacgccgccgagaagcagaagaagaagaccgtgatctacaccaagtgcttcgagttcgagagcgccacccagagacccatcgacagacagagatacgacgagaacgaggacctgagcgacgtggaggagatcgtgagcgtgagaggcttcagcctggaggagaagctgagaagccagctgtaccagggcgacttcgtgcacgccatggagggcaaggacttcaactacgagtacgtgcagagagaggccctgagagtgcccctgatcttcagagagaaggacggcctgggcatcaagatgcccgaccccgacttcaccgtgagagacgtgaagctgctggtgggcagcagaagactggtggacgtgatggacgtgaacacccagaagggcaccgagatgagcatgagccagttcgtgagatactacgagacccccgaggcccagagagacaagctgtacaacgtgatcagcctggagttcagccacaccaagctggagcacctggtgaagagacccaccgtggtggacctggtggactgggtggacaacatgtggccccagcacctgaaggagaagcagaccgaggccaccaacgccatcgccgagatgaagtaccccaaggtgaagaagtactgcctgatgagcgtgaagggctgcttcaccgacttccacatcgacttcggcggcaccagcgtgtggtaccacgtgttcagaggcggcaagatcttctggctgatcccccccaccctgcacaacctggccctgtacgaggagtgggtgctgagcggcaagcagagcgacatcttcctgggcgacagagtggagagatgccagagaatcgagctgaagcagggctacaccttcttcatccccagcggctggatccacgccgtgtacacccccgtggacagcctggtgttcggcggcaacatcctgcacagcttcaacgtgcccatgcagctgagaatctacgagatcgaggacagaaccagagtgcagcccaagttcagataccccttctactacgagatgtgctggtacgtgctggagagatacgtgtactgcgtgacccagagaagccacctgacccaggagtaccagagagagagcatgctgatcgacgcccccagaaagcccagcatcgacggcttcagcagcgacagctggctggagatggaggaggaggcctgcgaccagcagccccaggaggaggaggagaaggacgaggagggcgagggcagagacagagcccccaagccccccaccgacggcagcaccagccccaccagcacccccagcgaggaccaggaggccctgggcaagaagcccaaggcccccgccctgagattcctgaagagaaccctgagcaacgagagcgaggagagcgtgaagagcaccaccctggccgtggactaccccaagacccccaccggcagccccgccaccgaggtgagcgccaagtggacccacctgaccgagttcgagctgaagggcctgaaggccctggtggagaagctggagagcctgcccgagaacaagaagtgcgtgcccgagggcatcgaggacccccaggccctgctggagggcgtgaagaacgtgctgaaggagcacgccgacgacgaccccagcctggccatcaccggcgtgcccgtggtgacctggcccaagaagacccccaagaacagagccgtgggcagacccaagggcaagctgggccccgccagcgccgtgaagctggccgccaacagaaccaccgccggcgccagaagaagaagaaccagatgcagaaagtgcgaggcctgcctgagaaccgagtgcggcgagtgccacttctgcaaggacatgaagaagttcggcggccccggcagaatgaagcagagctgcatcatgagacagtgcatcgcccccgtgctgccccacaccgccgtgtgcctggtgtgcggcgaggccggcaaggaggacaccgtggaggaggaggagggcaagttcaacctgatgctgatggagtgcagcatctgcaacgagatcatccaccccggctgcctgaagagagaccagcccgtgtag

SEQ ID NO: 334940 - DNA, 2522 bp, Artificial Sequence
  derived and/or modified sequence
gccgagctaatttccttctgagccccccaaatgcctcctccacatggcgggtccgcaaatggggggatctgcagaggatcaccccccacgaaaaagacatgcagcagaaaagcaaaaaaagaaaacagttatatatacaaaatgctttgaatttgagtcggccacacagcgcccgattgaccgccagcgatacgacgagaacgaggacttgtcggacgtggaggagatcgtcagcgtccgcggcttcagcctggaggagaagcttcgcagccagctgtaccagggggacttcgtgcacgccatggagggcaaaggatgcctgaccctgatttcacagtccgagacgtcaaactcctagtggggagccggcggcttgtggacgtgatggatgtgaacacccagaagggcacggagatgagcatgtcccagtttgtgcgttactacgagacgcccgaggcccagcgggacaagctgtacaacgtcatcagcctagagttcagccacaccaagctggagcacttggtcaagcgtccgactgtggtagacctggtggactgggtggacaacatgtggccccagcatctgaaggagaagcagacagaagccacgaacgccattgcagagatgaagtacccgaaagtgaaaaagtactgtctgatgagcgtgaaaggttgtttcaccgacttccacatcgactttggaggcacttccgtttggtaccatgttttccggggtgggaagattttttggctgattcctccaacgctgcacaatttggcgctgtacgaggagtgggtgctgtcaggcaaacagagtgacatctttctgggagaccgtgtggaacgatgccaaagaattgagctgaagcagggctacacatttttcatcccttccggttggatccatgccgtctacacccctgtagactctttggtgttcggcggaaacatcctgcacagctttaacgtgcccatgcagctgcggatctacgagatcgaggacaggacgcgggtgcagcccaaattccgttaccccttctactatgagatgtgctggtatgtcctggagagatacgtgtactgtgtgacccagcgctcccacctcactcaggaataccagagggagtcgatgcttattgatgccccgaggaagcccagcatagacggcttctcttcggattcctggctggagatggaggaggaggcctgtgatcagcagcctcaggaggaggaggagaaggacgaggagggcgagggcagggacagggcacccaaaccgcccaccgatggctccacttcacccaccagcacgccctctgaggaccaggaggccctcgggaagaagcccaaagcacctgccctgcgattcctcaaaaggactttgtctaatgagtcggaggaaagtgtgaagtccaccacattggccgtagactaccccaagacccccaccggctctcccgccacggaggtctctgccaaatggacccatctcactgagtttgaactgaagggcctgaaagctctggtggagaaactggaatccctcccggagaacaagaagtgtgtccccgagggcatcgaggacccccaggcactcctggagggtgtgaagaacgtcctgaaggagcacgcagatgatgaccctagtctggccatcactggggtccctgtggtgacttggccaaagaagactccaaagaaccgggctgtgggtcggcccaaggggaagctgggcccggcctccgcggtgaagttggccgccaaccggacaacggcaggagctcggcggcgccggacgcgatgccgcaagtgcgaggcctgcctgcggaccgagtgcggagagtgccacttctgcaaggacatgaagaagttcgggggccccgggcgcatgaagcagagctgcatcatgcggcagtgcatcgcgactgcaataaggtcactgatcagtgcctgtccttcttcaaacgctgtggaaacatctgtcatattgacctgaggtactgcaagcaagtcaccaaggaaggctgtgagcagttcatagccgagatgtctgtgagtgtccagtttgggcaagtagaagaaaaactcctgcaaaaactgagttagtccaaggataagtatgtaaatacggggcgggctctgggaggggagagactttacaaaaatgagggcttttattttccatttggaacgtgggacaacagaccacaacgcaattccattttgcaagtctttccaagggagaagctgttcaaccacccgtttgggggatgagtgagccgacactttcctttggtctttctgaatcgtaactgcactgctttctggaccatttctaaggcggcctttacaagaagacattcctgtcggagaggagggtggacttcggagaaattctcatactgaagcatgagcttaggagtttctgttagtggtagtggtgttttggacacttcattccttgcaacaccgaggttttgggtgttgacataaagtggaccacacaccacatctgctgccgtc

SEQ ID NO: 334941 - DNA, 1680 bp, Artificial Sequence
  derived and/or modified sequence
atgcccgatcccgatttcacagtgcgggacgtgaaactccttgtgggtagtcggagattggtagacgtaatggacgtgaacacacagaaaggcactgagatgtccatgagccaatttgtgagatactatgagactccggaggctcagagagacaagctgtataacgtgatttcactggaatttagccataccaaactggagcacctggtgaaacgacccaccgtggttgacctggtggactgggtcgataatatgtggcctcagcatttaaaggaaaaacagactgaggcgaccaatgccatcgccgaaatgaaataccctaaagtaaaaaagtactgcctgatgagcgtgaaaggctgtttcacggatttccatatagacttcggcgggactagtgtttggtatcacgtgtttagaggcgggaagattttctggttgattccccctactctgcacaaccttgcactgtacgaagagtgggttctgtctggaaagcaatccgacatctttttgggggatcgcgtggaacgttgccagcgcattgaactcaagcagggatacaccttttttattccaagtggctggattcatgcagtctatacccctgtcgactcactggtatttggcggcaacatcctccatagtttcaacgttcctatgcaacttcggatctatgaaattgaagacaggactcgagtgcagcccaaatttcgctatcccttctactacgagatgtgctggtatgtcttagaacgatatgtgtactgcgtgacccagagaagccacctcacccaggaatatcagagagagagtatgctcattgacgccccaagaaaaccatccatcgatggctttagcagtgactcttggttggagatggaagaggaggcttgcgaccaacagcctcaggaggaggaggagaaagacgaagagggcgaaggacgggatagagcccctaagcccccaaccgatggaagcaccagtcctacctctacaccttccgaggatcaggaagcactcggcaagaagccaaaagcacctgccctgaggtttctgaaacgaaccctgtctaatgagtccgaggaatccgtgaagagtacaaccctggccgtggactaccccaaaactcccacggggtctcccgctactgaggtcagtgcaaagtggacacaccttactgagtttgagctgaagggcctcaaagctctggtggagaagctggagtccttgccggaaaataaaaaatgtgtgcctgaaggaatagaggaccctcaggcacttctggaaggggtgaagaatgttctcaaagagcacgccgacgatgatccgagcctggccattactggagtccccgtggttacgtggcctaaaaagactcctaaaaatcgggcagtcgggcggccaaagggcaaacttggccccgcgagcgcagtcaaactggcggcaaaccgtactacagctggtgcccgcagacgacgaacccggtgtaggaaatgcgaggcctgcttgcgtacagaatgtggggagtgtcacttctgcaaagacatgaaaaagttcgggggtccgggccgtatgaagcagagctgtattatgagacagtgtatcgcgacagcgataaggagcttgatcagcgcttgcccctcttccaacgccgtggagacctctgtcatccttacctag

SEQ ID NO: 334942 - DNA, 1680 bp, Artificial Sequence
  derived and/or modified sequence
atgccagaccctgacttcaccgtgagagatgtgaagctgctggtgggcagccggcggctggtggatgtgatggatgtgaacacccagaagggcacagagatgtccatgagccagtttgtgcgctactatgagaccccagaggcccagagggacaagctgtacaacgtcatcagcctggagttcagccacaccaagctggagcacctggtgaagaggcccaccgtggtggacctggtggactgggtggacaacatgtggccccagcacctgaaggagaagcagacagaggccaccaatgccatcgccgagatgaagtaccccaaggtgaagaagtactgcctgatgtctgtgaagggctgcttcacagacttccacatcgactttggaggcacctctgtgtggtaccacgtgttccggggcggcaagatcttctggctgatcccccccaccctgcacaacctggccctgtatgaggagtgggtgctgagcggcaagcagagcgacatcttcctgggggacagagtggagcgctgccagagaattgagctgaagcagggctacaccttcttcatccccagcggctggattcatgctgtgtacacccctgtggacagcctggtgtttggaggcaacatcctgcacagcttcaacgtgcccatgcagctgcgcatctatgaaattgaggacaggaccagggtgcagcccaagttccgctaccccttctactatgagatgtgctggtacgtgctggagagatatgtgtactgtgtgacccagaggagccacctgacccaggagtaccagcgggagagcatgctgattgatgcccccaggaagcccagcattgatggcttcagcagtgacagctggctggagatggaggaggaggcctgtgaccagcagccccaggaggaggaggagaaggatgaggagggggagggccgggaccgggcccccaagcccccaacagatggcagcaccagccccaccagcacccccagcgaggaccaggaggccctgggcaagaagcccaaggccccagccctgcgcttcctgaagaggaccctgagcaatgaaagtgaggagagcgtgaagagcaccaccctggccgtggactaccccaagacccccaccggcagccctgccacagaggtgtctgccaagtggacccacctgacagaatttgagctgaagggcctgaaggccctggtggagaagctggagagcctgcctgagaacaagaagtgtgtgcctgagggcatcgaggacccccaggccctgctggagggcgtgaagaatgtgctgaaggagcacgcagatgatgaccccagcctggccatcaccggggtgcctgtggtgacctggcccaagaagacccccaagaacagagctgtgggccggcccaagggcaagctgggccctgccagcgctgtgaagctggccgccaacagaaccacagctggggccaggagaagaaggacccgctgcaggaaatgtgaggcctgcctgaggacagaatgtggggagtgccacttctgcaaggacatgaagaagtttggaggccctggccgcatgaagcagagctgcatcatgaggcagtgcatcgccacagccatccgcagcctcatcagcgcctgccccagcagcaatgctgtggagaccagcgtcatcctgacctag

SEQ ID NO: 334943 - DNA, 1680 bp, Artificial Sequence
  derived and/or modified sequence
atgcccgaccccgacttcaccgtgcgggacgtgaagctgctggtgggtagccgccgactggttgacgtcatggatgtgaatacacagaaaggcacagagatgagcatgagccagttcgtacgctactacgaaactcctgaggcccagcgggataaactctataacgtgatctcacttgagttctcccacaccaagttggagcacctggtaaagaggccaaccgtggtcgatttggtcgactgggtggacaatatgtggccgcagcacctcaaggagaaacagactgaggctactaatgctatcgcggaaatgaaatatccaaaagtgaagaaatactgcctcatgtcggtaaaaggctgcttcactgatttccatatcgacttcggtggcacttccgtgtggtaccacgtgttccggggcggcaagatcttttggctgattccaccaacattacacaacctcgccctgtacgaagaatgggttctgagcggtaaacagtctgatatttttctcggggaccgagttgaacgatgccagaggatcgagcttaaacaaggttacaccttctttattccttccgggtggatacatgcagtctatacgccagtggatagcctggtgttcggcgggaacatcctgcactcctttaacgtcccaatgcaactgcgcatttatgaaatagaggaccgaacacgggtacagcccaagttccgctacccattttattacgaaatgtgctggtatgtcttggagcggtatgtgtactgcgtgacacagcgctcccacctcacccaggagtaccagagagaaagcatgttaatagatgccccacgcaaaccatcaatcgatggtttcagttccgatagttggctggagatggaagaagaggcttgtgatcagcaacctcaggaggaagaggagaaggacgaagagggtgagggacgcgatcgcgctcccaaacctcctacagacggatctacctcccccactagcaccccaagcgaagaccaagaggcactgggaaaaaaacccaaagctccggctctccgattcctgaaaaggaccctctccaatgagtccgaggagtctgtgaaatctacgacactggctgtcgactatcccaaaacccccacgggctcccccgccaccgaggtttccgcaaagtggacacatctcaccgagttcgagctgaaaggtctgaaggcgctcgttgaaaagctcgaatcactgccagagaacaagaagtgtgttccagaagggattgaagaccctcaagctctactggagggagtgaagaacgtcttaaaagagcacgcagacgacgacccatctctcgccattactggtgtcccagtcgttacctggcctaaaaagacacccaagaatcgcgcggtggggcggccgaaagggaagctgggtccggcttccgccgtcaagctggcggctaatagaactactgcaggcgcacgcagaagacgcacacgttgtcgcaaatgcgaagcctgtttgaggactgaatgtggggaatgtcacttctgcaaggacatgaagaagttcggtggacctgggagaatgaaacagagctgtataatgcggcagtgtattgcgaccgccattcggtcacttatatctgcctgcccgtcctcgaatgcagtcgaaactagcgtgatcctcacctag

SEQ ID NO: 334944 - DNA, 1680 bp, Artificial Sequence
  derived and/or modified sequence
atgcctgatcccgacttcactgttagagacgttaagctgctcgtaggatcccgtaggcttgttgacgtcatggatgtcaacactcagaagggcaccgagatgtccatgtctcagttcgtcagatattatgaaacccccgaagcccagagggataaactttataacgtcattagcttagaattttcccacaccaaacttgagcacctggtaaaacgcccaaccgtagttgatctggtcgactgggtcgataacatgtggccacagcacctgaaagagaagcagaccgaggctaccaacgctatcgccgaaatgaagtatcctaaagtgaaaaaatactgcttgatgtccgtaaaaggctgcttcaccgacttccacatcgacttcggaggcacttctgtctggtaccatgtgttcagaggcggtaagatcttttggctcattcctccgacactgcacaacctagccctctacgaagaatgggttctctccggtaagcaatccgatatcttccttggagatagggttgagcgctgccagaggatcgagctgaaacaggggtacacttttttcattccttccgggtggattcacgccgtgtatactcctgttgattccctcgtattcgggggtaacattctgcatagtttcaacgttcccatgcaactgagaatctatgagatcgaagataggaccagagtgcagcccaagtttaggtaccccttctactacgaaatgtgctggtatgtgctggagaggtacgtgtactgtgtgacccagcggtcccatctaacccaggagtatcaacgggaatccatgctgatcgacgctccacggaagccgtcaatcgatggcttctcctcagacagctggctagagatggaagaggaagcctgtgatcagcagcctcaggaggaggaagaaaaagatgaggaaggtgaaggacgcgatcgcgcacctaagccacctactgatggtagtacttcaccaacttccaccccttcggaagaccaggaagctctcgggaagaaacctaaagcccctgccttgagatttctgaagcggacactgtcaaatgaatccgaagaatctgtaaaatcaacaaccctggccgtggactacccaaaaacgcccactgggtcccccgctactgaagtgtccgcaaagtggactcatcttaccgaattcgagcttaaaggtttgaaggcgctagttgagaagttggaatcattgcctgaaaacaaaaaatgcgttcccgaggggatagaagacccacaggctctgctggagggggttaagaacgtattgaaggagcatgccgatgacgacccaagtctggccatcaccggagtgcctgtcgttacatggcccaaaaagacgccgaaaaacagggcggtgggacgccctaagggcaagctcggacccgcatccgccgtcaagctggcagcgaatcgaaccaccgcaggagcacggaggagacgcacccgttgtaggaagtgtgaagcatgtctgaggaccgaatgcggcgagtgccacttctgtaaggacatgaaaaaattcggcggacctggaaggatgaagcaaagctgtatcatgagacagtgtatagcgacggcgattagatcccttatctccgcgtgtccgtcttcaaacgcagttgagaccagtgtcatactcacctag

SEQ ID NO: 334945 - DNA, 1680 bp, Artificial Sequence
  derived and/or modified sequence
atgcccgaccccgacttcaccgtgagagacgtgaagctgctggtgggcagcagaagactggtggacgtgatggacgtgaacacccagaagggcaccgagatgagcatgagccagttcgtgagatactacgagacccccgaggcccagagagacaagctgtacaacgtgatcagcctggagttcagccacaccaagctggagcacctggtgaagagacccaccgtggtggacctggtggactgggtggacaacatgtggccccagcacctgaaggagaagcagaccgaggccaccaacgccatcgccgagatgaagtaccccaaggtgaagaagtactgcctgatgagcgtgaagggctgcttcaccgacttccacatcgacttcggcggcaccagcgtgtggtaccacgtgttcagaggcggcaagatcttctggctgatcccccccaccctgcacaacctggccctgtacgaggagtgggtgctgagcggcaagcagagcgacatcttcctgggcgacagagtggagagatgccagagaatcgagctgaagcagggctacaccttcttcatccccagcggctggatccacgccgtgtacacccccgtggacagcctggtgttcggcggcaacatcctgcacagcttcaacgtgcccatgcagctgagaatctacgagatcgaggacagaaccagagtgcagcccaagttcagataccccttctactacgagatgtgctggtacgtgctggagagatacgtgtactgcgtgacccagagaagccacctgacccaggagtaccagagagagagcatgctgatcgacgcccccagaaagcccagcatcgacggcttcagcagcgacagctggctggagatggaggaggaggcctgcgaccagcagccccaggaggaggaggagaaggacgaggagggcgagggcagagacagagcccccaagccccccaccgacggcagcaccagccccaccagcacccccagcgaggaccaggaggccctgggcaagaagcccaaggcccccgccctgagattcctgaagagaaccctgagcaacgagagcgaggagagcgtgaagagcaccaccctggccgtggactaccccaagacccccaccggcagccccgccaccgaggtgagcgccaagtggacccacctgaccgagttcgagctgaagggcctgaaggccctggtggagaagctggagagcctgcccgagaacaagaagtgcgtgcccgagggcatcgaggacccccaggccctgctggagggcgtgaagaacgtgctgaaggagcacgccgacgacgaccccagcctggccatcaccggcgtgcccgtggtgacctggcccaagaagacccccaagaacagagccgtgggcagacccaagggcaagctgggccccgccagcgccgtgaagctggccgccaacagaaccaccgccggcgccagaagaagaagaaccagatgcagaaagtgcgaggcctgcctgagaaccgagtgcggcgagtgccacttctgcaaggacatgaagaagttcggcggccccggcagaatgaagcagagctgcatcatgagacagtgcatcgccaccgccatcagaagcctgatcagcgcctgccccagcagcaacgccgtggagaccagcgtgatcctgacctag

SEQ ID NO: 334946 - protein, 779 aa, Artificial Sequence
  derived and/or modified sequence
MAMSVSAEDDDYESEPDQNRAVGRPKGKLGPASAVKLAANRTTAGARRRRTRCRKCEACLRTECGECHFCKDMKKFGGPGRMKQSCIMRQCIAPVLPHTAVCLVCGEAGKEDTVEEEEGKFNLMLMECSICNEIIHPGCLKIKESEGVVNDELPNCWECPKCNHAGKTGKAYKQKRGPGFKYASNLPGSLLKEQKMNRDNKEGQEPAKRRSECEEAPRRRSDEHSKKVPPDGLLRRKSDDVHLRKKRKYEKPQELSGRKRASSLQTSPGSSSHLSPRPPLGSSLSPWWRSSLTYFQQQLKPGKEDKLFRKKRRSWKNAEDRMALANKPLRRFKQEPEDELPEAPPKTRESDHSRSSSPTAGPSTEGAEGPEEKKKVKMRRKRRLPNKELSRELSKELNHEIQRTENSLANENQQPIKSEPESEGEEPKRPPGICERPHRFSKGLNGTPRELRHQLGPSLRSPPRVISRPPPSVSPPKCIQMERHVIRPPPISPPPDSLPLDDGAAHVMHREVWMAVFSYLSHQDLCVCMRVCRTWNRWCCDKRLWTRIDLNHCKSITPLMLSGIIRRQPVSLDLSWTNISKKQLSWLINRLPGLRDLVLSGCSWIAVSALCSSSCPLLRTLDVQWVEGLKDAQMRDLLSPPTDNRPGQMDNRSKLRNIVELRLAGLDITDASLRLIIRHMPLLSKLHLSYCNHVTDQSINLLTAVGTTTRDSLTEINLSDCNKVTDQCLSFFKRCGNICHIDLRYCKQVTKEGCEQFIAEMSVSVQFGQVEEKLLQKLS

SEQ ID NO: 334947 - DNA, 2634 bp, Artificial Sequence
  derived and/or modified sequence
agggcgagccgagcctgctccgggcgggcggcggcggcggcgccgctccagccatgtcagcgcgcgcgagcctgggcccaccatgagccatggccatgtccgtgagcgccgaggacgacgactatgaatcggagccggaccagaaccgggctgtgggtcggcccaaggggaagctgggcccggcctccgcggtgaagttggccgccaaccggacaacggcaggagctcggcggcgccggacgcgatgccgcaagtgcgaggcctgcctgcggaccgagtgcggagagtgccacttctgcaaggacatgaagaagttcgggggccccgggcgcatgaagcagagctgcatcatgcggcagtgcatcgcgccagtgctgccccacaccgccgtgtgccttgtgtgtggcgaggcggggaaggaagacacggtggaagaggaggaaggcaagtttaacctcatgctcatggagtgctccatctgcaatgaaatcatccaccctggatgccttaagattaaggagtcagagggtgtggtcaacgacgagcttccaaactgctgggagtgtccgaagtgtaaccacgccggcaagaccgggaaagcctacaagcaaaagcgtggccctggctttaagtacgcctccaacctgcccggctccctgctcaaggagcagaagatgaaccgggacaacaaggaagggcaggaacctgccaagcggaggagtgagtgtgaggaggcgccccggcgcaggtcggatgagcactcgaagaaggtgccgccggacggccttctgcgcagaaagtctgacgacgtgcacctgaggaagaagcggaaatacgagaagccccaggagctgagtggacgcaagcgggcctcatcgcttcaaacgtcccccggttcctcctctcacctctcgccgaggccccctctaggcagcagcctcagcccctggtggagatccagtctcacttacttccagcagcagctcaaacctggcaaagaagataagcttttcaggaaaaagcggcggtcctggaagaacgccgaggaccgcatggcgctggccaacaagcccctccggcgcttcaagcaggaacccgaggacgaactgcccgaggcgccccccaagaccagggagagcgaccactcccgctccagctcccccaccgcgggacccagcaccgaaggggccgagggcccggaggagaagaagaaggtgaagatgcgccggaagcggcggcttcccaacaaggagctgagcagggagctgagcaaggagctcaaccacgagatccagaggacggagaacagcctggccaacgagaaccagcagcccatcaagtcggagcctgagagcgagggcgaggagcccaagcggcccccgggcatctgcgagcgtccccaccgcttcagcaaggggctcaacggcaccccccgggagctgcggcaccagctggggcccagcctgcgcagcccgccccgtgtcatctcccggcccccaccctccgtgtccccgcccaagtgtatccagatggagcgccatgtgatccggccaccccccatcagccccccgcctgactcgctacccctggacgatggggcagcccacgtcatgcacagggaggtgtggatggccgtcttcagctacctcagccaccaagacctgtgtgtgtgcatgcgggtctgcaggacctggaaccgctggtgctgcgataagcggttgtggacccgcattgacctgaaccactgcaagtctatcacacccctgatgctgagtggcatcatccggcgacagcccgtctccctcgacctcagctggaccaatatctccaagaagcagctgagctggctcatcaaccggctgcctgggctccgggacttggtgctgtcaggctgctcatggatcgcggtctcggccctttgcagctccagttgtccgctgctccggaccctggatgtccagtgggtggagggactaaaggatgcccagatgcgggatctcctgtccccgcccacagacaacaggccaggtcagatggacaatcggagcaagctccggaacatcgtggagctgcgcctggcaggcctggacatcacagatgcctccctgcggctcatcatccgccacatgcccctgctctccaagctccacctcagttactgtaaccacgtcaccgaccagtctatcaacctgctcactgctgttggcaccaccacccgagactccttaaccgagatcaacctgtctgactgcaataaggtcactgatcagtgcctgtccttcttcaaacgctgtggaaacatctgtcatattgacctgaggtactgcaagcaagtcaccaaggaaggctgtgagcagttcatagccgagatgtctgtgagtgtccagtttgggcaagtagaagaaaaactcctgcaaaaactgagttagtccaaggataagtatgtaaatacggggcgggctctgggaggggagagactttacaaaaatgagggcttttattttccatttggaacgtgggacaacagaccacaacgcaattccattttgcaagtctttccaagggagaagctgttcaaccacccgtttgggggatgagtgagccgacactttcctttggtctttctgaatcgta

SEQ ID NO: 334948 - DNA, 2340 bp, Artificial Sequence
  derived and/or modified sequence
atggctatgtccgtaagcgccgaggacgacgactatgaaagtgaaccggatcaaaaccgagcagtcggcaggcccaaaggaaaactagggcctgcctccgcggtgaaactggctgcaaataggaccactgcaggggcacgacgtaggaggacccgctgcaggaaatgcgaagcttgtcttcgtaccgagtgcggcgaatgccatttctgcaaagatatgaagaaattcggggggccgggacgcatgaaacaaagctgtataatgaggcagtgcattgccccagttctgcctcacacagcagtttgcctagtgtgtggagaagccgggaaggaggataccgtggaagaggaggagggtaagtttaatctgatgctcatggagtgttccatttgcaacgagattattcacccaggatgcctaaagataaaggagtccgagggcgttgttaatgacgaattgccaaactgttgggagtgccctaaatgtaatcacgctgggaagaccgggaaagcctataaacagaagcgcgggccgggctttaaatatgcatccaatcttccaggcagtctgcttaaggaacagaaaatgaatcgggacaataaagagggtcaggagcccgccaagcgcaggtctgagtgcgaagaagcgccgcgaagacggagtgacgaacactccaaaaaagtgcctcccgacgggctgcttcggaggaagagcgatgacgtgcatctgagaaagaaaagaaaatacgagaaacctcaggagctgagcgggcgcaaacgagcctccagcctgcagacatcaccaggctctagcagccatctgtctccccggccccctctgggatcaagtctgagtccctggtggcgcagcagcctgacctacttccaacagcagctcaaacccgggaaggaagacaagttatttcgcaagaagaggcggtcctggaagaatgctgaggacagaatggccctagccaataaacccctcagacgctttaagcaggagcccgaagacgagttgcctgaagccccgccaaagacaagagagtctgatcactcccgcagcagcagtccaaccgccggtccatcgacggagggcgccgaggggccagaggagaagaagaaggtgaaaatgagacgcaagagaagactgccaaacaaagagctgtcaagagagctgagcaaggaacttaatcacgagatccagcggacagagaacagcctcgcgaatgaaaatcagcagcccatcaagagcgaacctgagagcgagggggaggaacccaagagacctcccggcatctgtgaaagaccccatagattctctaagggtctcaatggcacgccgagggaactgaggcatcaactcggtccgtcccttcgctcccccccacgtgtgatcagtaggccaccgccatccgttagtccccctaagtgcattcaaatggaaaggcatgtgattagacccccgcccattagccctccccctgattctctgcccctggatgatggagctgcccatgttatgcaccgcgaagtttggatggcggtcttctcgtatctgagccaccaggatttgtgcgtctgcatgcgggtctgtcgaacctggaaccgctggtgctgcgacaaacggctctggacgcgaattgatttgaatcattgtaagagcattacccccttaatgctcagcggtattattcgtcggcagccagtgagtctggacttatcatggactaatatctccaaaaaacagctcagttggctaatcaatcggctgccagggttgagggatctcgtcttatctgggtgctcctggatcgctgtctctgctctgtgctcatcatcatgccccctgctccgtactctggacgtccagtgggtcgaagggttgaaggatgcccaaatgagggacttattgtcccctccaactgataaccgacccggtcagatggacaaccgctccaagctgcgaaatatcgtggagttgaggcttgcgggtcttgatatcaccgatgcctctctgaggctgatcattcgccatatgccgttacttagcaagctgcacttgtcctactgcaaccacgtcaccgaccaaagtataaatctgttgacagctgttggaaccaccactagagactctctcaccgaaattaatttgtcagattgcaataaggtcaccgatcaatgcctgtctttcttcaaacgctgcggcaacatttgccacatagacctgagatattgtaagcaggtgacaaaagagggatgcgagcagtttattgccgagatgtccgtatcagtccagtttggccaggtggaagagaagctgctccagaaactgtcttag

SEQ ID NO: 334949 - DNA, 2340 bp, Artificial Sequence
  derived and/or modified sequence
atggccatgtctgtgtctgcagaagatgatgattatgagagcgagccagaccagaacagagctgtgggccggcccaagggcaagctgggccctgccagcgctgtgaagctggccgccaacagaaccacagctggggccaggagaagaaggacccgctgcaggaaatgtgaggcctgcctgaggacagaatgtggggagtgccacttctgcaaggacatgaagaagtttggaggccctggccgcatgaagcagagctgcatcatgaggcagtgcatcgcccctgtgctgccccacacagctgtgtgcctggtgtgtggggaggccggcaaggaggacacagtggaggaggaggagggcaagttcaacctgatgctgatggagtgcagcatctgcaatgagatcatccaccctggctgcctgaagatcaaggagagcgagggcgtggtgaatgatgagctgcccaactgctgggagtgccccaagtgcaaccacgccggcaagacaggcaaggcctacaagcagaagaggggccctggcttcaagtatgccagcaacctgcccggcagcctgctgaaggagcagaagatgaacagagacaacaaggagggccaggagcccgccaagagaagaagtgaatgtgaggaggcccccaggagaagaagtgatgagcacagcaagaaggtgcccccagatggcctgctgcggaggaagagtgatgatgtgcacctgaggaagaagaggaaatatgagaagccccaggagctgagcggcaggaagagggccagcagcctgcagaccagccctggcagcagcagccacctgagcccccggccccccctgggcagcagcctgagcccctggtggaggagcagcctgacctacttccagcagcagctgaagccaggcaaggaggacaagctgttcaggaagaagaggaggtcctggaagaatgctgaggacaggatggccctggccaacaagcccctgcggcgcttcaagcaggagccagaagatgagctgcctgaggccccacccaagacccgggagagtgaccacagccgcagcagcagccccacagctggccccagcacagagggcgctgagggccctgaggagaagaagaaggtgaagatgaggaggaagaggcggctgcccaacaaggagctgagccgggagctgagcaaggagctgaaccacgagatccagaggacagagaacagcctggccaatgaaaaccagcagcccatcaagtctgagcctgagagcgagggggaggagcccaagaggcctcctggcatctgtgagcggccccaccgcttcagcaagggcctgaatggcaccccccgggagctgcggcaccagctgggccccagcctgcggagcccccccagggtcatcagccggcccccacccagcgtgtccccacccaagtgcatccagatggagcggcacgtgatccggcccccacccatcagccccccaccagacagcctgcccctggatgatggagctgcccacgtgatgcaccgggaggtgtggatggctgtgttctcctacctgagccaccaggacctgtgtgtgtgcatgagggtgtgcaggacctggaaccgctggtgctgtgacaagaggctgtggaccagaattgacctgaaccactgcaagagcatcacccccctgatgctgagcggcatcatccggcggcagcctgtgtccctggacctgtcctggaccaacatcagcaagaagcagctgtcctggctgatcaaccggctgcccggcctgcgggacctggtgctgagcggctgctcctggattgctgtgtctgccctgtgcagcagcagctgccccctgctgcggaccctggatgtgcagtgggtggagggcctgaaggatgcccagatgagggacctgctgagccccccaacagacaaccggcccggccagatggacaacagaagcaagctgaggaacatcgtggagctgcggctggccggcctggacatcacagatgccagcctgcggctcatcatccgccacatgcccctgctgagcaagctgcacctgagctactgcaaccacgtgacagaccagagcatcaacctgctgacagctgtgggcaccaccacccgggacagcctgacagagatcaacctgagtgactgcaacaaggtgacagaccagtgcctgtccttcttcaagagatgtggcaacatctgccacatcgacctgcgctactgcaagcaggtgaccaaggagggctgtgagcagttcatcgccgagatgtctgtgtctgtgcagtttggccaggtggaggagaagctgctgcagaagctgtcctag

SEQ ID NO: 334950 - DNA, 2340 bp, Artificial Sequence
  derived and/or modified sequence
atggccatgagcgtgagcgccgaggacgacgactacgagagcgagcccgaccagaacagggccgtgggccgccccaaggggaagttaggccctgcatccgcagtgaagctcgccgctaaccggacgaccgctggcgcaagacggagacgtacaaggtgccggaagtgtgaggcttgcctgaggacggagtgcggagagtgtcatttctgtaaagacatgaaaaaatttggcggacctggtcggatgaagcagtcttgtattatgcgccaatgcatagctcccgtgctgccacatacggctgtttgcctcgtctgtggcgaggctggtaaggaggacaccgtggaagaggaagaaggaaagttcaacctgatgctcatggagtgcagcatttgcaacgaaatcatccacccaggttgcctgaagatcaaggagtcagaaggggtggttaacgacgaactcccgaattgttgggagtgtccaaagtgcaatcatgctggaaagaccgggaaagcgtataagcagaagaggggtccggggttcaaatatgcgtcaaacctgcccggttctctactcaaggaacagaaaatgaatcgcgataacaaggaaggacaggagcccgcaaagagaaggtcagagtgcgaggaagctcccaggagaaggtcagacgagcattctaagaaagtaccgccagatggactgctgaggcggaaatctgacgacgtccacctccgaaagaagcggaagtacgagaaacctcaggagctctctggccgcaagagagccagctcattacagactagccccggaagctcaagtcacctcagccctcggccacccttaggctcttcgctgtcaccctggtggaggtcttccctgacctatttccagcagcagttgaagccaggaaaggaagataagttgtttcgcaagaagcggagaagctggaagaacgccgaggaccggatggcattagctaacaaacctttacgccgattcaagcaagaacctgaggatgagctgcccgaggctccgcccaagacacgtgagagcgatcactctagatcgagttcccccactgctgggccctccaccgagggcgctgagggcccagaagaaaaaaagaaagtgaagatgcggcgcaaaagacgtctgccgaacaaggaacttagccgtgagctgtccaaggaactcaatcacgagattcagaggacagagaacagtttggccaatgagaaccagcagccaattaaaagtgaaccagagtctgagggtgaggagccaaagaggcctcctggcatctgcgagaggcctcaccgcttcagtaagggactcaacggcacaccaagggagcttagacatcagctggggccgagcctgaggagccctcctagagttatatctcggccacctccctctgtgagcccaccaaaatgcattcaaatggagaggcatgtaatccgcccccctccaatctcccctcctcccgacagcctgcccctggatgacggggcggctcacgtgatgcacagggaggtctggatggccgtttttagctacctgtcccaccaggatctttgcgtgtgcatgcgcgtgtgtagaacgtggaaccgttggtgctgcgataaacgactctggaccagaatcgacctgaaccactgtaaaagtattactcccctcatgctctcagggataatcaggagacaacctgtgtctctcgatctgtcctggactaacatttctaaaaagcaactgtcttggctgatcaatcggctaccaggcctgagggacttggttctaagtggctgtagctggatcgctgtgtctgccctttgtagctccagttgccctctgctcaggactcttgatgttcagtgggtagaaggactgaaggacgctcagatgcgcgacctgctgagccccccgacagataatcgtccagggcaaatggacaatcgcagcaagctgcgcaatattgttgaactaagactggctggtttggatataactgacgcaagccttaggttaatcatacgacatatgccactgcttagcaaactccacctttcctactgcaaccatgtcaccgaccaaagcatcaatctcctgaccgccgtgggcacgaccaccagagatagtctgacagagataaatttgtcagactgcaacaaggtcaccgaccagtgcctgtcattctttaagcggtgtggaaacatctgccacatagacttaagatattgcaaacaggtcacgaaggagggttgtgaacagtttatagctgaaatgtcagtttcagttcagtttggccaggtagaggagaaactattgcaaaagctgtcttag

SEQ ID NO: 334951 - DNA, 2340 bp, Artificial Sequence
  derived and/or modified sequence
atggcaatgagtgtgtcagcagaagatgacgattatgagtcagaaccggaccagaatcgagcagtcggcagacctaagggtaagctcggacctgctagcgctgtgaaattagctgccaataggacaacggccggagccagacggaggcgcacacgctgcagaaagtgtgaagcctgccttcgcaccgagtgtggggaatgtcatttctgcaaggacatgaagaagttcggtggtccagggaggatgaaacagtcctgtattatgaggcagtgcatagcccctgtgcttcctcatacagccgtgtgtctagtctgtggcgaggccggaaaagaggacacagtggaagaggaagagggaaaatttaacctcatgttaatggagtgttcgatatgcaatgagattatccaccccggttgcctgaaaatcaaagaatccgagggcgtggtaaatgatgagctcccaaattgttgggagtgccctaagtgcaaccacgccggtaaaacagggaaagcttataaacagaaacgagggcctgggttcaaatacgcgtctaatctgcccggttctttgttgaaagaacagaagatgaacagggataataaggagggccaggaaccggctaaaagaagatctgagtgcgaggaggctccgagaaggcggagcgatgagcactcaaagaaagtgcctcctgacggcctgttacggaggaagagcgacgatgtgcacttgcggaaaaaacgcaagtacgaaaaacctcaagagctgtctggacgcaagcgagcttccagtctgcaaacttcaccagggagctcaagccacctgtcccctaggcctcccctaggcagtagtctcagcccatggtggcgatcgtcattgacttattttcagcaacagctgaaacctgggaaggaagataaacttttccgcaagaagcgcagaagctggaagaacgcagaggacaggatggcccttgccaacaaacctttaagacggtttaagcaagaacctgaggacgagttgcctgaggcaccaccgaagactagagagtcagaccactctcggagctcgagtcccactgctggacccagcacagagggagccgaagggccagaggagaaaaagaaggttaagatgaggcggaaaaggcgattgcccaacaaggagctttcccgagaactgagtaaggagcttaaccacgaaattcaacgaaccgagaatagcctggctaatgaaaaccagcaacccatcaaaagcgaacctgaatccgagggggaggagcccaagcgtccacccggaatatgcgaacgtccgcatagattttcaaaaggccttaacggaacccctagagaactgagacatcagctggggccttcattacgaagccctcctcgggttatctcccggccacccccatcggttagcccccctaaatgtatacagatggaaaggcatgtgattagaccacctcccatatcccccccacctgattccctccccctggacgatggggctgcacatgtgatgcaccgcgaggtctggatggctgtattctcgtacctgagccatcaggacctgtgtgtatgtatgcgggtctgccggacgtggaaccgatggtgttgtgataagcggctatggactcgcattgatctgaaccattgcaaatccataaccccattaatgctgtccgggataattaggagacaaccagtcagcctagatctgtcttggacaaacatctcaaaaaagcagctttcctggctgattaatcggttacccggactccgggacctcgtgctatcgggctgtagctggattgccgtctcagctctgtgcagttcaagctgccctctgttaagaactctcgatgtccaatgggtggagggactgaaggatgcccagatgagggacttgctgtcaccgccaaccgataatcggccaggacagatggataatagaagcaagctaaggaatatcgtcgagctgcggctcgccggactcgatatcacggatgcatctttaagattgattatccgccacatgccactgctttccaagttgcatctttcgtattgcaaccacgtcactgaccagtcgattaatctgctcactgctgtgggtacaaccacacgagactctttgacagagattaacctgtcggattgtaataaagtcaccgatcagtgcctgtccttcttcaaaagatgcgggaacatttgtcatattgaccttcggtactgtaaacaggtgactaaagaaggctgtgaacaatttattgcggagatgtctgtgagcgtccaatttggccaggttgaagaaaagttgttacagaaactgtcttag

SEQ ID NO: 334952 - DNA, 2340 bp, Artificial Sequence
  derived and/or modified sequence
atggccatgagcgtgagcgccgaggacgacgactacgagagcgagcccgaccagaacagagccgtgggcagacccaagggcaagctgggccccgccagcgccgtgaagctggccgccaacagaaccaccgccggcgccagaagaagaagaaccagatgcagaaagtgcgaggcctgcctgagaaccgagtgcggcgagtgccacttctgcaaggacatgaagaagttcggcggccccggcagaatgaagcagagctgcatcatgagacagtgcatcgcccccgtgctgccccacaccgccgtgtgcctggtgtgcggcgaggccggcaaggaggacaccgtggaggaggaggagggcaagttcaacctgatgctgatggagtgcagcatctgcaacgagatcatccaccccggctgcctgaagatcaaggagagcgagggcgtggtgaacgacgagctgcccaactgctgggagtgccccaagtgcaaccacgccggcaagaccggcaaggcctacaagcagaagagaggccccggcttcaagtacgccagcaacctgcccggcagcctgctgaaggagcagaagatgaacagagacaacaaggagggccaggagcccgccaagagaagaagcgagtgcgaggaggcccccagaagaagaagcgacgagcacagcaagaaggtgccccccgacggcctgctgagaagaaagagcgacgacgtgcacctgagaaagaagagaaagtacgagaagccccaggagctgagcggcagaaagagagccagcagcctgcagaccagccccggcagcagcagccacctgagccccagaccccccctgggcagcagcctgagcccctggtggagaagcagcctgacctacttccagcagcagctgaagcccggcaaggaggacaagctgttcagaaagaagagaagaagctggaagaacgccgaggacagaatggccctggccaacaagcccctgagaagattcaagcaggagcccgaggacgagctgcccgaggccccccccaagaccagagagagcgaccacagcagaagcagcagccccaccgccggccccagcaccgagggcgccgagggccccgaggagaagaagaaggtgaagatgagaagaaagagaagactgcccaacaaggagctgagcagagagctgagcaaggagctgaaccacgagatccagagaaccgagaacagcctggccaacgagaaccagcagcccatcaagagcgagcccgagagcgagggcgaggagcccaagagaccccccggcatctgcgagagaccccacagattcagcaagggcctgaacggcacccccagagagctgagacaccagctgggccccagcctgagaagcccccccagagtgatcagcagacccccccccagcgtgagcccccccaagtgcatccagatggagagacacgtgatcagacccccccccatcagccccccccccgacagcctgcccctggacgacggcgccgcccacgtgatgcacagagaggtgtggatggccgtgttcagctacctgagccaccaggacctgtgcgtgtgcatgagagtgtgcagaacctggaacagatggtgctgcgacaagagactgtggaccagaatcgacctgaaccactgcaagagcatcacccccctgatgctgagcggcatcatcagaagacagcccgtgagcctggacctgagctggaccaacatcagcaagaagcagctgagctggctgatcaacagactgcccggcctgagagacctggtgctgagcggctgcagctggatcgccgtgagcgccctgtgcagcagcagctgccccctgctgagaaccctggacgtgcagtgggtggagggcctgaaggacgcccagatgagagacctgctgagcccccccaccgacaacagacccggccagatggacaacagaagcaagctgagaaacatcgtggagctgagactggccggcctggacatcaccgacgccagcctgagactgatcatcagacacatgcccctgctgagcaagctgcacctgagctactgcaaccacgtgaccgaccagagcatcaacctgctgaccgccgtgggcaccaccaccagagacagcctgaccgagatcaacctgagcgactgcaacaaggtgaccgaccagtgcctgagcttcttcaagagatgcggcaacatctgccacatcgacctgagatactgcaagcaggtgaccaaggagggctgcgagcagttcatcgccgagatgagcgtgagcgtgcagttcggccaggtggaggagaagctgctgcagaagctgagctag

SEQ ID NO: 334953 - protein, 382 aa, Artificial Sequence
  derived and/or modified sequence
MIDHLSRAVISDPEQNLAIEQKESDHILPDSKMTPLRFRKRTLHETKIRTHSTLTENVLSHKLQFDGRIVSRNGRDACRELIGFFFTHDQSLTIYEYRQFGKNRTNVLPFIQKSIYSHQCGRRKGKQYRLGDFYVGATLTFLSSDHLSLPESIKENTLLKLRITNIDQIALDSLKTASMEQEDDIIIQETNDRLVFKAIQDVLKEKLHKRGVRILTGLGKYFQQLDKEGNGLLDKADFKQALKVFHLEVSEKDFESAWLILNDNGNGKVDYGEFKRGIIGEMNEYRKSYVRKAFMKLDFNKSGSVPIINIRKCYCAKKHSQVISGHSTEEEIKSSFLETLKVACSKSDEVSYGEFEDYYEGLSIGIVDDEDFVNILRTPWGI

SEQ ID NO: 334954 - DNA, 3430 bp, Artificial Sequence
  derived and/or modified sequence
ggagccaaattcagccattctttggaagaaagaagcctctacaacaaaggtggacttctgagtcatggacaaaccagaattcttgcccaccagtggtcccacgacttgatttgggaagccttgttgactctgatgatgaggacaatttttcatatattccacttagtacagcaaacctgccaaattcatcttctactcttggctgggtcacaccatgtcaaactccatatactcagtatcatctaaataaattggatcagaacataatacctgaaaatttgccagcaccaacagacaaatgtaaactaaaatatcagcaatgtaaaactgaaattaaagagggctataagcagtatagtcagagaaatgcagaaaatacaaaatcaaatgttacacataaacagtctccaagaaacaagatagatgaaaagtgtgtgcaagatgaagaagccaacacagatgaccttacgactctggataggaaagccatcttacagcaaggttatgcagacaactcttgcgataaacaacagagggcaagaaaattggatgcagaaattgtggctgcagagaagaagaaacagattgttgcagagcaagtgatgatagaccacttatctagggctgtcatcagtgatccagagcaaaatttagccattgagcaaaaagaaagtgatcatatccttccagattcaaagatgacacctcttcgatttagaaaaagaacactacatgaaacaaagataagaactcattctacattaactgaaaatgtgctttctcataaattacagtttgatggtaggatcgtatcacgtaatggacgtgatgcttgcagagagctcattgggttctttttcactcatgaccaatcccttacaatttatgaatatcgacaatttgggaaaaatagaacaaatgtgcttccttttattcaaaaaagcatttatagtcatcagtgtggacgaagaaaaggaaaacaataccgacttggtgatttttatgttggtgcaaccttgacatttttgagttctgatcatctcagccttccagaaagcatcaaagaaaacacattacttaaactccgaatcacaaatattgatcaaatagctttggattctctcaaaactgcttctatggaacaggaggatgatataatcattcaagaaaccaatgataggctggtcttcaaagcaattcaagatgtgctaaaagaaaaactacataaaagaggtgttcgtattttgactggattgggaaaatattttcaacagttggacaaggaaggaaatggacttttagataaggcagattttaagcaagctctaaaagtgtttcacttagaagtgtctgaaaaggattttgagtctgcatggctaattctgaatgacaatggcaatggcaaggttgattatggagaattcaaacgtggtattattggtgaaatgaatgaatacaggaaatcatatgttcgaaaggcctttatgaaactggatttcaacaaaagtggcagtgtgcctattataaacataagaaaatgttactgtgcaaagaagcattctcaagtaatttcaggccattcaacagaggaagaaatcaaatcatcctttctagaaacattaaaagttgcctgcagcaagtctgatgaagtgtcatatggtgaatttgaagattactatgaaggtttaagtataggaatagtagatgatgaagactttgttaacatcttacgtactccatgggggatttagtctttaataatacatatgtcatcaacactaagcattttattggagagatgatatcaatgtaaaggatgatcaaacactggaatatattttcctaggacttcctttattctggtttcttgtttgtttgttttgttttgttttgttttctcaaaaatgttgaatttggaaagagaactatccagaaagatagatgtaggggtgtgttagtgtttgtgcatgtgtatgcctgttcacatgtccttacatttgtaaagatatctttttggtttattacttatcttgcgtatattttagaggtcattttttattaacttcagtaggaaagttacatctgcatcaaacaatatggcaacatctatttattaaccaagtttcctgtcctttcacattgttttttgctacctcttcctcagaatatatttgccaccatggtcaatttgataaattagaattgggcccaaagccagtgagataattcaatgtgtttttaacacatgaaaatattaaaggatatgcaagagaaatttttcaagcagtgtgattatagatgttttctgtatatagaatatttcaaatgatggaggtttaccccatgatgctcatttaaatactgacttgtcttttaaatctgtcttctaaattatgtactgttgttggttaaatagagcacaatgtagttattctaatgcccagttgtatttgttcttttattctgctttttaactgtaatcctttttaccagcatacgattgttattgagcaatatgaaagggaaatgttctttattaaaatcaatacattatcttattaaacaaagatcctaaaagtatattgttgcatatatgaatccaaggaatagttcagtaattattgcctaaaatgtgaaagcatattttgtatcctaaaatgaatgtatgatattctaaacatctgttttagtataacaaacaattgaaacatttccttctaaatatatgttatttaatagttacatgtattataatcattctttctaaattctttgctagtcatttcttcctgggaatacagagaaaagagacaactttatgagttgttttcaacttcataattttaaattttctatgttaatataacataaattagaaaaaataagtgattcaaaatgaaaatatttactttgtagaatatgactttagacatatcactgtatccatctatacttggcagcaacatgagaagtgtgatacatgtgaacccaacaaattcaaagttgcacttttcaagatgtgagaaggtactaaaacttaatactaaaacatgagagggaaaatatgtgtaaacctctagtgctattttcactggctaaattctttatttcttgatttttttaaaaattaggttattaaaattaaaacaatatgctagaagacattttggcagaaataagtctataacactatttttgtcacatatctttttcttggaaaaatttatccaactatagacatcttaaaccctacaaattgttcttgttaaaaatgactaatactgggggtgctcaatatgcatatagtgtttttcattgataatttttatttagttcttaagaaacctgttcttaatgttggcatgtcacatttttctgttactataatcagaaaatgtatagtctgttatactgtaaaaaaaaaaaaaaa

SEQ ID NO: 334955 - DNA, 1149 bp, Artificial Sequence
  derived and/or modified sequence
atgatcgaccacctgtcgagagccgtgatttcagacccggaacagaacctcgccatcgaacagaaggagtccgatcacattctgcctgacagcaagatgacccctctgaggtttagaaagagaacactccatgagactaaaattagaacacactcaacacttactgaaaacgtcctgtctcataagctacaatttgacgggagaattgtgtctcgcaacggtagggatgcctgccgggagttgatcggtttctttttcacacacgatcagagcctgactatctacgaatatcgccagttcggcaaaaacagaactaacgtcttgcccttcattcagaaatctatttattcccaccagtgtggcagacgcaagggaaaacaatataggctcggtgatttttacgtcggcgcgacactgacttttctgtcctccgatcatttgagtttgcctgagtctattaaggagaacacattgctgaaattacggattaccaatatcgatcagattgccctcgatagcctgaaaactgcttctatggaacaggaagacgacattattatacaggaaacaaacgatagactcgtgtttaaggctatccaagatgttctgaaggagaagctgcataaacgaggggtaaggattctgaccggtctgggtaagtactttcagcagcttgataaagagggcaacgggttactggacaaggctgacttcaagcaggccctgaaagtgtttcatctggaggtgtctgaaaaagacttcgagtctgcctggctgatccttaacgataacggcaatggtaaagtggactacggagagttcaagcgaggcattatcggggagatgaacgaatacaggaagtcctacgtgcgtaaggcctttatgaagctggacttcaacaaatctgggagtgtgccgatcatcaatattagaaaatgttattgcgccaaaaaacacagccaggtgatctccggccactctacggaagaggagatcaagagctcttttttggaaactttgaaggtagcctgtagtaagtctgatgaggtgagttatggcgagtttgaggactactacgagggattgagtattgggatagttgatgatgaggactttgtcaatatcctacggacaccttggggcatctag

SEQ ID NO: 334956 - DNA, 1149 bp, Artificial Sequence
  derived and/or modified sequence
atgattgaccacctgagccgggccgtcatcagtgaccctgagcagaacctggccatcgagcagaaggagagtgaccacatcctgcctgacagcaagatgacccccctgcgcttcaggaagaggaccctgcacgagaccaagatccgcacccacagcaccctgacagaaaatgtgctgagccacaagctgcagtttgatggaagaattgtgtccagaaatggaagagatgcctgccgggagctgattggcttcttcttcacccatgaccagagcctgaccatctatgagtaccggcagtttgggaagaacagaaccaacgtgctgcccttcatccagaagagcatctacagccaccagtgtggccgcaggaagggcaagcagtaccgcctgggggacttctacgtgggcgccaccctgaccttcctgagcagtgaccacctgagcctgcctgagagcatcaaggagaacaccctgctgaagctgcgcatcaccaacatcgaccagatcgccctggacagcctgaagacagcctccatggagcaggaggatgacatcatcatccaggagaccaatgaccggctggtgttcaaggccatccaggatgtgctgaaggagaagctgcacaagaggggcgtgcgcatcctgaccggcctgggcaagtacttccagcagctggacaaggagggcaatggcctgctggacaaggctgacttcaagcaggccctgaaggtgttccacctggaggtgtctgagaaggactttgagagcgcctggctgatcctgaatgacaatggaaatggcaaggtggactatggagagttcaagaggggcatcattggagagatgaatgagtacaggaagagctatgtgaggaaggccttcatgaagctggacttcaacaagagcggctctgtgcccatcatcaacatcaggaagtgctactgtgccaagaagcacagccaggtgatcagcggccacagcacagaggaggagatcaagagcagcttcctggagaccctgaaggtggcctgcagcaagagtgatgaggtgtcctatggagaatttgaggactactatgagggcctgagcatcggcatcgtggatgatgaggactttgtgaacatcctgcggaccccctggggcatctag

SEQ ID NO: 334957 - DNA, 1149 bp, Artificial Sequence
  derived and/or modified sequence
atgatcgaccacctgagccgggccgtgatcagcgaccccgagcagaatctagccattgaacagaaggagagcgaccacattcttcccgactcgaaaatgaccccactcagattccggaagcgtaccctgcatgaaaccaaaattagaacacatagcaccctgacagagaacgttttgagccataagctgcagtttgatgggcgaatcgtttcaaggaatggcagggacgcctgcagggaactgatcggatttttcttcacccacgaccagagcctgactatctacgagtacaggcagttcggcaaaaatcgtaccaatgtcctgccctttatacaaaagagcatttattcccaccagtgcggccgccgaaagggcaaacagtatcggctaggggatttttacgttggcgcaactttgacctttctgagcagcgaccatctgagcctcccagagagtattaaagaaaatactctactaaaattacggataaccaatattgatcagatcgccctggacagtctgaaaacagccagcatggaacaagaggatgacattatcatccaggaaactaacgatcggctagtcttcaaggcgatacaagatgtcctcaaagagaaattgcataagcgaggcgtccggatccttacgggactcgggaaatacttccagcagttggataaagaaggcaacggcctgctcgataaagctgatttcaaacaggcattgaaagttttccatctggaagtatccgagaaagacttcgaaagcgcttggctgattctcaatgataatgggaacggcaaggtcgattacggcgaatttaaacgtggtataattggcgagatgaatgagtataggaagtcttacgtgaggaaagcctttatgaagctcgacttcaacaaatccggaagtgtgcctataattaatattcgtaaatgttactgcgcaaaaaagcacagccaggtaattagcggtcactccaccgaggaggagattaagtcctcattcctggaaacactgaaagtggcctgcagtaaaagtgatgaggtgtcgtatggcgaatttgaggactactacgaggggctcagtatcggcattgtggacgacgaggatttcgtgaatatacttcggacaccttggggaatctag

SEQ ID NO: 334958 - DNA, 1149 bp, Artificial Sequence
  derived and/or modified sequence
atgattgatcacctctcccgcgcagtgataagtgatcccgagcagaacttggccatcgagcaaaaagagagcgatcacatcctgcccgactccaaaatgacgcctttaagatttcggaagaggacactgcacgagacaaagattcggacacactccaccctcacagagaacgtcttgtcacacaaattgcagttcgacggtagaattgtgagccggaacggtcgagatgcttgcagggagctgatcggattcttctttacccatgatcagtccctgacaatctacgagtatcgccaattcggaaagaaccgcacgaacgtcttgccatttatccagaagtctatctattctcaccaatgtggcagacgaaagggaaaacaatacaggctgggcgacttctacgtgggggctaccctgacatttctgtcgtctgaccatctctcactccccgagagcatcaaagagaacaccttgttgaagcttcggatcaccaatatagatcagattgcgctggatagtctgaagaccgccagcatggagcaagaggatgatattatcatacaggagaccaacgaccggctggtgttcaaggctattcaggacgtgctgaaggaaaaactgcacaagcgcggtgtgagaattctgacaggtttaggaaagtattttcaacagctggacaaggaaggcaatggtcttctggacaaagcagactttaagcaggccttgaaggtatttcacttggaagtgagtgagaaagactttgagtcagcttggcttattctgaacgataatgggaacggaaaggtcgactacggtgaattcaagcggggaatcatcggcgaaatgaatgagtatagaaaatcttatgtgaggaaagcatttatgaagctcgattttaacaagtctggatccgttcctattattaacattagaaaatgctattgtgctaaaaaacatagccaagttatatccgggcattcgaccgaggaggaaatcaagtctagctttctcgaaacacttaaagtggcatgttcgaaatccgacgaagtgtcttacggcgaattcgaggattattatgaggggctgagcattggaattgtggacgatgaggatttcgtgaatatccttaggacaccttggggcatttag

SEQ ID NO: 334959 - DNA, 1149 bp, Artificial Sequence
  derived and/or modified sequence
atgatcgaccacctgagcagagccgtgatcagcgaccccgagcagaacctggccatcgagcagaaggagagcgaccacatcctgcccgacagcaagatgacccccctgagattcagaaagagaaccctgcacgagaccaagatcagaacccacagcaccctgaccgagaacgtgctgagccacaagctgcagttcgacggcagaatcgtgagcagaaacggcagagacgcctgcagagagctgatcggcttcttcttcacccacgaccagagcctgaccatctacgagtacagacagttcggcaagaacagaaccaacgtgctgcccttcatccagaagagcatctacagccaccagtgcggcagaagaaagggcaagcagtacagactgggcgacttctacgtgggcgccaccctgaccttcctgagcagcgaccacctgagcctgcccgagagcatcaaggagaacaccctgctgaagctgagaatcaccaacatcgaccagatcgccctggacagcctgaagaccgccagcatggagcaggaggacgacatcatcatccaggagaccaacgacagactggtgttcaaggccatccaggacgtgctgaaggagaagctgcacaagagaggcgtgagaatcctgaccggcctgggcaagtacttccagcagctggacaaggagggcaacggcctgctggacaaggccgacttcaagcaggccctgaaggtgttccacctggaggtgagcgagaaggacttcgagagcgcctggctgatcctgaacgacaacggcaacggcaaggtggactacggcgagttcaagagaggcatcatcggcgagatgaacgagtacagaaagagctacgtgagaaaggccttcatgaagctggacttcaacaagagcggcagcgtgcccatcatcaacatcagaaagtgctactgcgccaagaagcacagccaggtgatcagcggccacagcaccgaggaggagatcaagagcagcttcctggagaccctgaaggtggcctgcagcaagagcgacgaggtgagctacggcgagttcgaggactactacgagggcctgagcatcggcatcgtggacgacgaggacttcgtgaacatcctgagaaccccctggggcatctag

SEQ ID NO: 334960 - protein, 143 aa, Artificial Sequence
  derived and/or modified sequence
MTLRCLEPSGNGGEGTRSQWGTAGSAEEPSPQAARLAKALRELGQTGWYWGSMTVNEAKEKLKEAPEGTFLIRDSSHSDYLLTISVKTSAGPTNLRIEYQDGKFRLDSIICVKSKLKQFDSVVHLIDYYVQMCKDKRTGPEAP

SEQ ID NO: 334961 - protein, 161 aa, Artificial Sequence
  derived and/or modified sequence
MTLRCLEPSGNGGEGTRSQWGTAGSAEEPSPQAARLAKALRELGQTGWYWGSMTVNEAKEKLKEAPEGTFLIRDSSHSDYLLTISVKTSAGPTNLRIEYQDGKFRLDSIICVKSKLKQFDSVVHLIDYYVQMCKDKRTGPEAPRNGTVHLYLTKPLYTSAP

SEQ ID NO: 334962 - DNA, 2761 bp, Artificial Sequence
  derived and/or modified sequence
cttcccatagccgcggcctcaactaaaagtggccattgacctttcaagctttcgagcagtgatgcaatagaatagtatttcaaagaaaaatgcttatcgaaattttggatccggttttcccgtgattgttaagggtttcttttaaaaagtaggtcacatttcaagtaggtcatatttcgggggcgggtgcgcagacaaggagatgagtttccactaaggccagggggcctccaacggggttggaggtgagaatcccaggtagggtagaggtgccgagatccttccgaatcccagccctggggcgtcagccctgcagggaatggcagagacactctccggactgagggaaccgaggccagtcaccaagccccttccgggcgcgcaggcgatcagtgggtgaccgcggctgcgagggactttgtcatccgtcctccaggatctggggagaaagagccccatcccttctctctctgccaccatttcggacaccccgcagggactcgttttgggattcgcactgacttcaaggaaggacgcgaacccttctctgaccccagctcgggcggccacctgtctttgccgcggtgacccttctctcatgaccctgcggtgccttgagccctccgggaatggcggggaagggacgcggagccagtgggggaccgcggggtcggcggaggagccatccccgcaggcggcgcgtctggcgaaggccctgcgggagctcggtcagacaggatggtactggggaagtatgactgttaatgaagccaaagagaaattaaaagaggcaccagaaggaactttcttgattagagatagctcgcattcagactacctactaacaatatctgttaaaacatcagctggaccaactaatcttcgaatcgaataccaagacggaaaattcagattggactctatcatatgtgtcaaatccaagcttaaacaatttgacagtgtggttcatctgatcgactactatgttcagatgtgcaaggataagcggacaggtccagaagccccccggaacggcactgttcacctttatctgaccaaaccgctctacacgtcagcaccatctctgcagcatctctgtaggctcaccattaacaaatgtaccggtgccatctggggactgcctttaccaacaagactaaaagattacttggaagaatataaattccaggtataaatgtttctctttttttaaacatgtctcacatagagtatctccgaatgcagctatgtaaaagagaaccaaaacttgagtgctctggataactatatggaatgctttctaagaacagctgaagctaatctaatttaaatttaacagcttgaagaggtagctaggtgtttaaagttcctccagatacttttacctgagtgatgcttcccttcctaaggctgaccaagacctgttgatccttttagattaaaaataaaatgtcgcatgtaaaggctgaagtcgcgttttatcagaatgccttgccttcttaggttcttttccattatgtcaaaggtccaggctccagtaggagagaaagaactcctcataggaatactgaagaagtgggaaggaaccaagctgacacaggcctcactgcaatttgatatgcctgctgatcagagtctcttgggcattttatattttgcattctgatgtacctaggagttttgttaaacagatgatgtatgtgagtatttatcccattttatgcaattaaccaaatcaaccaaaaaaagtgaccatgaagtcctgtatttgtctttttactacatgtaggaactctcatgtgaatgagtactgtagtaatccattctatgggagccttatttcagaaatatttcaaactggtgcaaatggaaaagactttctcttttcctttaaagctaaagacaagaatatcatgctatacaggtgcaactcaatccccgttaataaaaaccaatgtaggtataggcattctaccctttgaaatagctgtgtcccaacctgttgccattgattttttggaaatggctttagaaatatccaagttgtccttgaattgtctaaccatggacataaacagttgtctcccttctactgtgtagaatactttgacttaattttcttccagatacagggggatacctgcctgtttttcaaagtgtttatttactgctgttactatttgattagaatgtattaaataaaaaaaacctgatttctacaagttgcacttattgagttctagagaacgtacactttcatggtaatagaggattgccataaaaacttacgtcaagtgaaataagccaattattcaacaaaaggtagaacattacttgccattctgtaaagttatgggctgtacctgccccctttgcaatttggaaagcatggtttagaaactacaggcattgtcaagtggccgggtcttttataatttgaataggcataacactgatgtcctctgtgtttccaaaaacatggtttagaaactacaaacattatgacatggccagtcttttacaagttgagtaggcataatactaaagaaaaatacaaagttttgtggccacttattttttgctatgttagtctgcataactgttataaatgtaccatcttttctagagtccagacattatttattttatggctttaaaattttcctgcatagctacaatcctgtggtgtgtcaccataaaggtggaccctgtgtgaatgagaaaattcagttataaattgtaataaaacctgcttactgga

SEQ ID NO: 334963 - DNA, 1041 bp, Artificial Sequence
  derived and/or modified sequence
tctcgtcgcagccgccgcggctggcgggccttgggcttcccctgaagcatgagccctctcgcccgcagccaccctcaccgcgtggcccgcggacagtgcgcgccggggtcccgggtgcacagcctcaggataccccgtgcccgcagctcgggcgcccgcggcaggcgatcagtgggtgaccgcggctgcgagggactttgtcatccgtcctccaggatctggggagaaagagccccatcccttctctctctgccaccatttcggacaccccgcaggcggcgcgtctggcgaaggccctgcgggagctcggtcagacaggatggtactggggaagtatgactgttaatgaagccaaagagaaattaaaagaggcaccagaaggaactttcttgattagagatagctcgcattcagactacctactaacaatatctgttaaaacatcagctggaccaactaatcttcgaatcgaataccaagacggaaaattcagattggactctatcatatgtgtcaaatccaagcttaaacaatttgacagtgtggttcatctgatcgactactatgttcagatgtgcaaggataagcggacaggtccagaagccccccggaacggcactgttcacctttatctgaccaaaccgctctacacgtcagcaccatctctgcagcatctctgtaggctcaccattaacaaatgtaccggtgccatctggggactgcctttaccaacaagactaaaagattacttggaagaatataaattccaggtataaatgtttctctttttttaaacatgtctcacatagagtatctccgaatgcagctatgtaaaagagaaccaaaacttgagtgctctggataactatatggaatgctttctaagaacagctgaagctaatctaatttaaatttaacagcttgaagaggtagctaggtgtttaaagttcctccagatacttttacctgagtgatgcttcccttcctaaggctgaccaagacctgttgatccttttagattaaaaataaaatgtcgcatgt

SEQ ID NO: 334964 - DNA, 2391 bp, Artificial Sequence
  derived and/or modified sequence
gcggctctgccccgcggcctagcgttgctgcctgctttctccagccccttctcggcgtctggaagtgtctggagtttcttttttttatttcccctaaactgccattcaaattaataatcctcctaataacctgatctcccgctcctccccaccggcctgcctcccgccctcgctccttcctccctccctccctctctccttcccacctccagggtcgcagccggagggaaacccggcagcagtccgagagtggaggtgtcccagcccgtagggggcgtcgccgcgcggtgggggatggggtcgaggcaatgatcctcgaggcttttgtgtgccctctgcgcacggaactccgaccgccgcctccgagcgcggggctggttgcatccccgggcatctcgttcccaaattaaacgttaacgggggaaacaagggcagacgcccctcctctcccgggcccctcccacctccccttttccccccacccccccgccccatgtccgctgaggaggctgcctggtgcggaggcggcggcggcggccgcggccgaggtcgaggcgatcagtgggtgaccgcggctgcgagggactttgtcatccgtcctccaggatctggggagaaagagccccatcccttctctctctgccaccatttcggacaccccgcagggactcgttttgggattcgcactgacttcaaggaaggacgcgaacccttctctgaccccagctcgggcggccacctgtctttgccgcggtgacccttctctcatgaccctgcggtgccttgagccctccgggaatggcggggaagggacgcggagccagtgggggaccgcggggtcggcggaggagccatccccgcaggcggcgcgtctggcgaaggccctgcgggagctcggtcagacaggatggtactggggaagtatgactgttaatgaagccaaagagaaattaaaagaggcaccagaaggaactttcttgattagagatagctcgcattcagactacctactaacaatatctgttaaaacatcagctggaccaactaatcttcgaatcgaataccaagacggaaaattcagattggactctatcatatgtgtcaaatccaagcttaaacaatttgacagtgtggttcatctgatcgactactatgttcagatgtgcaaggataagcggacaggtccagaagccccccggaacggcactgttcacctttatctgaccaaaccgctctacacgtcagcaccatctctgcagcatctctgtaggctcaccattaacaaatgtaccggtgccatctggggactgcctttaccaacaagactaaaagattacttggaagaatataaattccaggtataaatgtttctctttttttaaacatgtctcacatagagtatctccgaatgcagctatgtaaaagagaaccaaaacttgagtgctctggataactatatggaatgctttctaagaacagctgaagctaatctaatttaaatttaacagcttgaagaggtagctaggtgtttaaagttcctccagatacttttacctgagtgatgcttcccttcctaaggctgaccaagacctgttgatccttttagattaaaaataaaatgtcgcatgtaaaggctgaagtcgcgttttatcagaatgccttgccttcttaggttcttttccattatgtcaaaggtccaggctccagtaggagagaaagaactcctcataggaatactgaagaagtgggaaggaaccaagctgacacaggcctcactgcaatttgatatgcctgctgatcagagtctcttgggcattttatattttgcattctgatgtacctaggagttttgttaaacagatgatgtatgtgagtatttatcccattttatgcaattaaccaaatcaaccaaaaaaagtgaccatgaagtcctgtatttgtctttttactacatgtaggaactctcatgtgaatgagtactgtagtaatccattctatgggagccttatttcagaaatatttcaaactggtgcaaatggaaaagactttctcttttcctttaaagctaaagacaagaatatcatgctatacaggtgcaactcaatccccgttaataaaaaccaatgtaggtataggcattctaccctttgaaatagctgtgtcccaacctgttgccattgattttttggaaatggctttagaaatatccaagttgtccttgaattgtctaaccatggacataaacagttgtctcccttctactgtgtagaatactttgacttaattttcttccagatacagggggatacctgcctgtttttcaaagtgtttatttactgctgttactatttgattagaatgtattaaataaaaaaaacctgatttctacaa

SEQ ID NO: 334965 - DNA, 2072 bp, Artificial Sequence
  derived and/or modified sequence
acctgatcaaggggaccgcctccggtccccggccgtgggcaccgggacgagcacggcgtccccacgccatcgatgtgtcttagagccggagagtctggtttccgaggacccacagtcgctcctgcacgcccaccccccgcaaaagtgcggccaggagggtcgcatcgagggggcgccgccgggatgtttagaggaacccacccccgtggcaggccaagggccaaggatcgctatccttccctgaacccgggcgctcagctggcccgggcgatcagtgggtgaccgcggctgcgagggactttgtcatccgtcctccaggatctggggagaaagagccccatcccttctctctctgccaccatttcggacaccccgcagggactcgttttgggattcgcactgacttcaaggaaggacgcgaacccttctctgaccccagctcgggcggccacctgtctttgccgcggtgacccttctctcatgaccctgcggtgccttgagccctccgggaatggcggggaagggacgcggagccagtgggggaccgcggggtcggcggaggagccatccccgcaggcggcgcgtctggcgaaggccctgcgggagctcggtcagacaggatggtactggggaagtatgactgttaatgaagccaaagagaaattaaaagaggcaccagaaggaactttcttgattagagatagctcgcattcagactacctactaacaatatctgttaaaacatcagctggaccaactaatcttcgaatcgaataccaagacggaaaattcagattggactctatcatatgtgtcaaatccaagcttaaacaatttgacagtgtggttcatctgatcgactactatgttcagatgtgcaaggataagcggacaggtccagaagccccccggaacggcactgttcacctttatctgaccaaaccgctctacacgtcagcaccatctctgcagcatctctgtaggctcaccattaacaaatgtaccggtgccatctggggactgcctttaccaacaagactaaaagattacttggaagaatataaattccaggtataaatgtttctctttttttaaacatgtctcacatagagtatctccgaatgcagctatgtaaaagagaaccaaaacttgagtgctctggataactatatggaatgctttctaagaacagctgaagctaatctaatttaaatttaacagcttgaagaggtagctaggtgtttaaagttcctccagatacttttacctgagtgatgcttcccttcctaaggctgaccaagacctgttgatccttttagattaaaaataaaatgtcgcatgtaaaggctgaagtcgcgttttatcagaatgccttgccttcttaggttcttttccattatgtcaaaggtccaggctccagtaggagagaaagaactcctcataggaatactgaagaagtgggaaggaaccaagctgacacaggcctcactgcaatttgatatgcctgctgatcagagtctcttgggcattttatattttgcattctgatgtacctaggagttttgttaaacagatgatgtatgtgagtatttatcccattttatgcaattaaccaaatcaaccaaaaaaagtgaccatgaagtcctgtatttgtctttttactacatgtaggaactctcatgtgaatgagtactgtagtaatccattctatgggagccttatttcagaaatatttcaaactggtgcaaatggaaaagactttctcttttcctttaaagctaaagacaagaatatcatgctatacaggtgcaactcaatccccgttaataaaaaccaatgtaggtataggcattctaccctttgaaatagctgtgtcccaacctgttgccattgattttttggaaatggctttagaaatatccaagttgtccttgaattgtctaaccatggacataaacagttgtctcccttctactgtgtagaatactttgacttaattttcttccagatacagggggatacctgcctgtttttcaaagtgtttatttactgctgttactatttgattagaa

SEQ ID NO: 334966 - DNA, 1716 bp, Artificial Sequence
  derived and/or modified sequence
gaggtcgaggtaagagcgcggcgttggtggtttgcattttccgcagcgctcgcgaccgcccgctcggccccggcctcgcctcggagccccgcgagggctgcgcgctcgggccgattcctcgacagcgcccgcggcggcgagaaccaccgcagccatcctggtccgggagcgaccgccgcggcacccccaaccccgccagagcgggcaccaggaagcggggggaggggagcgaggagcctcccgggcggagatgcggcagctcccgcacctccgcaccccgggttggtgcctcggggccccgcagcgctttagggcggagaaccaagtttgtgtgggtgcttcttcctgggggccctcgggctgcgccaggtgtgagaccggaatgccaatttggggaatctctcctgttctttcctttttaattttttctacttgtccttgacaagggcctattcccactggatctgcaggtgactatttgctcttcctaggtcgccagtctttgatttcagctagtgaccctgggcgggaagacaccctgttcaccctcctcctgacctccgccccccacctcttcagccaactttatcttggatctctgctctctttatcttttctctagagctgggccagggcgctaactggaagcttggggttaaatggtgcaggaacgtagaggcggaggagtccctgggattttccacgtctatttccccacccccaccccagccgcaggggtccagtttggactgacccaacctcccgctttctctttgtaggcgatcagtgggtgaccgcggctgcgagggactttgtcatccgtcctccaggatctggggagaaagagccccatcccttctctctctgccaccatttcggacaccccgcagggactcgttttgggattcgcactgacttcaaggaaggacgcgaacccttctctgaccccagctcgggcggccacctgtctttgccgcggtgacccttctctcatgaccctgcggtgccttgagccctccgggaatggcggggaagggacgcggagccagtgggggaccgcggggtcggcggaggagccatccccgcaggcggcgcgtctggcgaaggccctgcgggagctcggtcagacaggatggtactggggaagtatgactgttaatgaagccaaagagaaattaaaagaggcaccagaaggaactttcttgattagagatagctcgcattcagactacctactaacaatatctgttaaaacatcagctggaccaactaatcttcgaatcgaataccaagacggaaaattcagattggactctatcatatgtgtcaaatccaagcttaaacaatttgacagtgtggttcatctgatcgactactatgttcagatgtgcaaggataagcggacaggtccagaagccccccggaacggcactgttcacctttatctgaccaaaccgctctacacgtcagcaccatctctgcagcatctctgtaggctcaccattaacaaatgtaccggtgccatctggggactgcctttaccaacaagactaaaagattacttggaagaatataaattccaggtataaatgtttctctttttttaaacatgtctcacatagagtatctccgaatgcagctatgtaaaagagaaccaaaacttgagtgctctggataactatatggaatgctttctaagaacagctgaagctaatc

SEQ ID NO: 334967 - protein, 1207 aa, Artificial Sequence
  derived and/or modified sequence
MDLHMMNCELLATCSALGYLEGDTYHKEPDCLESVKDLIRYLRHEDETRDVRQQLGAAQILQSDLLPILTQHHQDKPLFDAVIRLMVNLTQPALLCFGNLPKEPSFRHHFLQVLTYLQAYKEAFASEKAFGVLSETLYELLQLGWEERQEEDNLLIERILLLVRNILHVPADLDQEKIDDDASAHDQLLWAIHLSGLDDLLLFLASSSAEEQWSLHVLEIVSLMFRDQNPEQLAGVGQGRLAQERSADFAELEVLRQREMAEKKTRALQRGNRHSRFGGSYIVQGLKSIGERDLIFHKGLHNLRNYSSDLGKQPKKVPKRRQAARELSIQRRSALNVRLFLRDFCSEFLENCYNRLMGSVKDHLLREKAQQHDETYYMWALAFFMAFNRAASFRPGLVSETLSVRTFHFIEQNLTNYYEMMLTDRKEAASWARRMHLALKAYQELLATVNEMDISPDEAVRESSRIIKNNIFYVMEYRELFLALFRKFDERCQPRSFLRDLVETTHLFLKMLERFCRSRGNLVVQNKQKKRRKKKKKVLDQAIVSGNVPSSPEEVEAVWPALAEQLQCCAQNSELSMDSVVPFDAASEVPVEEQRAEAMVRIQDCLLAGQAPQALTLLRSAREVWPEGDVFGSQDISPEEEIQLLKQILSAPLPRQQGPEERGAEEEEEEEEEEEEELQVVQVSEKEFNFLDYLKRFACSTVVRAYVLLLRSYQQNSAHTNHCIVKMLHRLAHDLKMEALLFQLSVFCLFNRLLSDPAAGAYKELVTFAKYILGKFFALAAVNQKAFVELLFWKNTAVVREMTEGYGSLDDRSSSRRAPTWSPEEEAHLRELYLANKDVEGQDVVEAILAHLNTVPRTRKQIIHHLVQMGLADSVKDFQRKGTHIVLWTGDQELELQRLFEEFRDSDDVLGHIMKNITAKRSRARIVDKLLALGLVAERRELYKKRQKKLASSILPNGAESLKDFCQEDLEEEENLPEEDSEEEEEGGSEAEQVQGSLVLSNENLGQSLHQEGFSIPLLWLQNCLIRAADDREEDGCSQAVPLVPLTEENEEAMENEQFQQLLRKLGVRPPASGQETFWRIPAKLSPTQLRRAAASLSQPEEEQKLQPELQPKVPGEQGSDEEHCKEHRAQALRALLLAHKKKAGLASPEEEDAVGKEPLKAAPKKRQLLDSDEEQEEDEGRNRAPELGAPGIQKKKRYQIEDDEDD

SEQ ID NO: 334968 - DNA, 3624 bp, Artificial Sequence
  derived and/or modified sequence
atggaccttcatatgatgaactgcgagctgctggctacatgctccgcacttggatatttggagggcgatacttaccacaaagagccggattgcttggagagcgtgaaggacctcatccgctatcttcgccacgaggatgaaactcgcgacgtgaggcaacagcttggtgccgctcaaatcttacagtctgacttgttgccgatcctaacacagcatcatcaagataaacccctgtttgatgcagtcattaggttgatggtgaacctaacacagcctgccctgctctgcttcggcaacctccccaaagagccctctttcagacatcatttcctccaggtcctgacttacctccaagcatataaggaagcatttgcctccgagaaggccttcggagtcctcagcgagacgctgtacgaactactccagcttggatgggaagaaaggcaggaggaagacaatctgctcattgaaagaatcctgctgctcgtgagaaacattttacacgtcccggccgatctagaccaggagaagattgacgacgatgccagcgctcacgaccaactgttatgggcaattcacctctctggcctggatgacctgttactgtttctcgcatccagttctgccgaggagcagtggagtctccatgtgctcgagattgtgagtctgatgttccgcgatcagaatcccgaacagctcgccggcgtcggtcaggggcgcctcgcacaagaacgcagcgccgattttgcagagctggaggttctccggcagcgcgagatggccgaaaagaaaacacgggcgctgcagaggggaaatagacacagtagatttggaggaagctacattgtacagggcttgaaatcaattggcgagagagacctgatctttcataaagggctgcacaatctgcgaaattactcaagtgatctggggaagcagcccaaaaaagtcccaaagcggcgacaggccgcccgagaattatcgatacagcgtcgttctgcattgaatgttcgattattcctccgcgatttttgcagcgagtttttggagaattgttataaccgactcatgggatcagtgaaggatcatctgctgagggagaaggcccagcaacacgacgagacatattatatgtgggccctggccttctttatggcgtttaaccgtgccgcttcatttagaccgggcctagtctctgaaacactgagtgtcagaaccttccactttattgagcagaacctcacaaattattacgaaatgatgctgactgatcgaaaggaggccgcgtcgtgggccaggagaatgcacctagctctcaaagcttatcaggagctccttgcaaccgttaatgaaatggatattagtccagatgaagcagtgagagagtcctcaaggataatcaaaaacaacattttctacgtaatggagtacagagagctattcctggcactgtttagaaaattcgacgagagatgccagccacgctctttcctgagggacctagtggagacaacccatctatttctgaagatgctggaaagattttgtcgatcgcggggcaatctagtggtgcagaacaagcagaaaaagcgcaggaagaaaaagaagaaagtgctcgatcaggccattgtgtctggcaacgtgcctagctccccagaggaggtcgaggcagtgtggccagctctggcagaacaactccaatgctgcgctcagaatagcgagttgagcatggacagcgtcgtcccctttgatgcggccagcgaagttccggtggaggagcagcgcgccgaagcaatggtccgcatccaggattgtctgctcgccgggcaggcacctcaagcccttactctgctgaggtctgcgcgagaagtgtggccggaaggagacgtgtttgggtcacaggacatcagcccagaagaggaaattcaactgctcaaacagattttgtccgctcccctgccacgacagcagggtccggaggaaagaggggctgaggaggaagaggaggaggaagaagaagaggaagaagaactccaagtggtgcaggtttctgagaaggaattcaactttctggactatctgaagaggttcgcttgtagcaccgtggtccgagcatacgtgcttctcctacgttcctatcagcagaattccgcccacacaaaccactgtatcgtcaagatgctacatagactggctcacgaccttaaaatggaggcactgctgtttcagctgtctgtcttctgtctgtttaaccgactgctgtccgaccccgccgcaggtgcatacaaagagttagtaacatttgcaaagtatatcctggggaaattctttgcgcttgctgcagtgaatcagaaagcgttcgtggaactgctcttttggaagaataccgcggtggtccgggagatgaccgagggctacggctccctggacgacagaagtagctctcgccgcgccccaacttggtcccctgaggaagaggctcatctgagagaactctacttagctaacaaagatgttgagggccaggacgtcgtcgaggccatcctggcccacctgaatacagtgccacgaacccgcaagcagattatccatcaccttgttcagatgggactggcagattccgtgaaggacttccagcggaagggtacacacattgtgctgtggacaggagatcaggagcttgagttacagcgcctcttcgaggagttccgtgacagcgacgacgtcttgggtcacattatgaagaacatcacagccaagcgctctagggccagaattgtggacaagctcctcgcacttggtctcgtcgcagagcgcagggaactttataagaaacgccagaaaaaattggcaagctcaatactccccaatggagctgagagcctgaaagatttctgtcaagaagacctggaggaagaggaaaacttaccagaggaagactcagaggaagaggaggaaggcggctctgaagccgaacaagttcagggaagcctcgtcttgagcaacgaaaacctcggacagtctcttcaccaagagggcttcagtattcctttactgtggctgcaaaactgcctaatcagggccgcagacgaccgcgaagaggatgggtgtagccaagctgtacctttggttccactgactgaggaaaatgaagaagccatggagaatgagcagttccagcagctgctccggaagctgggggtcaggccaccggcgtctgggcaggaaaccttttggagaattcctgcaaaactcagtcccactcaattacgcagagccgccgcgagtctctcccagcctgaggaagaacaaaagctacagcccgaactccaaccaaaagttcccggggaacagggaagtgacgaagagcattgcaaagagcaccgggcgcaggccctgcgcgctctgctcctggcccataagaaaaaagctggactggctagtccagaagaagaggatgcagtgggaaaggagcccctcaaggcagcaccaaagaaacggcagctcctggatagcgatgaagagcaggaggaggatgagggccgcaatagagctccagagttgggagccccagggattcagaaaaagaagcgataccagattgaggatgacgaggacgattag

SEQ ID NO: 334969 - DNA, 3624 bp, Artificial Sequence
  derived and/or modified sequence
atggacctgcacatgatgaactgtgagctgctggccacctgcagcgccctgggctacctggagggggacacctaccacaaggagccagactgcctggagagcgtgaaggacctgatccgctacctgcggcatgaagatgagaccagagatgtgcggcagcagctgggcgccgcccagatcctgcagagcgacctgctgcccatcctgacccagcaccaccaggacaagcccctgtttgatgctgtgatccggctgatggtgaacctgacccagcctgccctgctgtgctttggaaacctgcccaaggagcccagcttccgccaccacttcctgcaggtgctgacctacctgcaggcctacaaggaggcctttgccagcgagaaggccttcggcgtgctgtctgagaccctgtatgagctgctgcagctgggctgggaggagcggcaggaggaggacaacctgctgattgaaagaatcctgctgctggtgaggaacatcctgcacgtgcctgctgacctggaccaggagaagattgatgatgatgccagcgcccatgaccagctgctgtgggccatccacctgagcggcctggatgacctgctgctcttcctggccagcagcagcgctgaggagcagtggagcctgcacgtgctggagatcgtgtccctgatgttccgggaccagaaccctgagcagctggccggcgtgggccagggccgcctggcccaggagaggtctgctgactttgctgagctggaggtgctgcggcagcgggagatggccgagaagaagacccgggccctgcagaggggcaacagacacagcagatttggaggcagctacatcgtgcagggcctgaagagcattggagagcgggacctgatcttccacaagggcctgcacaacctgaggaactacagcagtgacctgggcaagcagcccaagaaggtgcccaagaggcggcaggccgcccgggagctgagcatccagaggagaagtgccctgaatgtgcggctcttcctgcgggacttctgcagcgagttcctggagaactgctacaaccggctgatgggctctgtgaaggaccacctgctgcgggagaaggcccagcagcatgatgagacctactacatgtgggccctggccttcttcatggccttcaacagagctgccagcttccggcccggcctggtgtctgagaccctgtctgtgaggaccttccacttcatcgagcagaacctgaccaactactatgagatgatgctgacagacaggaaggaggccgcctcctgggcccggaggatgcacctggccctgaaggcctaccaggagctgctggccaccgtgaatgagatggacatcagcccagatgaagctgtgcgggagagcagccgcatcatcaagaacaacatcttctacgtgatggagtaccgggagctgttcctggccctcttcaggaagtttgatgagcgctgccagcccaggagcttcctgcgggacctggtggagaccacccacctgttcctgaagatgctggagcgcttctgccgcagccggggcaacctggtggtgcagaacaagcagaagaagaggaggaagaagaagaagaaggtgctggaccaggccatcgtgtctggaaatgtgcccagcagccctgaggaggtggaggccgtgtggccagccctggccgagcagctgcagtgctgtgcccagaacagcgagctgtccatggattctgtggtgccctttgatgctgccagcgaggtgcctgtggaggagcagagagctgaggccatggtgcgcatccaggactgcctgctggccggccaggccccccaggccctgaccctgctgcggagcgcccgggaggtgtggccagaaggagatgtgtttggcagccaggacatcagccctgaggaggagatccagctgctgaagcagatcctgagcgcccccctgccccggcagcagggccctgaggagagaggagctgaggaggaggaggaggaggaggaggaggaggaggaggagctgcaggtggtgcaggtgtctgagaaggagttcaacttcctggactacctgaagagatttgcctgcagcacagtggtgcgggcctacgtgctgctgctgcggagctaccagcagaacagcgcccacaccaaccactgcatcgtgaagatgctgcaccggctggcccatgacctgaagatggaggccctgctcttccagctgtctgtgttctgcctcttcaaccggctgctgagtgaccctgctgctggggcctacaaggagctggtgacctttgccaagtacatcctgggcaagttctttgccctggccgctgtgaaccagaaggcctttgtggagctgctcttctggaagaacacagctgtggtgcgggagatgacagagggctacggcagcctggatgacaggagcagcagccggcgggcccccacctggagccctgaggaggaggcccacctgcgggagctgtacctggccaacaaggatgtggagggccaggatgtggtggaggccatcctggcccacctgaacacagtgcccaggaccaggaagcagatcatccaccacctggtgcagatgggcctggccgacagcgtgaaggacttccagaggaagggcacccacatcgtgctgtggacaggagaccaggagctggagctgcagaggctgtttgaggagttccgggacagtgatgatgtgctgggccacatcatgaagaacatcacagccaagaggagccgggcccgcatcgtggacaagctgctggccctgggcctggtggccgagcggcgggagctgtacaagaagaggcagaagaagctggccagcagcatcctgcccaatggagctgagagcctgaaggacttctgccaggaggacctggaggaggaggagaacctgcctgaagaagattctgaggaggaggaggagggcggcagcgaggccgagcaggtgcagggcagcctggtgctgagcaatgaaaacctgggccagagcctgcaccaggagggcttcagcatccccctgctgtggctgcagaactgcctgatccgggctgctgatgaccgggaggaggatggctgcagccaggccgtgcccctggtgcccctgacagaagaaaatgaggaggccatggagaatgagcagttccagcagctgctgaggaagctgggcgtgcggcccccagccagcggccaggagaccttctggaggatcccagccaagctgagccccacccagctgcggcgggccgccgccagcctgagccagcctgaggaggagcagaagctgcagcctgagctgcagcccaaggtgcctggagagcagggcagtgatgaggagcactgcaaggagcaccgggcccaggccctgcgggccctgctgctggcccacaagaagaaggccggcctggccagccctgaggaggaggatgctgtgggcaaggagcccctgaaggccgcccccaagaagaggcagctgctggacagtgatgaggagcaggaggaggatgagggcaggaacagagcccctgagctgggcgcccctggcatccagaagaagaagcgctaccagattgaagatgatgaagatgactag

SEQ ID NO: 334970 - DNA, 3624 bp, Artificial Sequence
  derived and/or modified sequence
atggacctgcacatgatgaactgcgagctgctggccacctgcagcgccctgggatacctggagggcgatacgtaccacaaagagcccgactgtttagaatccgttaaggacctgatcagatacctcaggcacgaggacgagacacgggatgtgcgccagcagctgggtgctgctcagatcctccagtccgatctactaccaatccttacccagcaccatcaggacaaacccctgttcgacgccgtgattcggttgatggtgaacctgacgcagccagcattactttgttttggcaacttgcctaaagaaccatcatttaggcaccacttcctgcaggtgctgacttatctgcaggcatacaaggaagccttcgccagcgagaaagctttcggggtcttatcagaaacactttacgagctgctgcagctgggctgggaagaacgccaggaggaggataatctcctgattgaacgcatcctgctactcgtccggaatatcttacatgtccctgccgatctcgatcaggagaaaatcgacgacgacgctagtgcccatgaccagttactgtgggcaatacaccttagcggcctggatgaccttctgctcttcttagctagcagcagcgctgaagaacagtggagcctgcacgtgctggaaattgtgtccctgatgtttagagaccagaatcccgaacagctagcaggggtcggacagggtagactggcacaggagcggtctgcagactttgctgagctcgaagtccttcggcaacgagagatggctgagaaaaagaccagggcactccagaggggaaaccgacactctaggttcggaggaagctacatagtgcagggactgaaatctatcggagaacgggatctcatatttcataagggactccacaacctaaggaactattcatccgatctgggtaaacagcccaaaaaagtccccaaacgtaggcaggccgcaagagagttgagcattcagcgcagaagtgctctgaatgttaggctctttctcagggacttttgctctgagtttctagagaattgttacaaccggttaatggggagtgttaaggatcacctacttcgggaaaaagcccagcagcatgacgaaacatattacatgtgggcactcgccttctttatggcattcaatcgggccgcatccttcaggcccggcttggtctcagagacgctctctgtgcgtacgttccactttatcgagcagaacctgacaaattattatgaaatgatgctcaccgacagaaaggaagcggccagctgggcgcgtagaatgcatctggcactcaaggcttatcaggagctgctggctactgttaatgagatggacattagcccggacgaggctgtgagggagtcatctagaattattaaaaataacatcttttacgttatggaatatagggaactgtttcttgccctttttaggaaattcgatgagagatgtcagcccaggagttttcttcgggacttggttgagactacacacttattccttaaaatgctggaacgattttgtcggtcacgtggaaacctcgtggttcagaacaaacagaagaagcgccggaaaaagaagaagaaagttctcgaccaggccatagtgtcggggaatgtaccatctagccccgaggaagtcgaggctgtgtggcctgcccttgcagaacagctgcagtgctgcgcccaaaactccgagctatccatggacagcgtagtccctttcgatgctgcttctgaggtgcctgttgaggagcagcgagccgaagccatggttcggatccaggattgcctcctcgcgggacaggctccacaggctcttacactgctgcggtcagcccgcgaggtgtggcccgagggcgacgtattcggcagtcaggatatctcacctgaggaggagattcagctcctcaagcagatactgagtgcacctctgcctaggcagcagggtccagaggagcgcggagccgaagaagaggaagaggaagaggaggaggaggaggaggagttgcaagtcgttcaggtctccgaaaaggaattcaactttttggattacttgaaacgcttcgcctgctcaaccgtcgtgcgtgcatatgttcttctcctgcggagttatcagcagaactccgcccataccaaccattgtattgttaaaatgctacacagacttgcacacgatctgaagatggaggcgctccttttccagctgtctgtcttttgtctgttcaataggctcctgagcgatccagcagcaggagcatacaaggaactggtaacgttcgctaaatacatcctcggcaaattcttcgctctggcggccgtgaatcaaaaagccttcgtggagctgctgttttggaaaaatactgcagtcgttagggaaatgacagagggatacggctctctggacgacagatccagcagtaggcgcgcccctacgtggagccctgaagaagaagcacacctcagagaactctatctggccaacaaggatgttgagggccaggatgtggtggaggctatccttgcccatttgaacaccgtgccacggacaaggaaacaaattattcaccatctggtgcagatgggcttggccgattccgttaaagacttccagcgcaaaggaactcacatcgtactgtggaccggcgaccaagagctggagctgcagcgactcttcgaagagtttagagatagtgacgacgtgctcggtcacatcatgaagaacattactgccaagagatctagggcccgcattgttgacaaacttttggctctcggcctggtggcggagaggcgcgagctctataaaaaacggcagaagaaactcgcctcatcaattctgcccaatggggcagagtcattaaaagacttttgccaggaggatttggaggaggaagagaatttgcccgaggaagattcagaggaagaggaggagggggggtcagaggcagagcaggtgcaggggtcactggtgctcagcaatgagaacctcggccagagcttgcaccaggaaggcttttccatcccactgttatggctccagaattgtctgatccgtgcggccgatgatcgagaagaggacggttgttcacaggctgtccctttggtgcccctgacagaagagaacgaagaggctatggagaacgaacagttccaacagctactccgcaaattaggcgtacgtccacccgcttcagggcaggaaaccttttggaggattccagcgaagctcagcccaactcagctgcgaagagctgctgcctctttgtctcagcctgaagaagagcagaagttacagcctgagctgcaacccaaggtgcctggcgagcagggatccgatgaggaacattgtaaagagcacagggcccaggctctgcgagctttattgctggcacataagaaaaaggcaggtctcgcctctcccgaggaggaagatgctgttggaaaagagcctttaaaagcagcacccaagaaaagacaactactggactccgacgaggagcaggaagaggacgagggtcggaaccgcgctcccgagcttggagccccaggtattcaaaagaagaagcgctatcaaattgaggacgatgaagacgactag

SEQ ID NO: 334971 - DNA, 3624 bp, Artificial Sequence
  derived and/or modified sequence
atggacctacacatgatgaactgcgagctgcttgccacatgcagcgcccttgggtatcttgagggagacacttaccacaaggagccagattgtctcgagtccgtgaaggacctgattcgatacttgcgccacgaggatgaaacccgggatgtgcgccagcagcttggcgctgcacagattctgcagtcagacctgctgccaatcctgactcagcaccaccaggataagcctctgtttgacgctgtgattcgactgatggtgaacctcactcaacccgctctactctgcttcgggaacttacccaaagagccaagctttcggcaccactttttgcaagtcctgacctacctgcaggcatataaggaagcattcgcctcagagaaggccttcggggtgcttagtgaaaccctgtacgagcttctacagctgggttgggaagagcggcaggaagaggacaacctgttgatcgagcggatcctgctgcttgtaaggaatatactgcatgttccagctgatctggatcaggagaagattgatgatgatgcaagtgcccacgaccagctgctctgggccatccatctgagcggtttggatgatctcttgttattcctggcaagcagcagcgcagaagagcagtggtccttacacgtgttagaaatagtttccttgatgtttagggatcagaatcccgaacaacttgcaggggtgggacagggccgactggcccaggaacgcagcgcagacttcgccgagctggaagttctgcggcaaagggagatggccgagaagaagacgcgagcacttcagcgaggtaataggcatagcagattcggagggtcctacattgtgcagggcctcaagtctatcggtgagagagacctgattttccataaaggactgcacaatctgcggaactattcttccgatctcgggaagcagcctaaaaaagtccccaaacgtcgacaggcggcacgcgaactgtctattcagagacgctcggcgctgaacgtgcgtctcttccttagggatttctgctctgagtttctggaaaattgctacaacaggctgatgggcagcgtgaaagatcatctactcagggaaaaggctcagcagcacgacgaaacgtattatatgtgggcattggccttcttcatggcgttcaatagagccgcatctttccgcccaggattagttagcgaaaccctgagcgtgcgaacttttcattttatcgagcagaatcttacaaattattacgaaatgatgttgacggacagaaaggaagccgctagttgggctcgcagaatgcatctagctctgaaggcgtaccaagagctgctcgcaacggtgaacgaaatggatattagtccagacgaagcagttcgtgagagttcaaggatcattaagaataatattttttatgtgatggagtaccgagaactattccttgcactgttcagaaagtttgatgagagatgtcaacctcgcagtttccttcgcgatctggtggagaccacccacctgttcctgaaaatgctggagagattctgtcggagccgcggtaatctcgtggtgcagaacaagcaaaaaaagcgtcgcaagaaaaagaaaaaggtacttgaccaggcgattgtttcgggaaatgtgccatccagccccgaggaggtggaagccgtgtggcctgccctggctgaacagctgcagtgctgtgcgcagaatagcgagctctcaatggattccgttgttccattcgatgccgcatccgaggttccggttgaagaacagagagcggaggccatggtgagaatccaggactgcctacttgccggacaggcaccccaagccctgacgctgctgcgttctgcccgagaggtttggccagaaggcgatgtctttggttcccaggacattagccccgaggaagagatacagctcctgaaacagatattaagcgcacccctgcctcgacagcagggtccagaagagcgaggcgcagaggaagaggaggaggaagaggaggaagaagaagaagagctccaggtggtacaggtgtcagaaaaagagttcaatttccttgactatctgaagagattcgcttgttctacagtggtgagagcttatgtgctgctcctgaggagctatcagcagaactctgctcacacgaatcactgcatagtaaaaatgctccacagactggctcatgacctcaaaatggaagccctattgtttcagctgtcagttttttgcttgttcaacagactgttgtctgaccctgccgctggggcttataaagaactggtgacattcgctaaatatattctaggaaagttctttgccctggccgcagtaaatcagaaggctttcgtggaactgctgttttggaaaaacaccgctgtggtaagggagatgaccgaaggatacggcagcttggacgatcgcagctcttctcggagggcccctacgtggagcccagaggaggaggcgcatttgcgcgaactgtacctcgcaaataaggacgtcgagggtcaagatgtggtggaggccattctggcccatctgaatacggtgcctcggaccagaaaacagattatccatcatttagtacagatgggattggctgacagtgttaaagattttcagcgtaaaggtacccatatcgtgctgtggaccggagaccaggagctggaattgcaaagactttttgaagagtttcgcgattcagatgacgtgttgggacatattatgaagaatattactgcaaaacgaagcagggctcgtatcgtagataaactgctggctttgggcctagtcgccgaaagacgcgaactgtataaaaaacggcagaaaaagctggcttcttccattctgcctaatggagctgaatctcttaaggatttttgtcaggaggacctagaggaagaggagaatctccccgaagaggatagtgaggaagaggaggagggcggatcggaagctgagcaagtgcagggctccctcgttctgagtaatgaaaacctggggcagtccctacatcaggaagggttcagcattccgctcctgtggttacaaaactgtctgatccgggctgcagatgatagagaggaggacgggtgctctcaggccgtcccattggtaccactgacagaagagaatgaagaagctatggaaaatgaacagttccagcagcttctaaggaaactaggggtccggcctccagcgagcggacaggaaacattctggcgcattccagcgaaattgagccccacgcagctgagacgcgcagcagcttcattaagtcaaccggaagaggaacaaaagcttcaacccgagttgcagcctaaggtgcctggcgaacagggcagcgatgaggagcattgtaaggagcatagggcccaggccttgcgagccttgctgttggcccataagaagaaggcaggacttgcctctcccgaagaggaggatgcagttggcaaagagccattaaaagccgctcctaagaaacggcagttattagattccgacgaggaacaagaagaagatgaaggacggaatcgagccccagaactcggggcaccaggaatccagaagaagaaaagataccaaattgaggacgatgaagatgactag

SEQ ID NO: 334972 - DNA, 4376 bp, Artificial Sequence
  derived and/or modified sequence
gaccggtccagctgagcctggtggcggaaaggctgcggccccgcgccagagggccggtggctcctccgggcttctgaggacccgcagggagcgggcctcatcatttctgtctcctgtttctccacttccttctctgttggttggtccactgatgtatggacttgcacatgatgaactgtgaacttctagccacatgtagtgcccttgggtacttggagggagacacttaccataaggaaccagattgcttagagagcgtgaaggatctgatccgctatttgaggcatgaggatgagacacgagatgtgcggcagcagctgggggcagcccagatcctacagagcgaccttctgcccatcctcacccagcaccaccaggacaagcctctctttgatgctgttatcagactgatggtgaacttgacacaaccagccttgctctgttttggcaatctgcctaaggagcccagctttcggcaccattttttgcaggtgctaacttatttgcaggcctacaaagaggcctttgccagtgagaaggcttttggagtcctcagtgaaaccttgtatgagctgctgcagctgggctgggaggaacggcaggaggaagacaacttgctgattgaacggatcctactgctggtcagaaatattctccatgtcccagctgaccttgatcaggagaagattgatgatgacgccagtgcccatgaccagctcctctgggcgattcacctcagcggcctggatgacctgctcctctttctggccagctcgtctgctgaggagcaatggagcctacatgtgctagagattgtctcccttatgtttcgtgaccagaaccccgagcagctggcgggagtagggcagggacgcttagctcaggagcggagtgcagattttgcagaactggaggtgttgcgccagcgagagatggcagaaaagaagactcgagccctccagcgaggcaacaggcattctcgatttgggggctcctatattgtccaggggttgaaatccattggggagagggacctcatctttcacaaaggccttcacaacctacgaaactacagttcagatttgggaaagcagccgaaaaaggtgcctaaacgtcgccaggccgcccgagagctgtccattcagcgccgttctgccctcaatgtgaggctcttcctcagagacttctgctctgagttcctggagaactgttacaaccggctcatgggatcagtaaaggatcacctgcttcgggagaaagctcagcagcatgatgagacctattatatgtgggccttggctttcttcatggccttcaaccgagctgcctccttccggccaggcctggtttctgagaccctcagtgtccgtaccttccacttcattgagcagaacctcaccaactactatgagatgatgctgactgaccgcaaggaagctgcctcctgggcacgccggatgcacttggctctgaaggcctatcaggagctgctggcaacagtgaatgagatggacatatctccagatgaggctgtgagggagagcagccgcatcatcaagaacaatattttctatgtgatggagtaccgagaactattcctggcactttttcgaaagtttgatgagagatgccagccccgctctttccttcgtgacctggtggagaccacccacctcttcctcaaaatgttggagcgattctgtcggagccgtgggaacctggtggtgcagaacaaacaaaagaagagaaggaagaagaagaagaaggtcctagaccaggccattgtttctggtaatgtcccatctagcccagaagaagtggaggctgtgtggccagccctggctgagcagctacagtgctgtgcccagaattctgagctcagcatggactccgtggttccctttgatgcggcctcagaggtgccagtggaggagcagcgggcagaagctatggtacggatccaagactgtctcctggctggccaggccccacaggccctgactctcctgaggtctgctcgggaggtgtggcctgaaggagatgtgtttggctctcaagacatttctccagaggaagagatccagttgctgaaacaaatcctctctgctccacttccccggcagcagggcccagaggaacgtggggcagaggaagaagaagaggaggaggaggaggaagaggaggagttgcaagtggtccaggtgtcggagaaagaatttaattttctggactacctgaaacgctttgcatgttcaactgtcgttcgagcctatgtgctgctactaaggagctaccagcagaatagtgcccacactaaccattgcattgtgaagatgctgcaccggctggcccatgacctcaaaatggaagccctactttttcagctgtcagtcttctgcctcttcaatcgtctgcttagtgaccctgctgctggagcctacaaagagctagtgacttttgccaaatacatcctgggcaaattttttgcactggctgcagtcaaccaaaaagcctttgtggagctgttgttctggaagaacacagctgtggttcgagagatgactgagggctatggctccctggatgacaggtcttccagtcgcagagcacctacatggagccccgaagaagaggctcatcttcgggagctgtacctcgccaataaggacgtggaagggcaggatgtggtggaagccatcttggcccacctgaatactgttcctcgaacacgcaagcagatcatccaccatctggtacagatgggactggctgacagtgtcaaggacttccaaaggaaaggaacccatattgtactgtggacgggggatcaggagttggagctgcagcggctttttgaggaattccgggactcagatgatgtcctgggtcatatcatgaagaatatcacagccaaacgctcacgggcccgaatagtggataaactcttggctctggggctggtggctgagcggcgggagctgtacaagaaacggcagaaaaagttggcatcctccatcttgccaaatggagcggagtccctgaaagatttttgccaggaagatctggaagaagaggaaaacctgcctgaggaagacagcgaagaggaagaagaagggggctcagaagcagaacaagtccagggtagcttagtcctttcaaatgaaaaccttggtcaaagcctgcatcaggaaggcttttctatcccgctcctatggctccagaactgcctgatccgagcagctgatgatcgggaagaggatggctgctcccaggccgttccattggtgccactcacagaggaaaatgaggaagccatggaaaacgaacagtttcagcagctgttgcgcaagctaggggttcggccccctgcctctgggcaggaaaccttctggcgaattccagccaagctgagtcctacccagctccggagggcagcagcttctttgagtcaaccagaggaggaacagaagctgcagccagagctgcagcctaaagtccctggagagcaaggctctgatgaggagcactgtaaagagcaccgagcacaagccctgagggccctcttgctagcccacaagaagaaagcgggcctggcatccccagaggaggaagacgctgttggtaaagagccgctgaaggcagcacccaagaaacgacaattgctggacagcgacgaggaacaggaagaagatgagggcaggaacagagcaccagagttgggagctccaggaatccaaaagaagaaacgataccagattgaggatgatgaggatgactgaagagctaagaagcctaggggtagagatagacacgtttttagatggtgcattcaagtcagagttggaagggtcatacaggacccagaagctcctcttactggacagagcagtagaatcccaggctctttcacggatttaggctgagaaacttcagcagcagtattggacttctctgctgtcagtctttgtttctcccagtttttatcggtatgccccagcagctctctggagatttagttctcttcttctaggaaccatttcttttggttattggagctccttagcaaataagaggagtgagtgaaatagagaaagcaccccggaccccttttattggtctgttcctttggctttctcttggaggtgggtcgcagcaccagatggggagctttatgacatgacaggcgggagttttgtaccacttttagaagataccagatgcctctgtcctcattttgtttcctatgatcatcctctagataccagatagaggcccattcctgcatttgagatagggttggaatatagtactctagatgatgaatgtgtttgctttgtgtttggtattaaacatgtaagattagaagttctcatctc

SEQ ID NO: 334973 - DNA, 3624 bp, Artificial Sequence
  derived and/or modified sequence
atggacctgcacatgatgaactgcgagctgctggccacctgcagcgccctgggctacctggagggcgacacctaccacaaggagcccgactgcctggagagcgtgaaggacctgatcagatacctgagacacgaggacgagaccagagacgtgagacagcagctgggcgccgcccagatcctgcagagcgacctgctgcccatcctgacccagcaccaccaggacaagcccctgttcgacgccgtgatcagactgatggtgaacctgacccagcccgccctgctgtgcttcggcaacctgcccaaggagcccagcttcagacaccacttcctgcaggtgctgacctacctgcaggcctacaaggaggccttcgccagcgagaaggccttcggcgtgctgagcgagaccctgtacgagctgctgcagctgggctgggaggagagacaggaggaggacaacctgctgatcgagagaatcctgctgctggtgagaaacatcctgcacgtgcccgccgacctggaccaggagaagatcgacgacgacgccagcgcccacgaccagctgctgtgggccatccacctgagcggcctggacgacctgctgctgttcctggccagcagcagcgccgaggagcagtggagcctgcacgtgctggagatcgtgagcctgatgttcagagaccagaaccccgagcagctggccggcgtgggccagggcagactggcccaggagagaagcgccgacttcgccgagctggaggtgctgagacagagagagatggccgagaagaagaccagagccctgcagagaggcaacagacacagcagattcggcggcagctacatcgtgcagggcctgaagagcatcggcgagagagacctgatcttccacaagggcctgcacaacctgagaaactacagcagcgacctgggcaagcagcccaagaaggtgcccaagagaagacaggccgccagagagctgagcatccagagaagaagcgccctgaacgtgagactgttcctgagagacttctgcagcgagttcctggagaactgctacaacagactgatgggcagcgtgaaggaccacctgctgagagagaaggcccagcagcacgacgagacctactacatgtgggccctggccttcttcatggccttcaacagagccgccagcttcagacccggcctggtgagcgagaccctgagcgtgagaaccttccacttcatcgagcagaacctgaccaactactacgagatgatgctgaccgacagaaaggaggccgccagctgggccagaagaatgcacctggccctgaaggcctaccaggagctgctggccaccgtgaacgagatggacatcagccccgacgaggccgtgagagagagcagcagaatcatcaagaacaacatcttctacgtgatggagtacagagagctgttcctggccctgttcagaaagttcgacgagagatgccagcccagaagcttcctgagagacctggtggagaccacccacctgttcctgaagatgctggagagattctgcagaagcagaggcaacctggtggtgcagaacaagcagaagaagagaagaaagaagaagaagaaggtgctggaccaggccatcgtgagcggcaacgtgcccagcagccccgaggaggtggaggccgtgtggcccgccctggccgagcagctgcagtgctgcgcccagaacagcgagctgagcatggacagcgtggtgcccttcgacgccgccagcgaggtgcccgtggaggagcagagagccgaggccatggtgagaatccaggactgcctgctggccggccaggccccccaggccctgaccctgctgagaagcgccagagaggtgtggcccgagggcgacgtgttcggcagccaggacatcagccccgaggaggagatccagctgctgaagcagatcctgagcgcccccctgcccagacagcagggccccgaggagagaggcgccgaggaggaggaggaggaggaggaggaggaggaggaggagctgcaggtggtgcaggtgagcgagaaggagttcaacttcctggactacctgaagagattcgcctgcagcaccgtggtgagagcctacgtgctgctgctgagaagctaccagcagaacagcgcccacaccaaccactgcatcgtgaagatgctgcacagactggcccacgacctgaagatggaggccctgctgttccagctgagcgtgttctgcctgttcaacagactgctgagcgaccccgccgccggcgcctacaaggagctggtgaccttcgccaagtacatcctgggcaagttcttcgccctggccgccgtgaaccagaaggccttcgtggagctgctgttctggaagaacaccgccgtggtgagagagatgaccgagggctacggcagcctggacgacagaagcagcagcagaagagcccccacctggagccccgaggaggaggcccacctgagagagctgtacctggccaacaaggacgtggagggccaggacgtggtggaggccatcctggcccacctgaacaccgtgcccagaaccagaaagcagatcatccaccacctggtgcagatgggcctggccgacagcgtgaaggacttccagagaaagggcacccacatcgtgctgtggaccggcgaccaggagctggagctgcagagactgttcgaggagttcagagacagcgacgacgtgctgggccacatcatgaagaacatcaccgccaagagaagcagagccagaatcgtggacaagctgctggccctgggcctggtggccgagagaagagagctgtacaagaagagacagaagaagctggccagcagcatcctgcccaacggcgccgagagcctgaaggacttctgccaggaggacctggaggaggaggagaacctgcccgaggaggacagcgaggaggaggaggagggcggcagcgaggccgagcaggtgcagggcagcctggtgctgagcaacgagaacctgggccagagcctgcaccaggagggcttcagcatccccctgctgtggctgcagaactgcctgatcagagccgccgacgacagagaggaggacggctgcagccaggccgtgcccctggtgcccctgaccgaggagaacgaggaggccatggagaacgagcagttccagcagctgctgagaaagctgggcgtgagaccccccgccagcggccaggagaccttctggagaatccccgccaagctgagccccacccagctgagaagagccgccgccagcctgagccagcccgaggaggagcagaagctgcagcccgagctgcagcccaaggtgcccggcgagcagggcagcgacgaggagcactgcaaggagcacagagcccaggccctgagagccctgctgctggcccacaagaagaaggccggcctggccagccccgaggaggaggacgccgtgggcaaggagcccctgaaggccgcccccaagaagagacagctgctggacagcgacgaggagcaggaggaggacgagggcagaaacagagcccccgagctgggcgcccccggcatccagaagaagaagagataccagatcgaggacgacgaggacgactag

SEQ ID NO: 334974 - protein, 791 aa, Artificial Sequence
  derived and/or modified sequence
MTSLHTSSESIDLPLSHHGSLSGLTTGTHEVQSLLMRTGSVRSTLSERYTPSSRQANQEEGKEWLRSHSTGGLQDTGNQSPLVSPSAMSSSAAGKYHFSNLVSPTNLSQFNLPGPSMMRSNSIPAQDSSFDLYDDSQLCGSATSLEERPRAISHSGSFRDSMEEVHGSSLSLVSSTSSLYSTAIQKPNIQQIHKLRRELVASQEKVATLTSQLSANAHLVAAFEKSLGNMTGRLQSLTMTAEQKESELIELRETIEMLKAQNSAAQAAIQGALNGPDHPPKDLRIRRQHSSESVSSINSATSHSSIGSGNDADSKKKKKKNWLRSSFKQAFGKKKSTKPPSSHSDIEELTDSSLPASPKLPHNAGDCGSASMKPSQSASAICECTEAEAEIILQLKSELREKELKLTDIRLEALSSAHHLDQIREAMNRMQNEIEILKAENDRLKAETGNTAKPTRPPSESSSSTSSSSSRQSLGLSLNNLNITEAVSSDILLDDAGDATGHKDGRSVKIIVSISKGYGRAKDQKSQAYLIGSIGVSGKTKWDVLDGVIRRLFKEYVFRIDTSTSLGLSSDCIASYCIGDLIRSHNLEVPELLPCGYLVGDNNIITVNLKGVEENSLDSFVFDTLIPKPITQRYFNLLMEHHRIILSGPSGTGKTYLANKLAEYVITKSGRKKTEDAIATFNVDHKSSKELQQYLANLAEQCSADNNGVELPVVIILDNLHHVGSLSDIFNGFLNCKYNKCPYIIGTMNQGVSSSPNLELHHNFRWVLCANHTEPVKGFLGRYLRRKLIEI

SEQ ID NO: 334975 - DNA, 2376 bp, Artificial Sequence
  derived and/or modified sequence
atgacaagtctgcacacttccagtgagtcaatagatcttcctctgtctcaccacggcagcctctccggcttaaccacgggcacacatgaagtgcagagcctcctgatgcggactgggtccgtccggagcactttgtccgagcgatacaccccgtcctcacgccaggcaaaccaagaggaaggcaaagagtggttgaggtctcattctactgggggcctgcaggataccggaaaccagagtcccctggtctcaccatcagcaatgtcaagtagcgctgctggaaaataccacttttcaaaccttgttagtccaacaaatctgtcacagtttaacctgcctggacccagtatgatgagatcaaacagcattcccgcccaggactcctctttcgacctctacgatgattcgcagctctgtggcagcgcgacttctcttgaggagcgcccccgggcaatatctcatagtggttccttccgggactccatggaagaagtgcatggatcctccctgtcactggtgagctcgacttcatctctgtactccacagccatacagaagcctaatattcagcagattcataagctgagacgcgaactggtcgcgagccaggagaaagtggctactcttacaagtcagttaagcgccaacgcacatctcgtggccgcgttcgagaaaagcctgggaaacatgacaggcagacttcagagcctgacaatgacagcagagcagaaagaatctgagctgatcgagctacgagagacaatcgagatgctcaaggcgcagaacagtgcagcacaagccgccatccagggagctcttaacggtcccgaccatccaccgaaagatttgcgtattcggaggcaacactcaagtgagtccgttagcagtattaactcagcaacctcccattcatccattgggagcggcaacgacgcagactcaaagaaaaaaaagaagaagaattggttgcgcagcagcttcaagcaggcctttggtaaaaagaagtcgactaagcccccatcatcccactctgatattgaagagctcacggactcatcactgcccgccagcccaaagcttccacacaatgctggggactgtggctccgcctcgatgaaaccatctcaatctgcatctgctatttgcgaatgtaccgaggcagaagcagagattatactccagttaaagtccgagttgagggaaaaagaactgaagctgactgatattagactggaggcactcagcagcgctcaccacttagaccagatacgcgaggcgatgaaccgaatgcaaaatgagattgagatcctgaaagctgagaacgatcgcctgaaagcggagaccggaaacactgccaagccaacccgcccaccgtctgagagcagcagttcaacaagctcctcctcctcacgacaaagcctagggctcagcctcaacaacctgaacatcacagaggccgtgagtagtgatatcctgctggatgacgccggcgatgcgactgggcacaaggacgggagaagtgtcaagatcatagtatccatcagtaaaggctacggtcgcgccaaagaccaaaagagtcaggcatacctaattgggtcaattggggttagcggcaaaacgaaatgggacgttttggacggggtcattcggcgactatttaaggagtacgtgttccggattgatactagcacctctctgggtctctcttccgactgcatcgccagctactgtattggggacctgatcaggagtcacaatctggaagtcccggagctgctgccttgcgggtatctcgtgggggacaacaatattattacagtgaacctaaaaggggtcgaagaaaattccctagattccttcgtgttcgacacacttattcctaagccgataacccagcgctactttaacctgttgatggagcaccatcgcattatcctgagcggtccatctggcaccggcaaaacctatttagcgaacaaacttgccgaatatgtgattactaaatcaggtcgaaagaaaacagaagatgccatcgccacattcaacgtggaccataaatctagcaaagagctccagcagtacctggccaacttggctgagcagtgctccgccgataacaatggtgtagagctaccagtggtgattatcttagacaacctgcatcacgtaggctctctctccgatattttcaacggatttctgaattgcaagtacaataaatgcccttacataattggaaccatgaaccaaggggtcagttcgagccccaacttagagctgcaccacaacttccggtgggtgctttgcgccaaccacactgagccagttaaggggttccttgggcgctatctgcgccgcaaactgattgaaatttag

SEQ ID NO: 334976 - DNA, 2376 bp, Artificial Sequence
  derived and/or modified sequence
atgaccagcctgcacaccagcagcgagagcattgacctgcccctgagccaccacggcagcctgagcggcctgaccaccggcacccatgaggtgcagagcctgctgatgaggacaggctctgtgcgcagcaccctgtctgagcgctacacccccagcagccggcaggccaaccaggaggagggcaaggagtggctgcggagccacagcactggaggcctgcaggacaccggcaaccagagccccctggtgagccccagcgccatgagcagcagcgctgctgggaagtaccacttcagcaacctggtgagccccaccaacctgagccagttcaacctgcccggccccagcatgatgaggagcaacagcatcccagcccaggacagcagctttgacctgtatgatgacagccagctgtgtggcagcgccaccagcctggaggagcggccccgggccatcagccacagcggcagcttccgggacagcatggaggaggtgcacggcagcagcctgagcctggtgagcagcaccagcagcctgtacagcacagccatccagaagcccaacatccagcagatccacaagctgcggcgggagctggtggccagccaggagaaggtggccaccctgaccagccagctgagcgccaatgcccacctggtggccgcctttgagaagagcctgggcaacatgacaggccgcctgcagagcctgaccatgacagctgagcagaaggagagcgagctgattgagctgcgggagaccatcgagatgctgaaggcccagaacagcgctgcccaggccgccatccagggcgccctgaatggaccagaccacccccccaaggacctgcgcatccggcggcagcacagcagcgagagcgtgagcagcatcaacagcgccaccagccacagcagcatcggcagcggaaatgatgctgacagcaagaagaagaagaagaagaactggctgcggagcagcttcaagcaggccttcggcaagaagaagagcaccaagccacccagcagccacagcgacatcgaggagctgacagacagcagcctgcctgccagccccaagctgccccacaatgctggggactgtggcagcgcctccatgaagcccagccagagcgccagcgccatctgtgaatgtacagaagctgaggccgagatcatcctgcagctgaagtctgagctgcgggagaaggagctgaagctgacagacatccggctggaggccctgagcagcgcccaccacctggaccagatccgggaggccatgaacaggatgcagaatgaaattgagatcctgaaggccgagaatgaccggctgaaggccgagaccggcaacacagccaagcccaccaggcctccttctgagagcagcagcagcaccagcagcagcagcagccggcagagcctgggcctgagcctgaacaacctgaacatcacagaggccgtgtccagtgacatcctgctggatgatgctggagatgccaccggccacaaggatggccgctctgtgaagatcatcgtgtccatcagcaagggctacggccgggccaaggaccagaagagccaggcctacctgattggcagcattggagtgtctgggaagaccaagtgggatgtgctggatggagtcatccggcggctcttcaaggagtatgtgttcagaattgacaccagcaccagcctgggcctgagcagtgactgcatcgccagctactgcatcggggacctgatccgcagccacaacctggaggtgcctgagctgctgccctgtggctacctggtgggggacaacaacatcatcaccgtgaacctgaagggcgtggaggagaacagcctggacagctttgtgtttgacaccctcatccccaagcccatcacccagcgctacttcaacctgctgatggagcaccaccgcatcatcctgagcggccccagcggcaccgggaagacctacctggccaacaagctggccgagtatgtgatcaccaagagcggcaggaagaagacagaagatgccatcgccaccttcaacgtggaccacaagagcagcaaggagctgcagcagtacctggccaacctggccgagcagtgcagcgctgacaacaatggagtggagctgcctgtggtgatcatcctggacaacctgcaccacgtgggcagcctgagtgacatcttcaacggcttcctgaactgcaagtacaacaagtgcccctacatcatcggcaccatgaaccagggcgtgagcagcagccccaacctggagctgcaccacaacttccgctgggtgctgtgtgccaaccacacagagcctgtgaagggcttcctgggccgctacctgcggaggaagctgattgagatctag

SEQ ID NO: 334977 - DNA, 2376 bp, Artificial Sequence
  derived and/or modified sequence
atgaccagcctgcacaccagcagcgagagcatcgacctgcccctgagtcatcatggttccctttccgggctcacaacaggcactcatgaggtgcaatctcttttaatgagaacaggcagtgtcaggtccaccctctcggaacgctacactccatcttcccggcaggctaatcaggaggagggtaaggagtggctgcggagccattccaccggaggactgcaggacacagggaaccaatccccactggtgtctccaagtgctatgtcatcttcagcggccggaaaataccatttttctaatcttgttagccccacaaacctaagccaattcaatctacccgggccatcaatgatgagaagcaattccatacccgcccaggactctagcttcgacctatatgatgattcccagctctgcggcagtgccacaagcctcgaggaaagacccagagctatttctcatagtggttctttcagagactcaatggaagaggtccatggctccagtctcagcctggtaagttccacttcctctctatactctaccgccatccagaaacctaatatacaacagattcataaattgcgcagagaattggtggctagccaggagaaggtagcaacactgactagtcaactgagtgctaacgcccatctcgtggccgctttcgagaaaagcttaggtaacatgacgggacgtctccagtccttgactatgactgccgaacagaaagaatccgagctaatcgaactacgagagacgattgagatgctcaaggcacagaattcggcagcacaggcagccatccagggggccctgaacgggcctgaccaccccccgaaagatctacgcattcggagacagcattcaagcgaatcggtcagtagtattaattccgctacttcacatagctccatagggtctgggaatgacgccgactctaaaaagaaaaagaagaagaactggctaaggtctagtttcaaacaggccttcgggaaaaaaaaaagcaccaagcctcctagttcccacagcgatatcgaagagctaactgattcctcactgccggccagcccaaaacttcctcacaatgcgggcgattgcggtagcgcatctatgaaacctagccagagtgcgagcgctatctgcgagtgtaccgaagcggaagccgagattatactccaactgaagtccgaactgagagaaaaagagctgaaacttaccgatattaggctcgaggcactgtccagcgctcaccatctggatcagatccgggaagccatgaataggatgcagaatgagattgaaatcctcaaggctgagaatgacagactgaaagccgaaacaggaaatacagcgaaacctacacggccaccgtccgaaagttcgagttcaacgtcatctagcagcagtagacaatctcttggccttagtttgaacaatctgaatattaccgaggctgtcagtagcgatatcctcctggacgatgctggagacgctaccggccataaagacggccgctcagtcaagattatcgtcagcatcagtaaggggtacggccgcgcaaaggatcagaagtcccaagcctacttaataggttctattggcgtgagtggcaaaaccaaatgggacgtgttggacggcgtgattaggagactgttcaaggagtacgtgttcaggattgacactagtacctctctgggcctaagcagtgattgtatcgcatcttactgcattggggatttgatcagaagccacaacttagaggtgcctgaactcttaccgtgcggatatctggtcggcgacaataatatcatcaccgttaatctcaaaggtgtcgaagaaaactctctcgattccttcgtgtttgacactctgattccgaagcccatcacacagcgctatttcaacctgctgatggaacatcatagaatcattctctcagggccaagcggcacggggaaaacataccttgccaataagctcgctgagtacgtgataaccaaaagtggacgcaaaaagaccgaagacgccattgccacattcaacgtcgaccacaagagctccaaagagcttcagcagtatctggcaaatctcgcagaacagtgctcagctgataacaatggcgtcgagctccctgtggtgattattctggacaacctgcatcatgttggttctctgagcgacatcttcaatggcttcttaaattgcaagtataataagtgcccgtacataattgggacaatgaaccagggggtgagctcctctccaaacctagagctgcaccataatttccggtgggttctgtgcgctaatcataccgaaccagtcaagggattcctcggtcggtatctacggaggaagctgattgagatctag

SEQ ID NO: 334978 - DNA, 9695 bp, Artificial Sequence
  derived and/or modified sequence
agatgcagggaagttttgcctcttcctgaaaattatattattagctttttaaaaatcaggatgactgctagttttgtttaaagtatttgttctggaaatactaaagttggagtctaccagactgaggttagaagcattttctttggcagcaagaagataattttatagaagccatgcctgttcttggggttgcctcaaaactgaggcagccagctgttgggtcaaagcctgtgcatactgctcttccgataccaaatcttggcactactgggtcacagcactgttcttcaagacctttggaacttactgaaacagagagctccatgctttcttgtcagcttgcgttaaaatcaacctgtgaatttggagagaagaaacccctccaaggaaaagccaaggagaaagaagacagcaagatttacactgactgggccaaccactacctagcaaaatcaggccacaagcggctgatcaaggacttgcaacaagacattgcagatggagtactcctagcagaaatcatccagattattgcaaatgaaaaagttgaagatatcaatggatgtcctagaagtcagtctcagatgattgaaaatgttgatgtctgccttagttttctagcagccagaggggtaaatgttcaaggtctatctgctgaagaaataagaaatggaaacttaaaagccattctagggctgtttttcagtttatctcgctacaagcagcaacaacaccatcaacaacagtactatcagtccttggtggaacttcagcagcgagttactcacgcttcccctccatcggaagccagccaggccaaaacccagcaagatatgcagtccagtctggcagccagatatgcaactcagtctaatcacagtggaattgcaaccagtcaaaaaaagcctactaggcttccagggccctctagggtgcctgctgcaggaagcagcagcaaggtccagggagcctctaatttaaataggagaagtcagagctttaacagcattgacaaaaacaagcctccaaattatgcaaatggaaacgaaaaagattcctccaaaggacctcaatcgtcttcaggtgtaaatggtaacgtgcagcctcccagtactgctgggcagcctcctgcctctgccatcccttctccaagtgccagcaagccctggcgcagcaagtccatgaatgtcaaacacagtgccacctccaccatgttgactgtaaagcagtcaagtacagccacctcccccacaccatcttcagacagactgaagccacctgtctcagaaggggtcaaaactgctccctcaggacagaaatccatgcttgagaaattcaagctagtcaatgcccggactgctttacgccccccgcagcctcccagttcaggacctagtgatggtgggaaggatgatgatgccttttctgaatctggtgaaatggaaggttttaacagtggtctgaatagtggtggctcaacaaatagcagtcccaaagtgtcacctaagttggcccctccaaaagctggaagcaaaaatctcagcaataaaaagtctttgctacagccaaaggaaaaagaagaaaagaacagggacaaaaataaagtttgcactgaaaaaccagtcaaagaagagaaggatcaggtgacagagatggctccaaaaaagacctccaaaattgcaagcttgatccctaagggcagcaagacaacagcagctaagaaggaaagcttaattccgtcttccagtggtattccaaaaccaggctctaaagttccaacagtaaagcaaaccatttcacctggcagcacagcaagcaaagagtctgagaaattcaggactaccaaggggagcccttcccagtccttatctaagcctataaccatggagaaagcaagtgcttctagttgtcctgcccctttggaaggaagggaagctggccaagcttctccttctggttcctgtaccatgacagtggcacaaagcagtgggcagagcacaggaaatggtgctgtccaactccctcaacagcagcaacatagccacccgaataccgcgacagtggcaccattcatttacagggcacattcagaaaatgaaggtaccgctttaccatcggctgactcctgtaccagtcctacaaagatggacttatcatatagtaagactgctaagcagtgcctggaggagatatctggtgaagaccctgaaacaagaagaatgagaacagttaaaaacatagcagacttgaggcagaatttagaagagactatgtccagtcttcgtgggactcagataagccacagcaccctggagacaacatttgacagcactgtgacaacagaagttaatggaaggaccatacccaacttgacaagtcgacccacccccatgacctggaggttgggccaggcatgtccgcgacttcaggcgggagatgctccctccctgggtgctggctatcctcgcagtggtaccagtcgattcatccacacagacccctcgaggttcatgtataccacgcctctccgtcgagctgctgtctctaggctgggaaacatgtcacagattgacatgagtgagaaagcaagcagtgacctggacatgtcttctgaggtcgatgtgggtggatatatgagtgatggtgatatccttgggaaaagtctcaggactgatgacatcaacagtgggtacatgacagatggaggacttaacctatatactagaagtctgaaccgaataccagacacagcaacttcccgggacatcatccagagaggggttcacgatgtgacagtggatgcagacagctgggatgacagcagttcagtgagcagtggtctcagtgacacccttgataacatcagcactgatgacctgaacaccacatcctctgtcagctcttactccaacatcaccgtcccctctaggaagaatactcagctgaggacagattcagagaaacgctccaccacagacgagacctgggatagtcctgaggaactgaaaaaaccagaagaagattttgacagccatggggatgctggtggcaagtggaagactgtgtcctctggacttcctgaagaccccgagaaggcagggcagaaagcttccctgtctgtttcacagacaggttcctggagaagaggcatgtctgcccaaggaggggcgccatctaggcagaaagctggaacaagtgcactcaaaacacccgggaaaaccgatgatgccaaagcttctgagaaaggaaaagctcccctaaaaggatcatctctacaaagatctccttcagatgcaggaaaaagcagtggagatgaagggaaaaagcccccctcaggcattggaagatcgactgccaccagctcctttggctttaagaaaccaagtggagtagggtcatctgccatgatcaccagcagtggagcaaccataacaagtggctctgcaacactgggtaaaattccaaaatctgctgccattggcgggaagtcaaatgcagggagaaaaaccagtttggacggttcacagaatcaggatgatgttgtgctgcatgttagctcaaagactaccctacaatatcgcagcttgccccgcccttcaaaatccagcaccagtggcattcctggccgaggaggccacagatccagtaccagcagtattgattccaacgtcagcagcaagtctgctggggccaccacctcgaaactgagagaaccaactaaaattgggtcagggcgctcgagtcctgtcaccgtcaaccaaacagacaaggaaaaggaaaaagtagcagtctcagattcagaaagtgtttctttgtcaggttcccccaaatccagccccacctctgccagcgcctgtggtgcacaaggtctcaggcagccaggatccaagtatccagatattgcctcacccacatttcgaaggttgtttggtgccaaggcaggtggcaaatctgcctctgcacctaatactgagggtgtgaaatcttcctcagtaatgcccagccctagtaccacattagcgcggcaaggcagtctggagtcaccgtcgtccggtacgggcagcatgggcagtgctggtgggctaagcggcagcagcagccctctcttcaataaaccctcagacttaactacagatgttataagcttaagtcactcgttggcctccagcccagcatcggttcactctttcacatcaggtggtctcgtgtgggctgccaatatgagcagttcctctgcaggcagcaaggatactccgagctaccagtccatgactagcctccacacgagctctgagtccattgacctccccctcagccatcatggctccttgtctggactgaccacaggcactcacgaggtccagagcctgctcatgagaacgggtagtgtgagatctactctctcagaaagatataccccatcatctcggcaggccaaccaagaagagggcaaagagtggttgcgttctcattctactggagggcttcaggacactggcaaccagtcacctctggtttccccttctgccatgtcatcttctgcagctggaaaataccacttttctaacttggtgagcccaacaaatttgtctcagtttaaccttcccgggcccagcatgatgcgctcaaacagcatcccagcccaagactcttccttcgatctctatgatgactcccagctttgtgggagtgccacttctctggaggaaagacctcgtgccatcagtcattcgggctcattcagagacagcatggaagaagttcatggctcttcattatcactggtgtccagcacttcttctctttactctacagcaattcaaaaaccaaacattcagcaaatccataaactgcggagagagctggttgcatcacaagaaaaagttgctaccctcacatctcagctttcagcaaatgctcaccttgtagcagcttttgaaaagagcttagggaatatgactggccgattgcaaagtctaactatgacagcggaacaaaaggaatctgaacttatagaactaagagaaaccattgaaatgctgaaggctcagaattctgctgcccaggcggctattcagggagcactgaatggtccagaccatcctcccaaagatcttcgcatcagaagacagcattcctctgaaagtgtttctagtatcaacagtgccacaagccattccagtattggcagtggtaatgatgccgactccaagaagaagaaaaagaaaaactggctgagaagttctttcaaacaagcctttgggaagaaaaagtccaccaagcctccttcatcacattctgacattgaagagcttactgattcatcccttccggcatcccccaagttaccccataatgctggtgactgtggctcagcatccatgaagccctcacaatctgcttcagcgatctgtgaatgcacagaagctgaggcagagataattctgcagctgaagagcgagctcagagaaaaggaattaaaattaacggatattcggctggaggccctcagctctgctcatcatcttgatcagatccgggaagccatgaaccggatgcagaatgaaattgaaatactgaaagctgaaaatgaccggttgaaggcagaaactggtaacacagctaagcctactcggccaccgtcagaatcctcaagcagcacctcctcttcatcttccaggcagtcattaggactttctctaaacaatttgaacatcacagaggctgttagctcagatattttgctagatgatgctggtgatgcaactggacataaagatggccgcagtgtgaaaattatagtctccataagcaagggctatggtcgagcaaaggaccaaaaatctcaggcatatttgataggatccattggtgttagtggaaaaaccaagtgggatgtcttagatggtgtaataagacgtctctttaaggaatatgtattccgaattgatacatccactagccttggtctgagctctgactgcattgctagctactgtataggagacttaattagatcccataacctagaagtgcctgaattgctgccttgtggataccttgttggagataataacatcatcactgtgaacctcaaaggggtagaagaaaatagtttggacagttttgtttttgatacgctgattcctaaaccaattacccaaaggtactttaacttgttgatggagcatcacagaattatactctcaggaccgagtggtactggaaagacctatttggcaaacaaacttgctgaatatgtaataaccaaatctggaaggaaaaaaacagaggatgcaattgccacttttaatgtggaccacaagtcaagtaaggaattgcaacaatatctagctaacctggctgaacagtgcagtgctgataataatggagtggagctcccagttgtaataattcttgataatcttcatcatgtgggctctctgagtgatatcttcaatggttttctcaattgtaaatacaacaaatgtccatatattattggaacaatgaatcagggagtttcttcatcaccaaatctagagctgcatcacaatttcaggtgggtattatgtgcaaatcatacagaaccagtgaaaggctttttaggcagatatcttcgaagaaaactcatagagatagaaattgaaaggaacattcgcaataatgacctagtcaaaattatagattggattccgaagacgtggcatcatctcaacagttttttggaaacacacagttcttctgacgttaccattggtccccgactattccttccttgccccatggatgtagaaggttctagagtatggttcatggatctctggaactattctttagtaccttatattctggaggcagtgagagagggtcttcagatgtatgggaaacgcacaccatgggaagatccttcaaagtgggtgcttgacacatatccatggagctcagcaactctgcctcaggagagcccagccttacttcagctgcgaccagaagatgttgggtatgaaagctgcacatccactaaggaagccacaacctcaaagcacattccgcaaactgacacagaaggagatcccctgatgaatatgctaatgaaactccaagaagcagccaattactcgagcacacaaagctgcgacagcgaaagcaccagccaccatgaagacattttggattcatctcttgaatctaccctctagagggtgaaaaaagttaagggaaaagactttgcttttaaaaaaatgtttcaaaagaaaggtattttcactaaaccactgccagtataaaagcaccctgtcaagggccctgacccagagttgtggtctccaaggaggcagcagaactaagtctgaaccgccaagatgctaaattgcaatggaagcttaactttagtttatttctaagcattttttatatctgtggagtaatagaaagctccattactcaactggaaaggaccctaatgacagggcaactgaacagattgcacatgggatagccaaactggactttctttgtttcctctttaaaagtttacaatgcagaccattttttgtcccttccttttgtttcctctgaggggctgttcgccccaggcagggtccatctttctgatctgtccaacctcctttgtgccacacggtgctggtcacagggcttcagtagtgtttgtgttgtgcgctcaccccattccagaacaaatccaagaggccagtcctccataagcacaaatggaattgtgcaaccaccagaaaaacactactgtggcaaactggagaagtgccaatttaattctaactgccacgttctcatgatgtgctccaccaactttttagtatatgagtcactggttttataaggttgtttttaccacagtggtctttttaaaccacctgcccactcccttaacaagagttttataccaattattagtcaacactgataaaaggcttttttagggctttatttgtttgagccttttcagtgaaagaaggaacatttcctatggtgctgtctcactgccttaaaacagatttctatgacagtttaacagttggtttaaatcctaaaccattggtaatttccactgtcttttcatttacaaccaagcaacaccagttaacatagtagcctcatctctatatatctttctcttttttttttttttgaagaaatggataggagaaagatcagtatttttagccttgtgaatagatcgctttgcctatcctccaaaatattaaaataacccagaaatgctctttgaccgtcacttaaaacctaagacatgtggcgaaattccatccagttctaagtgaaagagtttcagaaggcagaagattttgaattattatccagcagggctggaagcactagatgcagcatgagcacaactattcggctttccttccctattgtttttgtttttttaatgagttttgacgcatgttgttttgattgctattgttgtacatgagaaattcagcattaaagaacactgaagcggtaaggtcactgtggaagaggaagcgtttatactgtaaaagaaggttagatttgcacagtctactgggtaggtattgtaaataataatttttaaaacttgcacaaatcaaaacaaacacaaacaaaattgtattttatcctgttggtgttaagaggtgtttcacttgctgagatttcctgtacattgcaaacaaatacagaatgcaaaccctcaaagctgtattatctggtgtgtttgtcctgtatttacagttgtttttgactatgcaggagctatcagtgctagagtgagcatgcttcaaaactgtacatgaagccaatatatttttggataagtaaaactgtctgaaagtacatctgtcatggcaggctttaaagagagtgcatgaaaactgatcagtcattggagaagttaccaccacacacaaaggacaggttttaagtttatgaaacccaagggctaggccatggtatagacttcttctatgagtgtgtgaaaatgtgttacttttaggacgtgtatttggtgctactctctgtgaccaccaatgggtcagttgctatagaacaacaacaccacgaaacatctgtgcagttttcagagtgtcacaaagtcaataggtccttacacggtgctattgccctaagggaaatccgaactgaatttatgcacatagaattgtcaccctgactttgaagcctcaaacatggatcaaatctgttgtgaaacatcaatatatgtagctggatgagtgactagtttcccttgtataatatgtgatctaagaaaattgctaatctttccctgccattttgagaaacacagtccaaacatgagcataaacagaatttcctgcaatacatcccagtaggtccacctagtttacaacttaaactagtttgtgaaacatttgtctgtatacattttatattttgtacattttgatgtaacatatcatgtaaataggcagaaacagtgaaataaatcatctgaaaagttttgtagtctttgtaaagccccaacaataagtacttggtgtcaatggacttaactggatgatgtattttctattggtttattgttcctctagcttgtaaaccagcttgcatatatttttttgcaaatgtgcaccctgtatctgtctaaattattactttgccattaaagtggaattatttattgacaa

SEQ ID NO: 334979 - DNA, 2376 bp, Artificial Sequence
  derived and/or modified sequence
atgactagcctgcacacaagttctgagtccatcgatctgcccctcagccatcatgggtccctgagtgggctgaccacaggaactcacgaagtccagtcactcctgatgcggacaggttctgttcggtctactctttccgagcgctatacccccagcagcaggcaggcgaatcaggaagagggaaaagaatggctgcggtctcactccacaggagggctccaagacactggtaaccaaagtcctctagtgagcccatccgccatgagcagctccgctgccggtaaataccacttttctaacctggtgtccccaaccaacttgtcacagtttaatctgcccggaccttcgatgatgagatccaattccattcctgcacaggatagctcctttgatctttacgacgacagtcagctctgcggttcagcaacctctctggaagagagacctcgggcaatcagccactcagggagctttagggattccatggaagaagttcacgggtcgagtctctctctggtttcgagcacttcaagcctgtatagtactgccattcagaagcctaatatccagcagattcacaagctgagaagagagctggttgcatcacaggagaaagtggctaccttgacctcgcagctgagtgcgaatgcacacctggtagccgcattcgagaagagtttggggaatatgactggaaggttacaatccttgaccatgaccgctgagcaaaaggagagcgagctgattgaattgagagagaccatcgaaatgttgaaagcgcaaaatagcgcagcgcaagcagcaatccagggcgcacttaatgggccagaccacccgccaaaggacttgcgaatacgcagacagcacagcagtgagagcgtatcctccattaactctgctacttctcatagctctatcggctcaggcaatgatgctgatagtaagaagaagaagaaaaagaattggttaagatcgtcctttaaacaggcctttgggaagaaaaagtctacaaaacccccatctagccactccgatatagaagagctgaccgattcctctctgcccgcttcccctaagctgccccataatgcaggggattgcggcagcgcctcaatgaagccaagccagagcgcctcagccatctgcgaatgtacggaagctgaggctgagatcatactccagttaaagtccgagctgagagaaaaggaactgaagttaaccgatataaggcttgaggcactatccagcgcacaccatctggatcagattagggaggcaatgaacagaatgcagaacgagattgaaatactgaaagccgaaaatgaccggttgaaagccgagacaggcaataccgctaaacccaccagacccccatcggaatcaagctcgtccacgtccagcagcagctctaggcaatcacttggcctttcattgaataacttaaatattacagaagcagtgtcgagcgacattctactggatgacgcaggagacgccacgggccacaaggacggcaggtctgtaaagatcattgtctccattagcaaaggctatggacgcgctaaagatcaaaagtcccaggcatatttgattgggtctatcggggtttcaggtaagaccaagtgggatgtactcgacggcgtgattcgacgcctcttcaaggagtacgtctttcgaatcgacaccagcacgtccctgggcttatcttcagactgcatcgcaagttattgcattggggacctgatcaggagccacaatctcgaggtgccggaactcttaccttgcggttacctggtgggtgacaacaatatcataaccgtaaatttaaaaggggttgaggagaacagtcttgatagctttgtgtttgatacactgatccccaagccaattacgcaaaggtacttcaatctgctgatggaacaccaccgcataatattatccggcccaagtggcacggggaagacctacttagcaaacaaactggcagagtacgttataactaagtccggcagaaagaagacggaggacgccatcgcaactttcaacgtcgatcacaaaagcagcaaagaactgcagcagtatctagcaaatttggctgagcagtgttcggccgacaataacggcgtggagttgcccgtggttatcatactggacaaccttcatcacgtggggtctttatcagatatcttcaatggcttcctgaactgtaagtataataagtgtccatatatcattggtacgatgaatcaaggggtttcttcctcgccaaaccttgagttgcatcacaacttcaggtgggtgctgtgtgccaaccatactgaacccgtgaagggctttctcggcagatacttaagaaggaaactcatcgagatctag

SEQ ID NO: 334980 - DNA, 2376 bp, Artificial Sequence
  derived and/or modified sequence
atgaccagcctgcacaccagcagcgagagcatcgacctgcccctgagccaccacggcagcctgagcggcctgaccaccggcacccacgaggtgcagagcctgctgatgagaaccggcagcgtgagaagcaccctgagcgagagatacacccccagcagcagacaggccaaccaggaggagggcaaggagtggctgagaagccacagcaccggcggcctgcaggacaccggcaaccagagccccctggtgagccccagcgccatgagcagcagcgccgccggcaagtaccacttcagcaacctggtgagccccaccaacctgagccagttcaacctgcccggccccagcatgatgagaagcaacagcatccccgcccaggacagcagcttcgacctgtacgacgacagccagctgtgcggcagcgccaccagcctggaggagagacccagagccatcagccacagcggcagcttcagagacagcatggaggaggtgcacggcagcagcctgagcctggtgagcagcaccagcagcctgtacagcaccgccatccagaagcccaacatccagcagatccacaagctgagaagagagctggtggccagccaggagaaggtggccaccctgaccagccagctgagcgccaacgcccacctggtggccgccttcgagaagagcctgggcaacatgaccggcagactgcagagcctgaccatgaccgccgagcagaaggagagcgagctgatcgagctgagagagaccatcgagatgctgaaggcccagaacagcgccgcccaggccgccatccagggcgccctgaacggccccgaccacccccccaaggacctgagaatcagaagacagcacagcagcgagagcgtgagcagcatcaacagcgccaccagccacagcagcatcggcagcggcaacgacgccgacagcaagaagaagaagaagaagaactggctgagaagcagcttcaagcaggccttcggcaagaagaagagcaccaagccccccagcagccacagcgacatcgaggagctgaccgacagcagcctgcccgccagccccaagctgccccacaacgccggcgactgcggcagcgccagcatgaagcccagccagagcgccagcgccatctgcgagtgcaccgaggccgaggccgagatcatcctgcagctgaagagcgagctgagagagaaggagctgaagctgaccgacatcagactggaggccctgagcagcgcccaccacctggaccagatcagagaggccatgaacagaatgcagaacgagatcgagatcctgaaggccgagaacgacagactgaaggccgagaccggcaacaccgccaagcccaccagaccccccagcgagagcagcagcagcaccagcagcagcagcagcagacagagcctgggcctgagcctgaacaacctgaacatcaccgaggccgtgagcagcgacatcctgctggacgacgccggcgacgccaccggccacaaggacggcagaagcgtgaagatcatcgtgagcatcagcaagggctacggcagagccaaggaccagaagagccaggcctacctgatcggcagcatcggcgtgagcggcaagaccaagtgggacgtgctggacggcgtgatcagaagactgttcaaggagtacgtgttcagaatcgacaccagcaccagcctgggcctgagcagcgactgcatcgccagctactgcatcggcgacctgatcagaagccacaacctggaggtgcccgagctgctgccctgcggctacctggtgggcgacaacaacatcatcaccgtgaacctgaagggcgtggaggagaacagcctggacagcttcgtgttcgacaccctgatccccaagcccatcacccagagatacttcaacctgctgatggagcaccacagaatcatcctgagcggccccagcggcaccggcaagacctacctggccaacaagctggccgagtacgtgatcaccaagagcggcagaaagaagaccgaggacgccatcgccaccttcaacgtggaccacaagagcagcaaggagctgcagcagtacctggccaacctggccgagcagtgcagcgccgacaacaacggcgtggagctgcccgtggtgatcatcctggacaacctgcaccacgtgggcagcctgagcgacatcttcaacggcttcctgaactgcaagtacaacaagtgcccctacatcatcggcaccatgaaccagggcgtgagcagcagccccaacctggagctgcaccacaacttcagatgggtgctgtgcgccaaccacaccgagcccgtgaagggcttcctgggcagatacctgagaagaaagctgatcgagatctag

SEQ ID NO: 334981 - protein, 2186 aa, Artificial Sequence
  derived and/or modified sequence
MPVLGVASKLRQPAVGSKPVHTALPIPNLGTTGSQHCSSRPLELTETESSMLSCQLALKSTCEFGEKKPLQGKAKEKEDSKIYTDWANHYLAKSGHKRLIKDLQQDIADGVLLAEIIQIIANEKVEDINGCPRSQSQMIENVDVCLSFLAARGVNVQGLSAEEIRNGNLKAILGLFFSLSRYKQQQHHQQQYYQSLVELQQRVTHASPPSEASQAKTQQDMQSSLAARYATQSNHSGIATSQKKPTRLPGPSRVPAAGSSSKVQGASNLNRRSQSFNSIDKNKPPNYANGNEKDSSKGPQSSSGVNGNVQPPSTAGQPPASAIPSPSASKPWRSKSMNVKHSATSTMLTVKQSSTATSPTPSSDRLKPPVSEGVKTAPSGQKSMLEKFKLVNARTALRPPQPPSSGPSDGGKDDDAFSESGEMEGFNSGLNSGGSTNSSPKVSPKLAPPKAGSKNLSNKKSLLQPKEKEEKNRDKNKVCTEKPVKEEKDQVTEMAPKKTSKIASLIPKGSKTTAAKKESLIPSSSGIPKPGSKVPTVKQTISPGSTASKESEKFRTTKGSPSQSLSKPITMEKASASSCPAPLEGREAGQASPSGSCTMTVAQSSGQSTGNGAVQLPQQQQHSHPNTATVAPFIYRAHSENEGTALPSADSCTSPTKMDLSYSKTAKQCLEEISGEDPETRRMRTVKNIADLRQNLEETMSSLRGTQISHSTLETTFDSTVTTEVNGRTIPNLTSRPTPMTWRLGQACPRLQAGDAPSLGAGYPRSGTSRFIHTDPSRFMYTTPLRRAAVSRLGNMSQIDMSEKASSDLDMSSEVDVGGYMSDGDILGKSLRTDDINSGYMTDGGLNLYTRSLNRIPDTATSRDIIQRGVHDVTVDADSWDDSSSVSSGLSDTLDNISTDDLNTTSSVSSYSNITVPSRKNTQLRTDSEKRSTTDETWDSPEELKKPEEDFDSHGDAGGKWKTVSSGLPEDPEKAGQKASLSVSQTGSWRRGMSAQGGAPSRQKAGTSALKTPGKTDDAKASEKGKAPLKGSSLQRSPSDAGKSSGDEGKKPPSGIGRSTATSSFGFKKPSGVGSSAMITSSGATITSGSATLGKIPKSAAIGGKSNAGRKTSLDGSQNQDDVVLHVSSKTTLQYRSLPRPSKSSTSGIPGRGGHRSSTSSIDSNVSSKSAGATTSKLREPTKIGSGRSSPVTVNQTDKEKEKVAVSDSESVSLSGSPKSSPTSASACGAQGLRQPGSKYPDIASPTFRRYTPSSRQANQEEGKEWLRSHSTGGLQDTGNQSPLVSPSAMSSSAAGKYHFSNLVSPTNLSQFNLPGPSMMRSNSIPAQDSSFDLYDDSQLCGSATSLEERPRAISHSGSFRDSMEEVHGSSLSLVSSTSSLYSTAEAGGSLEQIHKLRRELVASQEKVATLTSQLSANAHLVAAFEKSLGNMTGRLQSLTMTAEQKESELIELRETIEMLKAQNSAAQAAIQGALNGPDHPPKDLRIRRQHSSESVSSINSATSHSSIGSGNDADSKKKKKKNWVNSRGSELRSSFKQAFGKKKSTKPPSSHSDIEELTDSSLPASPKLPHNAGDCGSASMKPSQSASAICECTEAEAEIILQLKSELREKELKLTDIRLEALSSAHHLDQIREAMNRMQNEIEILKAENDRLKAETGNTAKPTRPPSESSSSTSSSSSRQSLGLSLNNLNITEAVSSDILLDDAGDATGHKDGRSVKIIVSISKGYGRAKDQKSQAYLIGSIGVSGKTKWDVLDGVIRRLFKEYVFRIDTSTSLGLSSDCIASYCIGDLIRSHNLEVPELLPCGYLVGDNNIITVNLKGVEENSLDSFVFDTLIPKPITQRYFNLLMEHHRIILSGPSGTGKTYLANKLAEYVITKSGRKKTEDAIATFNVDHKSSKELQQYLANLAEQCSADNNGVELPVVIILDNLHHVGSLSDIFNGFLNCKYNKCPYIIGTMNQGVSSSPNLELHHNFRWVLCANHTEPVKGFLGRYLRRKLIEIEIERNIRNNDLVKIIDWIPKTWHHLNSFLETHSSSDVTIGPRLFLPCPMDVEGSRVWFMDLWNYSLVPYILEAVREGLQMYGKRTPWEDPSKWVLDTYPWSSATLPQESPALLQLRPEDVGYESCTSTKEATTSKHIPQTDTEGDPLMNMLMKLQEAANYSSTQSCDSESTSHHEDILDSSLESTL

SEQ ID NO: 334982 - DNA, 6561 bp, Artificial Sequence
  derived and/or modified sequence
atgccagtcctgggagtggcctccaagttgagacagcccgccgttggcagcaaaccagtgcacactgctctccccatccccaacctaggcacaacgggatctcagcactgctccagcagaccactcgaactgaccgaaacggaatcgagtatgctgtcctgccagctggctctaaagagcacctgcgagtttggcgaaaaaaagcccctgcagggaaaagccaaggagaaggaagattctaagatttataccgattgggcaaatcactatctcgccaaatctgggcataagcgcctgatcaaagatctgcagcaggatatagcagacggcgtgcttctcgcagaaattattcagattatcgcaaatgaaaaggtggaagatattaacgggtgtcccaggtcccaatcgcaaatgatcgaaaacgtcgacgtctgtctgagctttctcgccgcccggggcgtcaacgtacaaggccttagcgcagaagagatacgaaatggtaaccttaaagccatcctgggtttattcttctccctcagtaggtataagcagcagcagcaccatcagcaacagtactatcagtcgcttgtggagctgcagcagcgggtgacacacgcgtccccaccctctgaagcatcacaggcaaaaactcaacaggatatgcagtctagcctggcagcgcgttacgccacccagagtaaccactccggcattgccactagccagaagaagcccacacgtctaccaggccccagtcgcgtcccagctgcaggctcttcaagcaaagtgcaaggtgcctcaaacctcaacaggcgctctcagtctttcaatagcatcgacaagaataaacctcccaactatgccaacggcaatgaaaaggactcaagcaaaggcccccagtccagctctggggtcaacggtaacgtgcagcccccgtccaccgcgggtcagcctccagcctctgcaattccttctccctccgcaagcaagccttggaggtccaagagcatgaacgtgaaacatagcgctacaagtacaatgttaactgttaaacagagctctacggccacttcacccacacctagttctgacaggctaaaaccccctgtgtcagaaggagtaaaaaccgcccccagcggtcagaagagcatgctggagaagtttaagctggtcaacgccaggactgctttgagacctccacagccgccctccagcgggccaagtgacggaggtaaagacgacgatgcattcagcgaatccggggagatggaggggttcaacagcggcctgaactcagggggctccacaaacagctcacccaaggtgtccccaaaactggcaccacctaaggccggatcaaaaaatctttccaataagaaatcactcctgcagcccaaggagaaagaggaaaagaacagagacaaaaacaaggtctgtacggagaaaccagtgaaagaagaaaaagaccaagtcactgagatggcaccaaaaaaaacaagcaagattgccagccttataccaaaaggatcaaagacaaccgcagctaagaaagaatctctgatccccagcagctctggcataccaaaacctggaagtaaggtccccaccgttaaacagacaatcagtccgggtagcacagcttctaaagagtctgaaaagtttaggaccactaaggggtcaccctcacagtcgttgtctaagccaattaccatggagaaggcaagcgcctcatcctgccccgcccctctggagggcagagaagctggccaagcatcaccgtcgggatcgtgcacgatgaccgttgcacaatctagcggccagtcaactggaaatggggctgtccaactacctcagcagcagcagcactcgcatccaaataccgccaccgtggctccctttatttacagagctcattctgagaatgaggggacagcccttccctccgctgacagctgcacctcccccaccaagatggacctgagttactctaaaaccgctaagcagtgtttagaggagatatctggagaggatcccgagacccgacgtatgagaactgttaagaatatcgccgacttacgacagaatctggaggagaccatgtcatctttgaggggtacacagattagtcattccaccctggaaacaacatttgatagcaccgtcacgaccgaagttaatgggaggacgatccctaacctaacgtctcgccccacacccatgacctggcgcctcggacaggcctgccctagattgcaggcaggggatgcaccctctctgggggcaggataccctcgatcgggtacctcgcgctttattcacacagatccatcaagattcatgtacaccacccctctgcgccgggccgccgtttctcggctcgggaacatgtcccaaatcgatatgagcgaaaaagcctctagtgatctggacatgtcctccgaggtggatgtggggggctatatgtctgacggagacatcttgggaaagagcctgcggacagacgacataaatagcgggtatatgaccgatggagggctgaatctgtataccagatctctcaataggatccctgataccgccacgtcccgtgacataatccagcggggtgttcatgatgtgacagtggacgctgattcatgggatgattcaagctccgtaagctccggcctcagtgacaccctcgataacatctctacggatgacttgaacactacaagctctgtgtccagctacagtaatataacagtcccatctcggaagaatacgcagttgagaactgactccgagaaaaggtctactactgacgaaacctgggatagtccagaggagttaaaaaagcccgaggaagattttgattcccacggagatgctggtggtaaatggaaaacagttagtagcgggctgcctgaggacccggaaaaggccgggcaaaaagccagcttatctgtcagccagactggaagctggaggcgcggtatgtccgctcagggcggggccccttccagacaaaaagccggcaccagcgcacttaagactcctggaaagaccgacgatgccaaggcttcagaaaaggggaaagcccctctaaaggggtcttcacttcagcgttcaccttctgacgcggggaagtcatcaggcgatgagggcaaaaagcctccctcaggtattggacggagtaccgcaacctcatcgttcggattcaagaaaccttccggcgttggaagttctgccatgataacaagcagcggggcaaccataacttccgggagcgctacactggggaagatccccaagagtgctgccatcggagggaagtctaacgctgggaggaaaacttctcttgacggcagccagaatcaggacgacgtggtgctgcacgtgagctctaaaactacccttcagtacaggagcctgcccaggcccagcaagtctagtacttctggaatccccggacgcggaggccaccgctcaagtacatcgtccattgattccaacgtgagcagtaagagtgccggagctacaacctcaaaactgcgggaacccaccaagatcgggtcgggccggtcctcccctgtcactgtgaaccaaacggacaaggaaaaagagaaggtagctgtgtctgactccgagagcgtgtcactaagtgggagccctaaaagttcacctacctctgcctccgcctgtggagcccagggcctgaggcaaccagggtccaaataccccgacattgccagccccaccttccgccggtatactccgtcgtctcgccaagctaatcaggaggagggtaaagaatggctacgttcccactccaccggagggctgcaggatacaggaaaccaatcccctctggtctctccgtcggctatgtcctcatcagcagcgggtaagtaccactttagcaacctggtgtctccaacaaatctgagtcagttcaacttgcccgggccatcaatgatgaggtcgaattccattccagcacaggactccagttttgacttgtacgatgattcacaactctgtgggtctgcaaccagtcttgaggagcgtccccgcgctataagtcattctgggtcctttcgagactccatggaggaggtgcacggctccagcctgtcactcgtctcatccacttcctctctgtactccacagccgaggccggggggtccttggagcaaatacacaaattgcggcgtgagctcgttgcttctcaggagaaagtcgcaactctgacctcccaactttcagccaacgcccatctggtagccgctttcgagaagtccttaggcaacatgaccggaagactccagtctcttacgatgactgctgagcagaaggagtccgagctgatagaactcagggagaccatcgagatgctcaaggcacagaatagtgcagcccaggccgctattcagggcgccttgaacggtccagaccaccctcccaaagatttgaggatacgtaggcaacactcttccgagtctgttagttctatcaactccgccacctcccacagttcaattggtagcggcaatgatgccgactctaagaagaagaaaaagaagaactgggtgaacagccggggctcggaactgagatcctcttttaaacaggcatttggcaagaagaagtcaactaagcctcccagctcccacagcgatatcgaggaactcacagatagctcgctaccagcctccccgaaactcccgcataacgctggggactgtggcagcgcttccatgaaaccatctcagtcggcatccgccatttgcgagtgtaccgaagctgaggcggagatcattctgcagttgaaaagcgaactccgtgaaaaggaactcaagcttaccgacattagactcgaggccctgtcgtccgcgcaccacctcgatcagatcagagaggcaatgaaccgaatgcagaatgagattgaaatcttaaaggcagagaatgacaggcttaaagccgagactggcaacacggcgaaacctaccagacccccttctgagagcagctcttccacatcatctagtagttccaggcaaagcctgggcttaagcctcaacaacctcaacattacagaggcagtatctagcgacattttactagacgacgcaggtgatgccacagggcacaaagatggaagatcggtgaaaataatcgtcagcatatctaagggctatgggcgggctaaagatcagaagtcccaggcctacctgataggtagcataggagtttccggtaaaaccaaatgggacgtgctcgacggcgtgattaggcgcctcttcaaggagtatgtttttcgtatcgacacttcaactagtttggggctttcttccgactgcatcgcatcatactgcatcggggacttgattaggagtcacaatcttgaggtgccggaattgctgccttgcgggtacctggtcggggacaacaacatcatcaccgtgaatttgaaaggagttgaggagaattcgctcgacagtttcgtgttcgacacattaattcccaaaccaatcacacagcgctactttaatttattaatggagcatcaccgcatcattctgtccgggcctagcggcactggaaagacctatctggccaacaaattagcggaatacgtgatcactaaatcaggccgtaaaaagacagaagacgctattgcaacctttaacgtcgatcataagtcaagtaaagagctccagcagtatctggcaaacctggcagaacagtgttcagctgataataatggtgtggagcttcccgtggtcatcatattagataatctgcatcatgtggggagcctttcggatatatttaacggctttttgaattgcaagtacaataaatgtccttacattattggaacaatgaatcagggcgtttcgtcaagcccaaacctggagctacaccacaactttcgctgggtgctgtgcgccaatcacactgagcccgtgaaggggtttcttggacgttatttgcgacgcaaattaatcgagattgagattgaacgaaacataaggaataatgacttggttaaaatcatcgactggatcccaaagacgtggcatcacctgaattccttcctcgagacacatagtagctctgatgtgacaatagggccgaggttgttcttaccatgcccaatggacgtggaaggatcaagagtatggttcatggatctgtggaactactctttggttccatacatattggaggctgttagagagggcctccaaatgtacgggaaacgcactccttgggaggatccctctaaatgggtgttggatacgtatccttggagctcagctacactgccacaggagtcacctgccctgctgcagctgaggcccgaagacgtcggctatgaatcatgtaccagcaccaaggaagcaaccacttccaagcacattccgcagacagacactgagggagacccattgatgaatatgcttatgaagctccaggaagcagccaattacagttcaactcaatcatgtgattcggaatctactagccaccacgaagacattctggactctagcttagagtcgacattgtag

SEQ ID NO: 334983 - DNA, 6561 bp, Artificial Sequence
  derived and/or modified sequence
atgcctgtgctgggcgtggccagcaagctgcggcagcctgctgtgggcagcaagcctgtgcacacagccctgcccatccccaacctgggcaccaccggcagccagcactgcagcagccggcccctggagctgacagaaacagagagctccatgctgagctgccagctggccctgaagagcacctgtgaatttggagagaagaagcccctgcagggcaaggccaaggagaaggaggacagcaagatctacacagactgggccaaccactacctggccaagagcggccacaagaggctcatcaaggacctgcagcaggacattgctgatggagtgctgctggccgagatcatccagatcatcgccaatgagaaggtggaggacatcaatggctgccccaggagccagagccagatgattgaaaatgtggatgtgtgcctgtccttcctggccgcccggggcgtgaatgtgcagggcctgtctgctgaggagatcagaaatggaaacctgaaggccatcctgggcctcttcttcagcctgagccgctacaagcagcagcagcaccaccagcagcagtactaccagagcctggtggagctgcagcagagggtgacccacgccagcccccccagcgaggccagccaggccaagacccagcaggacatgcagagcagcctggccgcccgctatgccacccagagcaaccacagcggcatcgccaccagccagaagaagcccacccggctgcccggccccagccgggtgcctgctgctggcagcagcagcaaggtgcagggcgccagcaacctgaacagaagaagccagagcttcaacagcattgacaagaacaagccacccaactatgccaatggaaatgagaaggacagcagcaagggcccccagagcagcagtggagtgaatggaaatgtgcagccccccagcacagctggccagcccccagccagcgccatccccagccccagcgccagcaagccctggaggagcaagtccatgaatgtgaagcacagcgccaccagcaccatgctgactgtgaagcagagcagcacagccaccagccccacccccagcagtgaccggctgaagccccctgtgtctgaaggagtgaagacagcccccagcggccagaagtccatgctggagaagttcaagctggtgaatgccaggacagccctgcggcccccccagccccccagcagcggccccagtgatggcggcaaggatgatgatgccttcagcgagagcggggagatggagggcttcaacagcggcctgaacagcggcggcagcaccaacagcagccccaaggtgagccccaagctggccccacccaaggccggcagcaagaacctgagcaacaagaagagcctgctgcagcccaaggagaaggaggagaagaacagagacaagaacaaggtgtgcacagagaagcctgtgaaggaggagaaggaccaggtgacagagatggcccccaagaagaccagcaagatcgccagcctcatccccaagggcagcaagaccacagctgccaagaaggagagcctcatccccagcagcagcggcatccccaagccaggcagcaaggtgcccaccgtgaagcagaccatcagccctggcagcacagccagcaaggagagcgagaagttccgcaccaccaagggcagccccagccagagcctgagcaagcccatcaccatggagaaggccagcgccagcagctgcccagcccccctggagggccgggaggccggccaggccagccccagcggcagctgcaccatgacagtggcccagagcagcggccagagcactggaaatggagctgtgcagctgccccagcagcagcagcacagccaccccaacacagccaccgtggcccccttcatctaccgggcccacagtgaaaatgaaggaacagccctgcccagcgctgacagctgcaccagccccaccaagatggacctgagctacagcaagacagccaagcagtgcctggaggagatcagcggggaggaccctgagaccaggaggatgaggacagtgaagaacattgctgacctgcggcagaacctggaggagaccatgagcagcctgcggggcacccagatcagccacagcaccctggagaccacctttgacagcacagtgaccacagaggtgaatggccgcaccatccccaacctgaccagccggcccacccccatgacctggaggctgggccaggcctgcccccggctgcaggccggagatgcccccagcctgggcgccggctaccccaggagcggcaccagccgcttcatccacacagaccccagccgcttcatgtacaccacccccctgcggcgggctgctgtgtcccggctgggcaacatgagccagattgacatgtctgagaaggccagcagtgacctggacatgagcagcgaggtggatgtgggcggctacatgtctgatggagacatcctgggcaagagcctgaggacagatgacatcaacagcggctacatgacagatggcggcctgaacctgtacaccaggagcctgaaccgcatcccagacacagccaccagccgggacatcatccagaggggcgtgcatgatgtgacagtggatgctgacagctgggatgacagcagctctgtgagcagcggcctgagtgacaccctggacaacatcagcacagatgacctgaacaccaccagctctgtgagcagctacagcaacatcaccgtgcccagcaggaagaacacccagctgaggacagacagcgagaagaggagcaccacagatgagacctgggacagccctgaggagctgaagaagccagaagaagattttgacagccatggagatgctgggggcaagtggaagacagtgagcagcggcctgcctgaggaccctgagaaggccggccagaaggccagcctgtctgtgtcccagacaggctcctggaggcggggcatgtctgcccagggcggggcccccagccggcagaaggccggcaccagcgccctgaagaccccaggcaagacagatgatgccaaggccagcgagaagggcaaggcccccctgaagggcagcagcctgcagaggagccccagtgatgctgggaagagcagtggagatgagggcaagaagccacccagcggcatcggccgcagcacagccaccagcagctttggcttcaagaagcccagcggcgtgggcagcagcgccatgatcaccagcagcggggccaccatcaccagcggcagcgccaccctgggcaagatccccaagtctgctgccatcggcggcaagagcaatgccggcaggaagaccagcctggatggcagccagaaccaggatgatgtggtgctgcacgtgagcagcaagaccaccctgcagtaccgcagcctgccccggcccagcaagagcagcaccagcggcatccctggccggggcggccacaggagcagcaccagcagcattgacagcaatgtgagcagcaagtctgctggggccaccaccagcaagctgcgggagcccaccaagattggcagcggccgcagcagccctgtgacagtgaaccagacagacaaggagaaggagaaggtggccgtgtctgattctgagagcgtgtccctgagcggcagccccaagagcagccccaccagcgccagcgcctgtggggcccagggcctgcggcagcccggcagcaagtacccagacatcgccagccccaccttccgccgctacacccccagcagccggcaggccaaccaggaggagggcaaggagtggctgcggagccacagcactggaggcctgcaggacaccggcaaccagagccccctggtgagccccagcgccatgagcagcagcgctgctgggaagtaccacttcagcaacctggtgagccccaccaacctgagccagttcaacctgcccggccccagcatgatgaggagcaacagcatcccagcccaggacagcagctttgacctgtatgatgacagccagctgtgtggcagcgccaccagcctggaggagcggccccgggccatcagccacagcggcagcttccgggacagcatggaggaggtgcacggcagcagcctgagcctggtgagcagcaccagcagcctgtacagcacagctgaggccggcggcagcctggagcagatccacaagctgcggcgggagctggtggccagccaggagaaggtggccaccctgaccagccagctgagcgccaatgcccacctggtggccgcctttgagaagagcctgggcaacatgacaggccgcctgcagagcctgaccatgacagctgagcagaaggagagcgagctgattgagctgcgggagaccatcgagatgctgaaggcccagaacagcgctgcccaggccgccatccagggcgccctgaatggaccagaccacccccccaaggacctgcgcatccggcggcagcacagcagcgagagcgtgagcagcatcaacagcgccaccagccacagcagcatcggcagcggaaatgatgctgacagcaagaagaagaagaagaagaactgggtgaacagccggggcagcgagctgcggagcagcttcaagcaggccttcggcaagaagaagagcaccaagccacccagcagccacagcgacatcgaggagctgacagacagcagcctgcctgccagccccaagctgccccacaatgctggggactgtggcagcgcctccatgaagcccagccagagcgccagcgccatctgtgagtgcacagaggccgaggccgagatcatcctgcagctgaagtctgagctgcgggagaaggagctgaagctgacagacatccggctggaggccctgagcagcgcccaccacctggaccagatccgggaggccatgaacaggatgcagaatgaaattgagatcctgaaggcagaaaatgaccggctgaaggccgagactggaaacacagccaagcccacccggccccccagcgagagcagcagcagcaccagcagcagcagcagccggcagagcctgggcctgagcctgaacaacctgaacatcacagaagctgtgtccagtgacatcctgctggatgatgctggagatgccaccggccacaaggatggccgctctgtgaagatcatcgtgtccatcagcaagggctacggccgggccaaggaccagaagagccaggcctacctgattggcagcattggagtgtctgggaagaccaagtgggatgtgctggatggagtcatcagaagactcttcaaggagtatgtgttcagaattgacaccagcaccagcctgggcctgagcagtgactgcatcgccagctactgcattggagacctgatccgcagccacaacctggaggtgcctgagctgctgccctgtggctacctggtgggggacaacaacatcatcaccgtgaacctgaagggcgtggaggagaacagcctggacagctttgtgtttgacaccctcatccccaagcccatcacccagcgctacttcaacctgctgatggagcaccaccgcatcatcctgagcggccccagcggcaccgggaagacctacctggccaacaagctggccgagtatgtgatcaccaagagcggcaggaagaagacagaagatgccatcgccaccttcaacgtggaccacaagagcagcaaggagctgcagcagtacctggccaacctggccgagcagtgcagcgctgacaacaacggggtggagctgcctgtggtgatcatcctggacaacctgcaccacgtgggcagcctgagtgacatcttcaacggcttcctgaactgcaagtacaacaagtgcccctacatcatcggcaccatgaaccagggcgtgagcagcagccccaacctggagctgcaccacaacttccgctgggtgctgtgtgccaaccacacagagcctgtgaagggcttcctgggccgctacctgcggaggaagctgattgaaattgaaattgaaagaaacatcagaaataatgacctggtgaagatcatcgactggatccccaagacctggcaccacctgaacagcttcctggagacccacagcagcagtgatgtgaccatcggccccaggctcttcctgccctgccccatggatgtggagggcagccgggtgtggttcatggacctgtggaactacagcctggtgccctacatcctggaggccgtgcgggagggcctgcagatgtatggcaagaggaccccctgggaggaccccagcaagtgggtgctggacacctacccctggagcagcgccaccctgccccaggagagccctgccctgctgcagctgcggccagaagatgtgggctatgagagctgcaccagcaccaaggaggccaccaccagcaagcacatcccccagacagacacagaaggagaccccctgatgaacatgctgatgaagctgcaggaggccgccaactacagcagcacccagagctgtgacagcgagagcaccagccaccacgaggacatcctggacagcagcctggagagcaccctgtag

SEQ ID NO: 334984 - DNA, 6561 bp, Artificial Sequence
  derived and/or modified sequence
atgcccgtgctgggcgtggccagcaagctgcggcagcccgccgtggggagcaaaccagtgcataccgcccttccaattccaaatttggggaccactggctctcagcattgctctagcagacctttagagctgaccgagaccgaatcgtccatgctttcctgccagctagctctgaagagcacatgtgagttcggggagaaaaaaccacttcaaggcaaagctaaggagaaagaggacagtaagatctacacagactgggccaaccattacctggctaagtccggccacaaaagactgatcaaagacttgcagcaggacatcgccgatggcgtgcttctagccgagataatccagatcatcgcgaacgagaaggtggaagatattaacggatgtccaagaagccagtcccagatgattgaaaacgtggatgtgtgcctcagctttctcgccgctagaggggtcaacgtgcaaggcttgagcgctgaagagatccggaacggcaacctgaaagctatcctggggctgttcttctcgctgtctagatataagcagcagcagcaccaccagcaacagtattaccagtctctggtcgagcttcaacagagggtaacacatgcaagccccccttccgaggcgagccaggctaagactcagcaggacatgcagagctctttggctgcgcgctacgctacacagagtaatcattctggcattgccaccagtcagaagaagccgactcgactccccggcccatcaagagtgccagccgctggcagctcaagtaaagtccaaggggcttctaatctgaatagacggagccagtcttttaactctatcgataaaaacaagccaccaaattacgcaaatggcaatgaaaaagacagcagcaaaggtccccaatcatcatctggggtgaacggtaacgtacagccgccttcaacagccggtcagcctcctgcttcagctatacccagcccaagtgcttcaaaaccttggcggtccaagtctatgaacgtgaaacacagcgctactagtaccatgttgactgtgaaacaatctagtacggccacaagccctacccctagtagcgatagactgaagcctccggtttctgaaggcgtaaaaaccgcccccagtgggcagaaaagcatgttagagaaattcaaactagtgaacgcccggaccgctctacggcctcctcagcctcctagtagtgggccttcagatggaggaaaagatgatgatgcgttttcagaatctggggaaatggagggcttcaacagtggtcttaacagtggagggagtaccaactcatcccctaaggtgtctccaaagctggcaccaccaaaggctggcagtaaaaatctcagcaataagaaatcccttctccaaccaaaagagaaagaagaaaaaaatcgtgataagaacaaggtgtgtaccgaaaaacctgtaaaagaggaaaaggatcaggtcacggagatggcacccaaaaagacctccaagattgcctctttaatcccaaaaggctcgaagacaacggcagctaaaaaagaaagcttgatccctagtagttccggcatccccaaacctggttcaaaagttcccacagttaagcagacaattagcccagggtctaccgcaagcaaggagtcagagaaatttagaaccaccaaaggttcccccagccagagtctctcaaaaccgatcactatggagaaggctagcgcctcctcctgtcctgcccccctggagggtcgtgaggctggccaagcttctccgagcgggtcatgtaccatgaccgttgctcagagttctgggcagagcaccggcaatggggctgtccagctcccgcagcagcagcagcacagccatccaaataccgcaaccgtcgccccattcatttacagggcgcacagcgagaatgaggggacagctctcccctccgctgactcatgcacttctccgacgaagatggatctgtcctacagcaaaactgcgaaacagtgtttggaagaaatttcaggcgaagatccagagacccgccgtatgaggacagtgaagaatatcgccgatttgagacagaatctcgaggaaaccatgagttctctccgcggcacccaaatatcacatagcacgctggagactaccttcgactcaacagtgacaaccgaggtcaatggccggacgattccaaacctaacttcccggccaacgcccatgacctggagacttggacaggcatgtccaagactgcaggccggcgatgcaccaagtctgggtgccggctacccccggtcgggcacttctcggtttatccacactgatccttcccgcttcatgtataccacgcctctgcgaagggcagccgtcagccgccttggaaacatgtctcagatcgacatgagcgaaaaagcctcatccgatctcgacatgtccagtgaggtggacgtggggggttacatgagtgacggagacatattgggaaaaagtttgcggactgatgatatcaattccggatatatgaccgatgggggtctgaatctctacactcggtcactgaaccggataccagataccgctacttcccgtgacataatccaaagaggggtgcacgacgttaccgtggacgcggatagttgggacgactccagctcggtttccagcggcctgagcgataccctcgacaatattagtaccgatgatctgaacactacatcatcagtttcaagttacagtaacatcaccgtccctagccgcaaaaacacacagctgaggacggatagtgagaaaagatccactacagacgaaacttgggactcccctgaggagctgaagaagccggaggaggattttgattcccacggtgatgcaggggggaaatggaaaacggtcagctccggcttgccagaagacccagaaaaggcaggacaaaaggcatccctgtcagtgtcgcagaccggctcttggcgccgagggatgtctgcgcaaggcggagctccgtcccgacagaaggccggcacctccgccctgaaaaccccagggaaaactgacgatgcaaaagcctcagagaagggtaaagcaccattaaagggatccagcttgcaacgaagtccgtctgatgcggggaaaagtagtggggatgaagggaagaagccaccctccgggattggcagaagcaccgccacctcttcattcggttttaagaaacctagtggtgtgggctcatctgcgatgatcacatcttcgggtgctaccattacctctggctctgctaccctggggaagattccgaagtcagctgcgatcgggggaaagtcgaacgcgggacgaaagacaagcctcgacggaagccagaaccaggacgatgtggttctgcacgtgtctagtaaaacaaccttgcagtacagatctttgccgcggccaagcaagtcatctactagtggcatccctggtagaggcggccatcggagctcaactagtagcatcgactccaatgtgtcatccaaaagtgctggagctactacatctaaactgagagagccaactaagattggtagtgggcgttcctcccctgtaacagtgaatcagacggataaggaaaaggagaaggtggctgtatctgactccgagtccgtgagtttgtccggatcaccaaaatcatctcccacttcagctagcgcctgtggggcccaagggctccgacagcctgggagcaagtatcccgatattgcatcccctacgtttcgaagatacacacctagctcacggcaggccaaccaggaggaagggaaggaatggcttaggagccactctaccggcggacttcaggacaccgggaaccagtctcctttggtttccccctccgcgatgagttccagtgctgccggcaaataccatttttctaatctggtcagccccaccaacctgagccaattcaatctccctggcccaagtatgatgagatccaacagcataccagcccaggacagctcatttgatctctatgatgacagccagctgtgtggcagcgctacttcccttgaggagagaccacgagccatttcacacagcggatcctttagagactcaatggaggaggtgcacggttcttctctgtcactggtgagttctacatcttctctttattccacggccgaagccggtggctctttggaacagatccacaagctgcggagggaactggttgcttcccaggagaaagtggccacattgacctcccagctttctgccaatgcccatctcgtcgcggcttttgagaagtccctgggaaatatgactggccggctccagagcctcactatgaccgcagagcagaaggagtctgaacttatcgagttaagggagactattgagatgctgaaggctcagaattcagctgcccaagctgctatccagggggccctgaacgggccagaccatccaccaaaagatctgcgcataagacgccaacactctagtgaatctgtgagctcaattaactcagcgaccagtcacagctctataggctctgggaacgacgcagacagcaagaagaagaaaaagaaaaactgggttaactctcgcgggtctgagctgcgaagcagtttcaagcaggcattcgggaagaaaaaatctacaaagcctcccagtagccactctgacatcgaggagctgaccgactccagcctgcccgcgagtcctaaactgccccataacgcaggggattgtggctctgccagcatgaaaccaagtcaatcagctagtgctatttgcgagtgcaccgaagcagaggctgagattattctgcagctgaagagcgaactgcgggagaaggagctgaaactaactgatatacgcctcgaagccctctcaagcgcacaccacctggaccagattagggaagcgatgaacaggatgcagaacgaaattgagatcctaaaagctgagaacgacagacttaaggccgagacaggtaacacagcaaaacccacaaggccaccatccgagagctcctcttctacctccagctctagctcccgacagtctctgggcttgagcctgaacaatctaaacatcactgaggctgtgtccagcgacatcctcttagacgacgccggcgatgccacagggcataaagacgggaggagtgtcaaaattatcgtgtcaatctcaaaaggatatggccgcgccaaggatcagaaatcccaagcctacctcatcgggagtatcggagtatctggcaaaacaaagtgggacgtgctggatggtgtgatccgccgactgttcaaagaatatgtcttccggatcgatacatcaacctcactgggactgagcagcgactgcattgcgagttactgcattggagatctcatcaggtcacacaatttggaggtgcccgagctgctcccgtgcggatatctggtcggcgacaataacatcattacagtgaatcttaaaggagttgaagagaattcactggattctttcgttttcgacacactcatccctaaaccaatcactcagcggtacttcaatctcttgatggaacatcatcgaatcattctgtccgggccaagcgggactggcaagacctatctggccaataagctggctgaatacgttatcaccaaatcaggcagaaaaaaaaccgaggacgcaatagccacctttaacgtagatcacaagagttccaaagaactgcagcagtacctggccaacctggctgagcaatgtagcgccgacaataacggggtggaattgccagtggtgatcatactagataatctgcatcatgtgggctccctttctgatatatttaatggtttcctgaattgcaaatataataagtgcccatacatcatcgggacaatgaaccaaggcgtcagttcttcccccaacctggaactccaccataactttcggtgggtgctatgcgccaaccatactgagcctgtgaaaggctttctggggagatatcttcggaggaaactgatcgaaatagaaatagagagaaatatacgtaacaatgatctggtgaaaattatcgattggatccctaaaacttggcatcaccttaattcctttttggaaactcattcctcttcagatgtcacaatcggacccagactgtttctgccatgcccaatggacgtcgagggctcccgtgtctggttcatggacctctggaattattcgcttgtcccctatatcttggaggcggttagggaagggcttcagatgtacgggaaacgcaccccatgggaggatccgtccaaatgggtgctggatacgtacccctggtcttccgccacactgcctcaagaatctccggcactccttcaactgcgcccagaggatgtgggatacgagtcttgcacaagcaccaaggaagctaccacatccaaacatattccccagaccgacactgaaggggatccactcatgaacatgctgatgaagttacaggaggcagccaattacagcagtacccagtcatgcgattcagaaagtacttcacatcatgaggacatcctggattccagtctagaaagcactctgtag

SEQ ID NO: 334985 - DNA, 9227 bp, Artificial Sequence
  derived and/or modified sequence
agatgcagggaagttttgcctcttcctgaaaattatattattagctttttaaaaatcaggatgactgctagttttgtttaaagtatttgttctggaaatactaaagttggagtctaccagactgaggttagaagcattttctttggcagcaagaagataattttatagaagccatgcctgttcttggggttgcctcaaaactgaggcagccagctgttgggtcaaagcctgtgcatactgctcttccgataccaaatcttggcactactgggtcacagcactgttcttcaagacctttggaacttactgaaacagagagctccatgctttcttgtcagcttgcgttaaaatcaacctgtgaatttggagagaagaaacccctccaaggaaaagccaaggagaaagaagacagcaagatttacactgactgggccaaccactacctagcaaaatcaggccacaagcggctgatcaaggacttgcaacaagacattgcagatggagtactcctagcagaaatcatccagattattgcaaatgaaaaagttgaagatatcaatggatgtcctagaagtcagtctcagatgattgaaaatgttgatgtctgccttagttttctagcagccagaggggtaaatgttcaaggtctatctgctgaagaaataagaaatggaaacttaaaagccattctagggctgtttttcagtttatctcgctacaagcagcaacaacaccatcaacaacagtactatcagtccttggtggaacttcagcagcgagttactcacgcttcccctccatcggaagccagccaggccaaaacccagcaagatatgcagtccagtctggcagccagatatgcaactcagtctaatcacagtggaattgcaaccagtcaaaaaaagcctactaggcttccagggccctctagggtgcctgctgcaggaagcagcagcaaggtccagggagcctctaatttaaataggagaagtcagagctttaacagcattgacaaaaacaagcctccaaattatgcaaatggaaacgaaaaagattcctccaaaggacctcaatcgtcttcaggtgtaaatggtaacgtgcagcctcccagtactgctgggcagcctcctgcctctgccatcccttctccaagtgccagcaagccctggcgcagcaagtccatgaatgtcaaacacagtgccacctccaccatgttgactgtaaagcagtcaagtacagccacctcccccacaccatcttcagacagactgaagccacctgtctcagaaggggtcaaaactgctccctcaggacagaaatccatgcttgagaaattcaagctagtcaatgcccggactgctttacgccccccgcagcctcccagttcaggacctagtgatggtgggaaggatgatgatgccttttctgaatctggtgaaatggaaggttttaacagtggtctgaatagtggtggctcaacaaatagcagtcccaaagtgtcacctaagttggcccctccaaaagctggaagcaaaaatctcagcaataaaaagtctttgctacagccaaaggaaaaagaagaaaagaacagggacaaaaataaagtttgcactgaaaaaccagtcaaagaagagaaggatcaggtgacagagatggctccaaaaaagacctccaaaattgcaagcttgatccctaagggcagcaagacaacagcagctaagaaggaaagcttaattccgtcttccagtggtattccaaaaccaggctctaaagttccaacagtaaagcaaaccatttcacctggcagcacagcaagcaaagagtctgagaaattcaggactaccaaggggagcccttcccagtccttatctaagcctataaccatggagaaagcaagtgcttctagttgtcctgcccctttggaaggaagggaagctggccaagcttctccttctggttcctgtaccatgacagtggcacaaagcagtgggcagagcacaggaaatggtgctgtccaactccctcaacagcagcaacatagccacccgaataccgcgacagtggcaccattcatttacagggcacattcagaaaatgaaggtaccgctttaccatcggctgactcctgtaccagtcctacaaagatggacttatcatatagtaagactgctaagcagtgcctggaggagatatctggtgaagaccctgaaacaagaagaatgagaacagttaaaaacatagcagacttgaggcagaatttagaagagactatgtccagtcttcgtgggactcagataagccacagcaccctggagacaacatttgacagcactgtgacaacagaagttaatggaaggaccatacccaacttgacaagtcgacccacccccatgacctggaggttgggccaggcatgtccgcgacttcaggcgggagatgctccctccctgggtgctggctatcctcgcagtggtaccagtcgattcatccacacagacccctcgaggttcatgtataccacgcctctccgtcgagctgctgtctctaggctgggaaacatgtcacagattgacatgagtgagaaagcaagcagtgacctggacatgtcttctgaggtcgatgtgggtggatatatgagtgatggtgatatccttgggaaaagtctcaggactgatgacatcaacagtgggtacatgacagatggaggacttaacctatatactagaagtctgaaccgaataccagacacagcaacttcccgggacatcatccagagaggggttcacgatgtgacagtggatgcagacagctgggatgacagcagttcagtgagcagtggtctcagtgacacccttgataacatcagcactgatgacctgaacaccacatcctctgtcagctcttactccaacatcaccgtcccctctaggaagaatactcagctgaggacagattcagagaaacgctccaccacagacgagacctgggatagtcctgaggaactgaaaaaaccagaagaagattttgacagccatggggatgctggtggcaagtggaagactgtgtcctctggacttcctgaagaccccgagaaggcagggcagaaagcttccctgtctgtttcacagacaggttcctggagaagaggcatgtctgcccaaggaggggcgccatctaggcagaaagctggaacaagtgcactcaaaacacccgggaaaaccgatgatgccaaagcttctgagaaaggaaaagctcccctaaaaggatcatctctacaaagatctccttcagatgcaggaaaaagcagtggagatgaagggaaaaagcccccctcaggcattggaagatcgactgccaccagctcctttggctttaagaaaccaagtggagtagggtcatctgccatgatcaccagcagtggagcaaccataacaagtggctctgcaacactgggtaaaattccaaaatctgctgccattggcgggaagtcaaatgcagggagaaaaaccagtttggacggttcacagaatcaggatgatgttgtgctgcatgttagctcaaagactaccctacaatatcgcagcttgccccgcccttcaaaatccagcaccagtggcattcctggccgaggaggccacagatccagtaccagcagtattgattccaacgtcagcagcaagtctgctggggccaccacctcgaaactgagagaaccaactaaaattgggtcagggcgctcgagtcctgtcaccgtcaaccaaacagacaaggaaaaggaaaaagtagcagtctcagattcagaaagtgtttctttgtcaggttcccccaaatccagccccacctctgccagcgcctgtggtgcacaaggtctcaggcagccaggatccaagtatccagatattgcctcacccacatttcgaagatataccccatcatctcggcaggccaaccaagaagagggcaaagagtggttgcgttctcattctactggagggcttcaggacactggcaaccagtcacctctggtttccccttctgccatgtcatcttctgcagctggaaaataccacttttctaacttggtgagcccaacaaatttgtctcagtttaaccttcccgggcccagcatgatgcgctcaaacagcatcccagcccaagactcttccttcgatctctatgatgactcccagctttgtgggagtgccacttctctggaggaaagacctcgtgccatcagtcattcgggctcattcagagacagcatggaagaagttcatggctcttcattatcactggtgtccagcacttcttctctttactctacagctgaggcgggtggatcacttgagcaaatccataaactgcggagagagctggttgcatcacaagaaaaagttgctaccctcacatctcagctttcagcaaatgctcaccttgtagcagcttttgaaaagagcttagggaatatgactggccgattgcaaagtctaactatgacagcggaacaaaaggaatctgaacttatagaactaagagaaaccattgaaatgctgaaggctcagaattctgctgcccaggcggctattcagggagcactgaatggtccagaccatcctcccaaagatcttcgcatcagaagacagcattcctctgaaagtgtttctagtatcaacagtgccacaagccattccagtattggcagtggtaatgatgccgactccaagaagaagaaaaagaaaaactgggtgaactctagaggaagtgagctgagaagttctttcaaacaagcctttgggaagaaaaagtccaccaagcctccttcatcacattctgacattgaagagcttactgattcatcccttccggcatcccccaagttaccccataatgctggtgactgtggctcagcatccatgaagccctcacaatctgcttcagcgatctgtgaatgcacagaagctgaggcagagataattctgcagctgaagagcgagctcagagaaaaggaattaaaattaacggatattcggctggaggccctcagctctgctcatcatcttgatcagatccgggaagccatgaaccggatgcagaatgaaattgaaatactgaaagctgaaaatgaccggttgaaggcagaaactggtaacacagctaagcctactcggccaccgtcagaatcctcaagcagcacctcctcttcatcttccaggcagtcattaggactttctctaaacaatttgaacatcacagaggctgttagctcagatattttgctagatgatgctggtgatgcaactggacataaagatggccgcagtgtgaaaattatagtctccataagcaagggctatggtcgagcaaaggaccaaaaatctcaggcatatttgataggatccattggtgttagtggaaaaaccaagtgggatgtcttagatggtgtaataagacgtctctttaaggaatatgtattccgaattgatacatccactagccttggtctgagctctgactgcattgctagctactgtataggagacttaattagatcccataacctagaagtgcctgaattgctgccttgtggataccttgttggagataataacatcatcactgtgaacctcaaaggggtagaagaaaatagtttggacagttttgtttttgatacgctgattcctaaaccaattacccaaaggtactttaacttgttgatggagcatcacagaattatactctcaggaccgagtggtactggaaagacctatttggcaaacaaacttgctgaatatgtaataaccaaatctggaaggaaaaaaacagaggatgcaattgccacttttaatgtggaccacaagtcaagtaaggaattgcaacaatatctagctaacctggctgaacagtgcagtgctgataataatggagtggagctcccagttgtaataattcttgataatcttcatcatgtgggctctctgagtgatatcttcaatggttttctcaattgtaaatacaacaaatgtccatatattattggaacaatgaatcagggagtttcttcatcaccaaatctagagctgcatcacaatttcaggtgggtattatgtgcaaatcatacagaaccagtgaaaggctttttaggcagatatcttcgaagaaaactcatagagatagaaattgaaaggaacattcgcaataatgacctagtcaaaattatagattggattccgaagacgtggcatcatctcaacagttttttggaaacacacagttcttctgacgttaccattggtccccgactattccttccttgccccatggatgtagaaggttctagagtatggttcatggatctctggaactattctttagtaccttatattctggaggcagtgagagagggtcttcagatgtatgggaaacgcacaccatgggaagatccttcaaagtgggtgcttgacacatatccatggagctcagcaactctgcctcaggagagcccagccttacttcagctgcgaccagaagatgttgggtatgaaagctgcacatccactaaggaagccacaacctcaaagcacattccgcaaactgacacagaaggagatcccctgatgaatatgctaatgaaactccaagaagcagccaattactcgagcacacaaagctgcgacagcgaaagcaccagccaccatgaagacattttggattcatctcttgaatctaccctctagagggtgaaaaaagttaagggaaaagactttgcttttaaaaaaatgtttcaaaagaaaggtattttcactaaaccactgccagtataaaagcaccctgtcaagggccctgacccagagttgtggtctccaaggaggcagcagaactaagtctgaaccgccaagatgctaaattgcaatggaagcttaactttagtttatttctaagcattttttatatctgtggagtaatagaaagctccattactcaactggaaaggaccctaatgacagggcaactgaacagattgcacatgggatagccaaactggactttctttgtttcctctttaaaagtttacaatgcagaccattttttgtcccttccttttgtttcctctgaggggctgttcgccccaggcagggtccatctttctgatctgtccaacctcctttgtgccacacggtgctggtcacagggcttcagtagtgtttgtgttgtgcgctcaccccattccagaacaaatccaagaggccagtcctccataagcacaaatggaattgtgcaaccaccagaaaaacactactgtggcaaactggagaagtgccaatttaattctaactgccacgttctcatgatgtgctccaccaactttttagtatatgagtcactggttttataaggttgtttttaccacagtggtctttttaaaccacctgcccactcccttaacaagagttttataccaattattagtcaacactgataaaaggcttttttagggctttatttgtttgagccttttcagtgaaagaaggaacatttcctatggtgctgtctcactgccttaaaacagatttctatgacagtttaacagttggtttaaatcctaaaccattggtaatttccactgtcttttcatttacaaccaagcaacaccagttaacatagtagcctcatctctatatatctttctcttttttttttttttgaagaaatggataggagaaagatcagtatttttagccttgtgaatagatcgctttgcctatcctccaaaatattaaaataacccagaaatgctctttgaccgtcacttaaaacctaagacatgtggcgaaattccatccagttctaagtgaaagagtttcagaaggcagaagattttgaattattatccagcagggctggaagcactagatgcagcatgagcacaactattcggctttccttccctattgtttttgtttttttaatgagttttgacgcatgttgttttgattgctattgttgtacatgagaaattcagcattaaagaacactgaagcggtaaggtcactgtggaagaggaagcgtttatactgtaaaagaaggttagatttgcacagtctactgggtaggtattgtaaataataatttttaaaacttgcacaaatcaaaacaaacacaaacaaaattgtattttatcctgttggtgttaagaggtgtttcacttgctgagatttcctgtacattgcaaacaaatacagaatgcaaaccctcaaagctgtattatctggtgtgtttgtcctgtatttacagttgtttttgactatgcaggagctatcagtgctagagtgagcatgcttcaaaactgtacatgaagccaatatatttttggataagtaaaactgtctgaaagtacatctgtcatggcaggctttaaagagagtgcatgaaaactgatcagtcattggagaagttaccaccacacacaaaggacaggttttaagtttatgaaacccaagggctaggccatggtatagacttcttctatgagtgtgtgaaaatgtgttacttttaggacgtgtatttggtgctactctctgtgaccaccaatgggtcagttgctatagaacaacaacaccacgaaacatctgtgcagttttcagagtgtcacaaagtcaataggtccttacacggtgctattgccctaagggaaatccgaactgaatttatgcacatagaattgtcaccctgactttgaagcctcaaacatggatcaaatctgttgtgaaacatcaatatatgtagctggatgagtgactagtttcccttgtataatatgtgatctaagaaaattgctaatctttccctgccattttgagaaacacagtccaaacatgagcataaacagaatttcctgcaatacatcccagtaggtccacctagtttacaacttaaactagtttgtgaaacatttgtctgtatacattttatattttgtacattttgatgtaacatatcatgtaaataggcagaaacagtgaaataaatcatctgaaaagttttgtagtctttgtaaagccccaacaataagtacttggtgtcaatggacttaactggatgatgtattttctattggtttattgttcctctagcttgtaaaccagcttgcatatatttttttgcaaatgtgcaccctgtatctgtctaaattattactttgccattaaagtggaattatttattgacaa

SEQ ID NO: 334986 - DNA, 6561 bp, Artificial Sequence
  derived and/or modified sequence
atgccagtcctcggtgtcgcctcaaaactacggcagccagccgtgggttctaagccggtgcacacggcgttacccattccaaaccttggcaccacaggcagtcagcactgttcatcccggcctctcgagctgactgagactgaaagttccatgctgtcatgccagttggctctcaagtcaacatgcgagttcggggaaaagaaacccttgcaggggaaagcaaaggaaaaggaggacagtaaaatttatacagactgggcgaaccactacttagcaaagagcgggcataaacgcctcatcaaagatctgcagcaagatatagctgacggggtcctgctagccgagatcatacagattatcgccaatgagaaagtcgaagatatcaacggctgtccaagaagccaaagccagatgatagaaaacgtggacgtttgtttgtcatttctggccgctaggggagtgaatgtgcaaggcctgtccgccgaggaaatcaggaatggtaatttgaaggcaattttgggtctgtttttctccctgtctagatacaagcagcagcagcatcaccagcagcagtactaccaatcactggttgagcttcagcagcgcgtgacacacgcgtccccgcctagcgaggcctcacaggcaaagacacagcaggatatgcagtcctcgcttgccgctcgatacgccacacagtccaaccactcgggtatagctacatctcagaagaagccgacacgcctgccaggcccatcccgtgtacctgctgcaggttctagcagcaaagtgcagggcgcttccaacctgaacagacggagtcagagttttaactctatcgacaaaaataaaccacctaattacgccaacggtaatgagaaagattcaagcaaagggccacagtcaagcagtggagttaacggtaatgtgcagccaccttctaccgccggacagccgccagctagcgctatccccagccccagcgccagcaagccttggcgaagtaagtccatgaacgtaaagcacagcgccacttctaccatgttgacagtgaagcagagcagcacggcaacaagcccgacaccctcatcggatagactcaagcccccagtaagcgagggagttaaaaccgccccaagcgggcaaaagtcaatgctcgagaagttcaaactggtcaacgccagaaccgccctgagacctccccaaccaccgagctcggggcctagcgatgggggtaaggatgacgatgcattttctgagtccggtgagatggagggtttcaattcaggcttaaactctggagggagcaccaatagtagccccaaagtgagccccaaactcgccccacccaaagctgggtccaaaaatctttcaaataaaaaatcactgctgcagcccaaggaaaaggaagaaaagaaccgagacaagaacaaggtttgcacagagaagcctgtaaaggaggagaaggatcaggtcacggagatggcccctaaaaaaacaagcaaaattgcaagtctgatccccaagggttcaaaaaccactgcggctaaaaaagagtcacttataccatcttccagcggtatccctaaaccgggatccaaggtccctacagtcaagcagactatatctcctggatctacagcatccaaagaaagtgaaaagtttcgaacaaccaaagggtcgccatcccagtccctatcgaagccaattaccatggaaaaggcatcagctagctcatgtcctgctccccttgagggcagagaagccggtcaggccagcccatccggcagctgcaccatgaccgtcgcgcagagttcaggtcagtctactggaaacggcgcagtacagctcccgcaacagcaacagcacagtcaccccaatacggcaacggttgcacctttcatttaccgggctcacagtgaaaacgaggggaccgctctgcctagtgctgacagctgtacatctccaacaaaaatggacctgtcctactctaaaacggcaaaacaatgccttgaagagattagtggagaagaccctgaaactcggaggatgaggaccgtgaaaaatatagccgatctacggcaaaatcttgaggaaaccatgtcctcccttaggggaacacaaattagtcactctactcttgaaaccactttcgattccacggtcactacagaagtaaacggcaggaccattcctaacctgacttctcggcctaccccgatgacttggcgtttagggcaggcctgtcctcgcctgcaggccggagatgcccctagtctcggagccggttaccctaggtccggaacttccaggtttatccatactgatcccagccgctttatgtatactacgcctttgcgccgagccgctgtttctaggcttggcaacatgagccagatcgatatgtccgagaaggcaagctcagacttagatatgagcagtgaggtcgacgtcggcggatatatgtctgatggcgacattcttgggaaaagcttgcgaacggacgatatcaatagtggatacatgacggacggaggcctgaacctctatactcggagtctcaataggatcccggatactgctacctctagagacatcatccagcgcggtgttcacgacgtcactgtggatgccgattcctgggatgattcgagctctgtatcctcaggcctctccgacactttagacaatatatctaccgatgacctgaacaccaccagttctgtgtcaagttattccaacatcacagtgcctagcaggaaaaatacacaactcaggacagacagtgagaaaaggtctactacagacgagacatgggatagccctgaggagctcaagaagccggaagaggattttgactcgcacggcgacgccggaggaaagtggaaaacggtcagctctggtctcccagaagatccggagaaagcagggcagaaggcttctctttctgtcagccagactggcagttggagaagaggcatgtccgcacaaggcggagcaccctctcgacagaaggctggtacctctgcccttaagacccctggcaaaacggatgacgcgaaggctagcgaaaaaggaaaagctccccttaaaggtagttcgctgcagcgatctccaagcgatgctggaaagtcatcgggcgacgaagggaaaaaacccccaagcggaattgggagaagcacagccacttcgagctttgggttcaaaaagccgtctggagtcggcagcagtgcaatgatcacctcaagcggtgctactatcacaagcggttcggctaccctggggaagataccaaagagcgccgctataggcggaaagagtaatgcgggacgaaaaacatccctcgacgggtcacagaaccaagatgatgtggtgctccatgtgtcctccaagaccactcttcagtacaggagcttacctagaccatcaaaatcctcaacgagcggcatccccggtagaggcggtcaccgctccagtacttctagtattgactctaacgtcagcagtaagagcgccggtgcaaccacctcaaaactcagagagccaacaaagattggatccggcagatcctctccagtcacagttaaccagaccgacaaagagaaggaaaaagtcgccgtctcagattccgagtccgtgtctctgagcggctctccaaaatcgtctcccacctccgcctcagcttgtggcgctcagggattgcgccagcccggatcaaagtatcccgacattgcttcacccactttcagacgatacaccccctccagtcgtcaggctaaccaggaagaaggaaaggaatggctgcgctcccatagtaccggcggactgcaagataccggcaaccaatcgccgttagtatctccctcagccatgagtagctcagcagctggcaagtaccacttcagcaatctggtatcacctaccaacctatcccagttcaatctcccaggaccgtcaatgatgcgcagtaactcgatccctgctcaggacagcagcttcgacttgtacgacgatagccagctatgtggaagcgccacatctctggaggaacgtcctcgggctatttcccattctgggtcatttagagatagtatggaggaagtccacggctctagtctaagccttgtgtcatctacttcaagcctgtatagcacagcagaggcagggggtagtcttgagcagatccacaaactcaggagagagcttgtggcttcacaagaaaaggtagccacactcacttcccagctaagcgcgaatgctcacctggtagccgcatttgaaaagtctctggggaatatgacggggaggctacagagtcttacaatgaccgccgaacaaaaggaatccgaactcattgagctccgtgaaaccattgagatgctgaaagcacaaaattccgccgcacaggccgctattcagggagccctcaatgggcctgatcatccacccaaggacttgagaatccggcgacagcattcctcagaaagtgtaagctcaatcaatagtgccaccagccactcctcaatcggctctggcaatgatgctgacagcaagaagaagaagaagaaaaattgggtgaattcacgtggaagcgagctacgatcatcttttaagcaggcatttggcaagaaaaaaagcacaaaacctccgagcagccatagtgacatcgaagagcttacagatagctctttgccggctagtcccaagctgccccacaacgccggtgactgcggtagcgcctccatgaagccaagccagagcgcaagcgctatctgcgagtgtactgaagctgaggctgaaattatcctccaactaaagtcagaactaagggaaaaggaactcaagctcacagacatccggttagaagccctgtcgtccgcccatcacctcgatcagattagggaagcaatgaaccggatgcagaatgaaatcgagatactcaaggcagagaatgatagactgaaggccgagacaggcaacacggcgaagcccacacgcccaccaagcgaatctagttcgtcaacgagctcgtctagcagtcggcagagcctcggcctcagtctaaacaatttgaacatcacagaggctgttagttccgatatattgctcgacgatgccggtgatgccaccggtcacaaggatggccgttctgtgaaaatcatcgtctcaataagcaaaggatacgggagagccaaggaccaaaagtcccaggcctacctgatcgggtccattggagtctctgggaagaccaagtgggacgtgctggatggtgtcatcaggcggctctttaaggaatacgtttttaggatcgacacctccacttccctagggctttcgtccgactgcattgcctcgtattgtattggagacctgattcgctcgcacaacctggaggtgcccgagctcctcccctgcgggtatctcgtcggggataacaacataatcaccgtcaacttaaaaggagtagaagaaaattccctggattcctttgtgttcgacacgctgatacctaaacctattactcaacgatacttcaatttgctaatggaacaccatagaatcatactctcgggaccatccggcacaggcaagacctatttagccaataaactggccgagtatgtgatcaccaagagcggccgaaaaaagacagaggatgccatagcaacttttaacgttgatcataaaagcagcaaagaactacagcaatacctcgccaatctggcagagcagtgcagcgcagacaataatggggtggaattacctgttgtcattattctggataatctccatcatgtcggctcgttgtccgacatctttaacggtttcctgaattgtaagtacaacaaatgtccttacatcattggcacaatgaatcagggggtgagtagtagcccaaatctggaactgcaccacaacttccgatgggtcctttgtgccaaccatactgagccagttaagggatttctaggtaggtacctgagaagaaaactgatagaaatcgagattgagaggaatatccgaaacaacgacctggtgaaaattatcgactggattcccaaaacatggcatcatcttaattcatttctggaaacccattccagcagcgatgtgactatcgggcctagactttttttgccatgtccaatggatgttgagggtagccgagtgtggtttatggacctgtggaattattctctggtgccctatatactcgaagctgtcagggaaggactccaaatgtacgggaagcggacaccttgggaggacccttcaaagtgggtcctggacacctacccatggagctctgcaacactcccccaggaatctcccgcactattgcagttgcggccagaagatgtcggctacgagtcttgcaccagcacgaaagaggcaacaacatccaagcatataccccagacagacactgagggtgatccactcatgaatatgcttatgaaattacaggaggcagcgaactactccagtacacagtcctgtgactctgagtcaacaagccatcacgaggatatcctggatagctccctagagtccaccctttat

SEQ ID NO: 334987 - DNA, 6561 bp, Artificial Sequence
  derived and/or modified sequence
atgcccgtgctgggcgtggccagcaagctgagacagcccgccgtgggcagcaagcccgtgcacaccgccctgcccatccccaacctgggcaccaccggcagccagcactgcagcagcagacccctggagctgaccgagaccgagagcagcatgctgagctgccagctggccctgaagagcacctgcgagttcggcgagaagaagcccctgcagggcaaggccaaggagaaggaggacagcaagatctacaccgactgggccaaccactacctggccaagagcggccacaagagactgatcaaggacctgcagcaggacatcgccgacggcgtgctgctggccgagatcatccagatcatcgccaacgagaaggtggaggacatcaacggctgccccagaagccagagccagatgatcgagaacgtggacgtgtgcctgagcttcctggccgccagaggcgtgaacgtgcagggcctgagcgccgaggagatcagaaacggcaacctgaaggccatcctgggcctgttcttcagcctgagcagatacaagcagcagcagcaccaccagcagcagtactaccagagcctggtggagctgcagcagagagtgacccacgccagcccccccagcgaggccagccaggccaagacccagcaggacatgcagagcagcctggccgccagatacgccacccagagcaaccacagcggcatcgccaccagccagaagaagcccaccagactgcccggccccagcagagtgcccgccgccggcagcagcagcaaggtgcagggcgccagcaacctgaacagaagaagccagagcttcaacagcatcgacaagaacaagccccccaactacgccaacggcaacgagaaggacagcagcaagggcccccagagcagcagcggcgtgaacggcaacgtgcagccccccagcaccgccggccagccccccgccagcgccatccccagccccagcgccagcaagccctggagaagcaagagcatgaacgtgaagcacagcgccaccagcaccatgctgaccgtgaagcagagcagcaccgccaccagccccacccccagcagcgacagactgaagccccccgtgagcgagggcgtgaagaccgcccccagcggccagaagagcatgctggagaagttcaagctggtgaacgccagaaccgccctgagacccccccagccccccagcagcggccccagcgacggcggcaaggacgacgacgccttcagcgagagcggcgagatggagggcttcaacagcggcctgaacagcggcggcagcaccaacagcagccccaaggtgagccccaagctggccccccccaaggccggcagcaagaacctgagcaacaagaagagcctgctgcagcccaaggagaaggaggagaagaacagagacaagaacaaggtgtgcaccgagaagcccgtgaaggaggagaaggaccaggtgaccgagatggcccccaagaagaccagcaagatcgccagcctgatccccaagggcagcaagaccaccgccgccaagaaggagagcctgatccccagcagcagcggcatccccaagcccggcagcaaggtgcccaccgtgaagcagaccatcagccccggcagcaccgccagcaaggagagcgagaagttcagaaccaccaagggcagccccagccagagcctgagcaagcccatcaccatggagaaggccagcgccagcagctgccccgcccccctggagggcagagaggccggccaggccagccccagcggcagctgcaccatgaccgtggcccagagcagcggccagagcaccggcaacggcgccgtgcagctgccccagcagcagcagcacagccaccccaacaccgccaccgtggcccccttcatctacagagcccacagcgagaacgagggcaccgccctgcccagcgccgacagctgcaccagccccaccaagatggacctgagctacagcaagaccgccaagcagtgcctggaggagatcagcggcgaggaccccgagaccagaagaatgagaaccgtgaagaacatcgccgacctgagacagaacctggaggagaccatgagcagcctgagaggcacccagatcagccacagcaccctggagaccaccttcgacagcaccgtgaccaccgaggtgaacggcagaaccatccccaacctgaccagcagacccacccccatgacctggagactgggccaggcctgccccagactgcaggccggcgacgcccccagcctgggcgccggctaccccagaagcggcaccagcagattcatccacaccgaccccagcagattcatgtacaccacccccctgagaagagccgccgtgagcagactgggcaacatgagccagatcgacatgagcgagaaggccagcagcgacctggacatgagcagcgaggtggacgtgggcggctacatgagcgacggcgacatcctgggcaagagcctgagaaccgacgacatcaacagcggctacatgaccgacggcggcctgaacctgtacaccagaagcctgaacagaatccccgacaccgccaccagcagagacatcatccagagaggcgtgcacgacgtgaccgtggacgccgacagctgggacgacagcagcagcgtgagcagcggcctgagcgacaccctggacaacatcagcaccgacgacctgaacaccaccagcagcgtgagcagctacagcaacatcaccgtgcccagcagaaagaacacccagctgagaaccgacagcgagaagagaagcaccaccgacgagacctgggacagccccgaggagctgaagaagcccgaggaggacttcgacagccacggcgacgccggcggcaagtggaagaccgtgagcagcggcctgcccgaggaccccgagaaggccggccagaaggccagcctgagcgtgagccagaccggcagctggagaagaggcatgagcgcccagggcggcgcccccagcagacagaaggccggcaccagcgccctgaagacccccggcaagaccgacgacgccaaggccagcgagaagggcaaggcccccctgaagggcagcagcctgcagagaagccccagcgacgccggcaagagcagcggcgacgagggcaagaagccccccagcggcatcggcagaagcaccgccaccagcagcttcggcttcaagaagcccagcggcgtgggcagcagcgccatgatcaccagcagcggcgccaccatcaccagcggcagcgccaccctgggcaagatccccaagagcgccgccatcggcggcaagagcaacgccggcagaaagaccagcctggacggcagccagaaccaggacgacgtggtgctgcacgtgagcagcaagaccaccctgcagtacagaagcctgcccagacccagcaagagcagcaccagcggcatccccggcagaggcggccacagaagcagcaccagcagcatcgacagcaacgtgagcagcaagagcgccggcgccaccaccagcaagctgagagagcccaccaagatcggcagcggcagaagcagccccgtgaccgtgaaccagaccgacaaggagaaggagaaggtggccgtgagcgacagcgagagcgtgagcctgagcggcagccccaagagcagccccaccagcgccagcgcctgcggcgcccagggcctgagacagcccggcagcaagtaccccgacatcgccagccccaccttcagaagatacacccccagcagcagacaggccaaccaggaggagggcaaggagtggctgagaagccacagcaccggcggcctgcaggacaccggcaaccagagccccctggtgagccccagcgccatgagcagcagcgccgccggcaagtaccacttcagcaacctggtgagccccaccaacctgagccagttcaacctgcccggccccagcatgatgagaagcaacagcatccccgcccaggacagcagcttcgacctgtacgacgacagccagctgtgcggcagcgccaccagcctggaggagagacccagagccatcagccacagcggcagcttcagagacagcatggaggaggtgcacggcagcagcctgagcctggtgagcagcaccagcagcctgtacagcaccgccgaggccggcggcagcctggagcagatccacaagctgagaagagagctggtggccagccaggagaaggtggccaccctgaccagccagctgagcgccaacgcccacctggtggccgccttcgagaagagcctgggcaacatgaccggcagactgcagagcctgaccatgaccgccgagcagaaggagagcgagctgatcgagctgagagagaccatcgagatgctgaaggcccagaacagcgccgcccaggccgccatccagggcgccctgaacggccccgaccacccccccaaggacctgagaatcagaagacagcacagcagcgagagcgtgagcagcatcaacagcgccaccagccacagcagcatcggcagcggcaacgacgccgacagcaagaagaagaagaagaagaactgggtgaacagcagaggcagcgagctgagaagcagcttcaagcaggccttcggcaagaagaagagcaccaagccccccagcagccacagcgacatcgaggagctgaccgacagcagcctgcccgccagccccaagctgccccacaacgccggcgactgcggcagcgccagcatgaagcccagccagagcgccagcgccatctgcgagtgcaccgaggccgaggccgagatcatcctgcagctgaagagcgagctgagagagaaggagctgaagctgaccgacatcagactggaggccctgagcagcgcccaccacctggaccagatcagagaggccatgaacagaatgcagaacgagatcgagatcctgaaggccgagaacgacagactgaaggccgagaccggcaacaccgccaagcccaccagaccccccagcgagagcagcagcagcaccagcagcagcagcagcagacagagcctgggcctgagcctgaacaacctgaacatcaccgaggccgtgagcagcgacatcctgctggacgacgccggcgacgccaccggccacaaggacggcagaagcgtgaagatcatcgtgagcatcagcaagggctacggcagagccaaggaccagaagagccaggcctacctgatcggcagcatcggcgtgagcggcaagaccaagtgggacgtgctggacggcgtgatcagaagactgttcaaggagtacgtgttcagaatcgacaccagcaccagcctgggcctgagcagcgactgcatcgccagctactgcatcggcgacctgatcagaagccacaacctggaggtgcccgagctgctgccctgcggctacctggtgggcgacaacaacatcatcaccgtgaacctgaagggcgtggaggagaacagcctggacagcttcgtgttcgacaccctgatccccaagcccatcacccagagatacttcaacctgctgatggagcaccacagaatcatcctgagcggccccagcggcaccggcaagacctacctggccaacaagctggccgagtacgtgatcaccaagagcggcagaaagaagaccgaggacgccatcgccaccttcaacgtggaccacaagagcagcaaggagctgcagcagtacctggccaacctggccgagcagtgcagcgccgacaacaacggcgtggagctgcccgtggtgatcatcctggacaacctgcaccacgtgggcagcctgagcgacatcttcaacggcttcctgaactgcaagtacaacaagtgcccctacatcatcggcaccatgaaccagggcgtgagcagcagccccaacctggagctgcaccacaacttcagatgggtgctgtgcgccaaccacaccgagcccgtgaagggcttcctgggcagatacctgagaagaaagctgatcgagatcgagatcgagagaaacatcagaaacaacgacctggtgaagatcatcgactggatccccaagacctggcaccacctgaacagcttcctggagacccacagcagcagcgacgtgaccatcggccccagactgttcctgccctgccccatggacgtggagggcagcagagtgtggttcatggacctgtggaactacagcctggtgccctacatcctggaggccgtgagagagggcctgcagatgtacggcaagagaaccccctgggaggaccccagcaagtgggtgctggacacctacccctggagcagcgccaccctgccccaggagagccccgccctgctgcagctgagacccgaggacgtgggctacgagagctgcaccagcaccaaggaggccaccaccagcaagcacatcccccagaccgacaccgagggcgaccccctgatgaacatgctgatgaagctgcaggaggccgccaactacagcagcacccagagctgcgacagcgagagcaccagccaccacgaggacatcctggacagcagcctggagagcaccctgtag

SEQ ID NO: 334988 - protein, 215 aa, Artificial Sequence
  derived and/or modified sequence
MKRWVLCANHTEPVKGFLGRYLRRKLIEIEIERNIRNNDLVKIIDWIPKTWHHLNSFLETHSSSDVTIGPRLFLPCPMDVEGSRVWFMDLWNYSLVPYILEAVREGLQMYGKRTPWEDPSKWVLDTYPWSSATLPQESPALLQLRPEDVGYESCTSTKEATTSKHIPQTDTEGDPLMNMLMKLQEAANYSSTQSCDSESTSHHEDILDSSLESTL

SEQ ID NO: 334989 - protein, 151 aa, Artificial Sequence
  derived and/or modified sequence
MFSTPELQRLISGDNAEIDLEDLKKHTVYYGGFHGSHRVIIWLWDILASDFTPDERAMFLKFVTSCSRPPLLGFAYLKPPFSIRCVEVSDDQQGRQLDPSEPSEEGPTVLTAGEPASPRETAHGLSPLSAAPFSFLPQGRVPGVGVGTCCF

SEQ ID NO: 334990 - DNA, 456 bp, Artificial Sequence
  derived and/or modified sequence
atgttcagcacccccgagctgcagagactgatcagcggcgacaacgccgagatcgacctggaggacctgaagaagcacaccgtgtactacggcggcttccacggcagccacagagtgatcatctggctgtgggacatcctggccagcgacttcacccccgacgagagagccatgttcctgaagttcgtgaccagctgcagcagaccccccctgctgggcttcgcctacctgaagccccccttcagcatcagatgcgtggaggtgagcgacgaccagcagggcagacagctggaccccagcgagcccagcgaggagggccccaccgtgctgaccgccggcgagcccgccagccccagagagaccgcccacggcctgagccccctgagcgccgcccccttcagcttcctgccccagggcagagtgcccggcgtgggcgtgggcacctgctgcttctag

SEQ ID NO: 334991 - DNA, 456 bp, Artificial Sequence
  derived and/or modified sequence
atgttttcaactccagaactgcagcggctgattagtggcgataacgctgagatcgacctggaggatctgaaaaagcacacagtgtactatggaggtttccacggaagtcatagggtgatcatttggttgtgggatatactagcaagtgactttacgcccgatgagagggctatgttcctgaaattcgttacgagttgtagtcgcccacctctcctcgggttcgcctacctcaagccgcccttttcaattaggtgtgtggaagtgagcgatgaccaacagggaaggcagctggatccaagtgaaccctccgaagaggggcctacggtgttgaccgcaggggagcctgcctctccgcgagagacggcgcacggcctgtcccccctgtccgccgctcctttttcatttctgcctcagggtcgagttcctggcgttggagtgggaacctgttgcttttag

SEQ ID NO: 334992 - DNA, 456 bp, Artificial Sequence
  derived and/or modified sequence
atgttcagcaccccagagctgcagaggctcatcagcggggacaatgctgagattgacctggaggacctgaagaagcacacagtgtactacggcggcttccacggcagccacagggtcatcatctggctgtgggacatcctggccagtgacttcaccccagatgagcgggccatgttcctgaagtttgtgaccagctgcagcaggcctcccctgctgggctttgcctacctgaagccacccttcagcatccgctgtgtggaggtgtctgatgaccagcagggccggcagctggaccccagcgagcccagcgaggagggccccaccgtgctgacagctggggagcccgccagcccccgggagacagcccacggcctgagccccctgtctgctgcccccttctccttcctgccccagggccgggtgcctggggtgggcgtgggcacctgctgcttctag

SEQ ID NO: 334993 - DNA, 456 bp, Artificial Sequence
  derived and/or modified sequence
atgttcagcacccccgagctgcagcggctgatcagcggcgacaacgccgagatcgaccttgaggatctaaagaagcacactgtgtattacgggggcttccacgggagccacagggtgatcatctggctctgggacatcctcgccagcgattttacaccagatgagagggccatgttcttgaaattcgtgacgtcttgttctcgacctcccttactcggcttcgcatatctcaagccacccttctctatccgctgcgtagaagtgtccgatgaccagcagggacgacaactcgacccttctgaaccctccgaggagggccctaccgttcttacggccggggaaccggcgtcccccagagagacggcacacggattgagtcccctaagcgccgctccattctcattccttccgcagggcagagtcccaggtgtgggcgtaggcacctgctgcttctag

SEQ ID NO: 334994 - DNA, 456 bp, Artificial Sequence
  derived and/or modified sequence
atgttttcaacacctgagctgcagcgtctgatctctggagataacgctgagattgacctggaagacctgaagaaacatacagtctactacggcggattccacggtagccatagagtgataatatggctttgggacattctagcgagcgacttcacccccgacgaaagggctatgtttctgaaatttgtgaccagctgtagccggccaccacttttgggattcgcctatttgaagccgccattctcaatcaggtgtgttgaagtgagcgacgatcaacaaggaaggcagctcgatccttcagaaccatccgaggagggtccgacagttctgactgctggcgagcccgcttcgcctagggagaccgcacacggcttgtcccccctcagtgcagcgccttttagcttcctcccacaggggagggtgccaggcgtgggggtcggtacttgttgcttctag

SEQ ID NO: 334995 - DNA, 1230 bp, Artificial Sequence
  derived and/or modified sequence
actcaaataaaaaaccaaacagctgccctcattagcggattccgttccattatcaaacccgagtggatccgaatgttctcaactcctgaactgcagcgtctcatctctggcgacaatgctgagattgatctggaagatttaaagaagcacacagtctactacggtggtttccatggaagtcacagagtcatcatctggctctgggatattctggcctccgacttcacaccggatgagagagctatgtttctgaagttcgtgaccagctgctccagacccccgctcctgggattcgcctacctcaagcctccattctccatccgctgcgtggaggtgtcggacgatcagcaaggcaggcagctggacccctcagagccaagtgaggagggccccacagttctcacggcaggagaaccagccagccccagagagactgcccacggactcagccctctctcggcagcccctttctctttccttcctcagggaagggtacctggagtgggggtgggtacgtgctgtttttagtggcgtctggcctcaccagggctccagatctgaggcagcatgggagaaagtgagagagtgggctcaggaggcaggcaggcgcagactcgaatgctactcctaccccagcaggctgtgcacgtccaggctcgctgcttcatttcctcattggccaaaggagaaggaaagccttcagggttacggagctctgtgtgtctcaagcctggcccactgtgggtgctcaaatgagagtcctactccccataaaaacccagtggccgcctctgggtgtagctgcctctcatgatgcagtttgagcccgtgatgccaccttgtacaggaagctacacagtcctcggcctccatgcttaagggaaagttggcccaagtcatggtctgccaccggccacagcaccggtgaggagggaggagtgcattcagaaatgtttgggcacctaacagtttttacagcattctactttttgtcaattggttaaccagtaattcgctgtgaaccggaaggccccatttccaaaagcttacttagtgcaggaattctctgtgcaggccccagggagaaggggttccttctctggaagccagtcgtcttgtgtctggggcttgacctcgggtagtggtgccagggcagcgccctgcactctgcccagcatccagggactggccagatcccctccctgggctccctggccttggcatcagcct

SEQ ID NO: 334996 - DNA, 133 bp, Artificial Sequence
  derived and/or modified sequence
agcaaacaaacaaacaaacaaacaaactatgacaggaacaaaacgtcacatatcaacattaacaaagaatgtaaacagcctaaatgcttcacttaaaagttatagacaggggctgggcatggtggctcacgcc

SEQ ID NO: 334997 - protein, 708 aa, Artificial Sequence
  derived and/or modified sequence
MFTLSQTSRAWFIDRARQAREERLVQKERERAAVVIQAHVRSFLCRSRLQRDIRREIDDFFKADDPESTKRSALCIFKIARKLLFLFRIKEDNERFEKLCRSILSSMDAENEPKVWYVSLACSKDLTLLWIQQIKNILWYCCDFLKQLKPEILQDSRLITLYLTMLVTFTDTSTWKILRGKGESLRPAMNHICANIMGHLNQHGFYSVLQILLTRGLARPRPCLSKGTLTAAFSLALRPVIAAQFSDNLIRPFLIHIMSVPALVTHLSTVTPERLTVLESHDMLRKFIIFLRDQDRCRDVCESLEGCHTLCLMGNLLHLGSLSPRVLEEETDGFVSLLTQTLCYCRKYVSQKKSNLTHWHPVLGWFSQSVDYGLNESMHLITKQLQFLWGVPLIRIFFCDILSKKLLESQEPAHAQPASPQNVLPVKSLLKRAFQKSASVRNILRPVGGKRVDSAEVQKVCNICVLYQTSLTTLTQIRLQILTGLTYLDDLLPKLWAFICELGPHGGLKLFLECLNNDTEESKQLLAMLMLFCDCSRHLITILDDIEVYEEQISFKLEELVTISSFLNSFVFKMIWDGIVENAKGETLELFQSVHGWLMVLYERDCRRRFTPEDHWLRKDLKPSVLFQELDRDRKRAQLILQYIPHVIPHKNRVLLFRTMVTKEKEKLGLVETSSASPHVTHITIRRSRMLESLFECPWPLVINAESC

SEQ ID NO: 334998 - protein, 626 aa, Artificial Sequence
  derived and/or modified sequence
MGNAAGSAEQPAGPAAPPPKQHRFEKLMEYFRNEDSNIDFMVACMQFINIVVHSVENMNFRVFLQYEFTHLGLDLYLERLRLTESDKLQVQIQAYLDNIFDVGALLEDTETKNAVLEHMEELQEQVALLTERLRDAENESMAKIAELEKQLSQARKELETLRERFSESTAMGPSRRPPEPEKAPPAAPTRPSALELKVEELEEKGLIRILRGPGDAVSIEILPVAVATPSGGDAPTPGVPTGSPSPDLAPAAEPAPGAAPPPPPPPPGGPPDALGRRDSELGPGVKAKKPIQTKFRMPLLNWVALKPSQITGTVFTELNDEKVLQELDMSDFEEQFKTKSQGPSLDLSALKSKAAQKAPSKATLIEANRAKNLAITLRKGNLGAERICQAIEAYDLQALGLDFLELLMRFLPTEYERSLITRFEREQRPMEELSEEDRFMLCFSRIPRLPERMTTLTFLGNFPDTAQLLMPQLNAIIAASMSIKSSDKLRQILEIVLAFGNYMNSSKRGAAYGFRLQSLDALLEMKSTDRKQTLLHYLVKVIAEKYPQLTGFHSDLHFLDKAGSVSLDSVLADVRSLQRGLELTQREFVRQDDCMVLKEFLRANSPTMDKLLADSKTAQAVPTGGL

SEQ ID NO: 334999 - protein, 1463 aa, Artificial Sequence
  derived and/or modified sequence
MKKKTVCTLNMGDKKYEDMEGEENGDNTISTGLLYSEADRCPICLNCLLEKEVGFPESCNHVFCMTCILKWAETLASCPIDRKPFQAVFKFSALEGYVKVQVKKQLRETKDKKNENSFEKQVSCHENSKSCIRRKAIVREDLLSAKVCDLKWIHRNSLYSETGGKKNAAIKINKPQRSNWSTNQCFRNFFSNMFSSVSHSGESSFTYRAYCTEFIEASEISALIRQKRHELELSWFPDTLPGIGRIGFIPWNVETEVLPLISSVLPRTIFPTSTISFEHFGTSCKGYALAHTQEGEEKKQTSGTSNTRGSRRKPAMTTPTRRSTRNTRAETASQSQRSPISDNSGCDAPGNSNPSLSVPSSAESEKQTRQAPKRKSVRRGRKPPLLKKKLRSSVAAPEKSSSNDSVDEETAESDTSPVLEKEHQPDVDSSNICTVQTHVENQSANCLKSCNEQIEESEKHTANYDTEERVGSSSSESCAQDLPVLVGEEGEVKKLENTGIEANVLCLESEISENILEKGGDPLEKQDQISGLSQSEVKTDVCTVHLPNDFPTCLTSESKVYQPVSCPLSDLSENVESVVNEEKITESSLVEITEHKDFTLKTEELIESPKLESSEGEIIQTVDRQSVKSPEVQLLGHVETEDVEIIATCDTFGNEDFNNIQDSENNLLKNNLLNTKLEKSLEEKNESLTEHPRSTELPKTHIEQIQKHFSEDNNEMIPMECDSFCSDQNESEVEPSVNADLKQMNENSVTHCSENNMPSSDLADEKVETVSQPSESPKDTIDKTKKPRTRRSRFHSPSTTWSPNKDTPQEKKRPQSPSPRRETGKESRKSQSPSPKNESARGRKKSRSQSPKKDIARERRQSQSRSPKRDTTRESRRSESLSPRRETSRENKRSQPRVKDSSPGEKSRSQSRERESDRDGQRRERERRTRKWSRSRSHSRSPSRCRTKSKSSSFGRIDRDSYSPRWKGRWANDGWRCPRGNDRYRKNDPEKQNENTRKEKNDIHLDADDPNSADKHRNDCPNWITEKINSGPDPRTRNPEKLKESHWEENRNENSGNSWNKNFGSGWVSNRGRGRGNRGRGTYRSSFAYKDQNENRWQNRKPLSGNSNSSGSESFKFVEQQSYKRKSEQEFSFDTPADRSGWTSASSWAVRKTLPADVQNYYSRRGRNSSGPQSGWMKQEEETSGQDSSLKDQTNQQVDGSQLPINMMQPQMNVMQQQMNAQHQPMNIFPYPVGVHAPLMNIQRNPFNIHPQLPLHLHTGVPLMQVATPTSVSQGLPPPPPPPPPSQQVNYIASQPDGKQLQGIPSSSHVSNNMSTPVLPAPTAAPGNTGMVQGPSSGNTSSSSHSKASNAAVKLAESKVSVAVEASADSSKTDKKLQIQEKAAQEVKLAIKPFYQNKDITKEEYKEIVRKAVDKVCHSKSGEVNSTKVANLVKAYVDKYKYSRKGSQKKTLEEPVSTEKNIG

SEQ ID NO: 335000 - DNA, 5265 bp, Artificial Sequence
  derived and/or modified sequence
tggcttaagccgcgcggagcagcgcaacctgggtcgctccctgcttcgccgccgcctccggaccgagccagcggagtcagtgtcctagagaccctgtaacaccacaaagcggacgaaggagtccatgttggggaacttggcagcggagtgactgggacctgggaacctactgtggggccgcggccggaccgagcgcctcgacctcggtctgaggaaacccttttccaaagagaaatgaagaagaaaactgtatgtaccctaaatatgggagataagaagtatgaagacatggaaggtgaagaaaacggagataatactatttccactggtctgttgtacagtgaggctgacagatgcccaatatgtcttaattgtctattagaaaaggaagttggttttccagaaagctgtaatcatgtcttctgtatgacttgtattcttaaatgggcagagacactggcttcatgtcctattgaccgtaaaccttttcaggcagtgtttaaattcagtgcattggaaggttatgttaaggttcaagtaaaaaaacagctgagagaaacaaaagacaagaaaaatgaaaactcatttgagaaacaggtctcctgtcatgaaaattctaaaagctgtataagaagaaaagccatcgtaagagaagatctattaagtgcaaaagtttgtgacttgaagtggatacatagaaactctttatacagtgaaacaggaggaaagaaaaatgcagcaataaagataaataagcctcagagatcaaattggagtacaaatcagtgcttcagaaattttttctccaatatgttttcttctgttagccactctggagaatcttcctttacctatagagcttattgtacagaatttatagaagccagtgaaatcagtgcattgattaggcagaagagacatgaactggaattgtcatggtttcctgatacattacctggaattggaagaattggttttataccctggaatgttgaaacagaagtccttcctctcatttcttctgtgttgccaagaactatttttccaacaagtaccatatctttcgaacattttggtacttcttgcaagggatatgcattagcacatactcaagaaggggaagaaaagaagcaaacttctggtacatcaaataccagaggatcaagacgaaaacctgcaatgacaactcctacaaggaggtctacacgtaacacaagagctgaaacagccagtcagtctcagagatccccaatatcagacaattctgggtgtgatgccccaggtaacagtaatccatctttaagtgttccctcttcagctgagtcagaaaagcaaacaagacaggctccaaaacggaagtctgtaagaagaggaagaaaaccacctttactgaaaaagaaacttcggagctctgtagctgcccctgaaaaatcatcttccaatgattcagtagatgaagaaacagcagaatctgacacatcacctgtgttagaaaaagagcaccaaccagatgtagacagtagtaacatttgtactgtgcagactcatgtagaaaaccagtctgctaattgcttgaaaagttgcaatgagcaaatagaagaaagtgagaagcatactgcaaattatgatacagaggaaagagtaggatcttcatcttctgagtcttgtgctcaagatcttcctgtgctagttggtgaggaaggggaagttaaaaaactcgagaatacaggtatagaggctaatgttttgtgtttggaaagtgagatttctgaaaatattcttgaaaaaggaggtgatccattggaaaagcaagaccagatatctggactttcacaatcagaggtaaagacagatgtatgtacagttcatcttccaaatgattttcctacatgtttaacatctgaaagcaaagtgtaccaacctgtatcttgtcccctaagtgacttatctgagaatgtagagtcagtggttaatgaagaaaaaataacagagagttccctagtagaaattactgaacataaagattttacactaaaaacagaggagcttatagagagccccaagttagaatcttctgagggtgaaattatacagacagtggacagacaatctgttaagagcccagaggttcaattgcttgggcatgttgaaactgaagatgtagaaataattgcaacatgtgatacttttgggaatgaagatttcaataatattcaagactctgaaaataacttactaaaaaataatcttctgaacaccaaattggaaaaatctttagaagaaaagaatgaatcgctgaccgaacatcctagatctacagagttgcctaaaacacacattgaacagattcagaagcattttagtgaggacaacaatgaaatgatacctatggagtgtgattcattttgcagtgaccaaaatgaatctgaagttgaaccatctgtaaatgctgatcttaaacaaatgaatgaaaattctgtgacacactgttctgaaaataatatgccgtcttctgatcttgcggatgaaaaggttgaaactgtttctcaaccatctgaaagcccaaaagataccatagataaaaccaaaaagcctcgtactcgaagatctagatttcattctccatctacaacttggtcacccaacaaagacactccacaagaaaagaagcggccccagtctccatctcccagaagagaaactgggaaagaaagcaggaagtctcaatcaccatctcctaagaatgagtcagccagaggccggaaaaaatcccgttctcagtccccaaaaaaggatattgcaagagaaaggaggcaatctcagtctcggtctccaaaaagggatactactagggaaagcagaagatctgaatcactgtccccaagaagagaaacttctagagagaacaaaagatctcagccaagagtgaaagattcttccccaggagaaaaatccaggtcccagagcagagaacgagaaagtgatagagatgggcagaggagagagagagaaaggagaaccagaaagtggtctaggtccagatctcattctaggtccccctcaagatgtagaacaaaaagtaagagttcatcatttggtagaattgacagagatagttactctccccggtggaagggaagatgggcaaatgatggttggagatgtccacgaggaaatgatcggtacagaaagaatgacccagagaaacagaatgaaaatacaagaaaagaaaaaaatgacatccatctagatgctgatgatccaaattctgctgacaaacatagaaatgactgtcccaattggataacagaaaaaataaactctgggcctgatccaagaaccagaaatccagaaaagttgaaagagtctcattgggaagaaaatagaaatgaaaattcaggaaattcttggaataaaaactttggttctggttgggtatctaaccgtggtagaggcagaggcaaccgtggcagaggcacttacagaagtagttttgcctataaagatcagaatgaaaatcggtggcaaaatcgaaaacccctctcagggaattcaaacagttcagggagtgaatctttcaagtttgtggaacagcaatcctataagcgaaaaagtgaacaggagttctcatttgatacaccagcagatagatctggatggacatctgcatccagctgggccgtgagaaagactttgccagcagatgtacaaaactactactcacgacgaggcagaaattcttcaggtccacagtctggatggatgaaacaagaggaggaaacatctggacaggattctagcctaaaagaccaaacaaaccagcaagttgatggttctcagctacctataaatatgatgcaaccgcaaatgaatgtaatgcagcaacaaatgaatgcacaacaccagcctatgaatatcttcccatatccagtgggtgttcatgctcctttgatgaacatccaacgcaatccatttaacattcatcctcagctacccttgcatctccacacaggagtgcccctcatgcaggtagccactcctaccagtgtatctcagggactaccaccaccaccaccccctcccccaccatcccaacaagtcaactacattgcttcacaaccagatggaaagcaattgcagggtattcctagttcttctcatgtaagtaataacatgagtacaccagttttgcctgctccgacagcagccccaggaaatacgggaatggttcagggaccaagttctggtaatacttcgtcatcaagtcacagcaaagcctctaatgctgctgtaaaattggcagaaagcaaagtaagtgttgcagtggaagccagcgcagatagctcgaagacagacaagaaattgcaaattcaagaaaaagcagcacaagaggtaaaattggccatcaagccattttaccaaaataaagatatcaccaaggaagaatataaagaaattgtacggaaagcagtagataaagtttgtcatagtaagagtggagaagtaaattctactaaagtggcaaatctggttaaagcctatgtagacaaatacaaatattcacggaaggggagccaaaagaaaactctggaagaacctgtgtctactgaaaaaaacataggctgaaatggggaacgctgtcaaggacattatcaggatatctgcaaagtgcaatttcaacatgtaccattaactgaaaatcatacataactgtgattgaaatttggttttgataaaattatttttttaacataggatatgatgttttgttctaaataaatataggtctgcactgcaacttctgtatccttccttcccctccaccctcccccacaaaattcaagggaaagtaaagggtttaaaggaatgtgcatctttactaggactgtgttatagtgtggatactggaaaatgtatagctttttgattagggcaatggagtgcataaattagaaacttctaagtgcactggttttcaaagagatatatataatgcatttattctgtcaggttaaaatgtaaagtatgatctttatgattttttccctctaattatagaaagttaaataatgtattaccatgaaaaatgtttctaatattaaatagaacatatcagttgcaaagttcctaatgtgtatttttaaagcacatatctgaataaattgcctagatagaaaaaaaattatcacgagtaaaatttagtgttcaaaacattgagacactcttcacctattgtatgaccaaataaaggttatgctgcttgtt

SEQ ID NO: 335001 - DNA, 4649 bp, Artificial Sequence
  derived and/or modified sequence
gaaagtgccagaaaagcgacgtcctcagggcgggagcaggggacgccgcaacgtagtctgcgagaatgcaggaaggcggcagtgaagcggtcggtcggcggggccgcggcaaagtggggaggaaactcatcccgggcaggcgtcagggtggctggagagcgcagcacgcgcgaacagaacgggggcaggcgacaggaaaacgtgtgagcgcgcggctgaaagcgactgggacctgggaaacccttttccaaagagaaatgaagaagaaaactgtatgtaccctaaatatgggagataagaagtatgaagacatggaaggtgaagaaaacggagataatactatttccactggtctgttgtacagtgaggctgacagatgcccaatatgtcttaattgtctattagaaaaggaagttggttttccagaaagctgtaatcatgtcttctgtatgacttgtattcttaaatgggcagagacactggcttcatgtcctattgaccgtaaaccttttcaggcagtgtttaaattcagtgcattggaaggttatgttaaggttcaagtaaaaaaacagctgagagaaacaaaagacaagaaaaatgaaaactcatttgagaaacaggtctcctgtcatgaaaattctaaaagctgtataagaagaaaagccatcgtaagagaagatctattaagtgcaaaagtttgtgacttgaagtggatacatagaaactctttatacagtgaaacaggaggaaagaaaaatgcagcaataaagataaataagcctcagagatcaaattggagtacaaatcagtgcttcagaaattttttctccaatatgttttcttctgttagccactctggagaatcttcctttacctatagagcttattgtacagaatttatagaagccagtgaaatcagtgcattgattaggcagaagagacatgaactggaattgtcatggtttcctgatacattacctggaattggaagaattggttttataccctggaatgttgaaacagaagtccttcctctcatttcttctgtgttgccaagaactatttttccaacaagtaccatatctttcgaacattttggtacttcttgcaagggatatgcattagcacatactcaagaaggggaagaaaagaagcaaacttctggtacatcaaataccagaggatcaagacgaaaacctgcaatgacaactcctacaaggaggtctacacgtaacacaagagctgaaacagccagtcagtctcagagatccccaatatcagacaattctgggtgtgatgccccaggtaacagtaatccatctttaagtgttccctcttcagctgagtcagaaaagcaaacaagacaggctccaaaacggaagtctgtaagaagaggaagaaaaccacctttactgaaaaagaaacttcggagctctgtagctgcccctgaaaaatcatcttccaatgattcagtagatgaagaaacagcagaatctgacacatcacctgtgttagaaaaagagcaccaaccagatgtagacagtagtaacatttgtactgtgcagactcatgtagaaaaccagtctgctaattgcttgaaaagttgcaatgagcaaatagaagaaagtgagaagcatactgcaaattatgatacagaggaaagagtaggatcttcatcttctgagtcttgtgctcaagatcttcctgtgctagttggtgaggaaggggaagttaaaaaactcgagaatacaggtatagaggctaatgttttgtgtttggaaagtgagatttctgaaaatattcttgaaaaaggaggtgatccattggaaaagcaagaccagatatctggactttcacaatcagaggtaaagacagatgtatgtacagttcatcttccaaatgattttcctacatgtttaacatctgaaagcaaagtgtaccaacctgtatcttgtcccctaagtgacttatctgagaatgtagagtcagtggttaatgaagaaaaaataacagagagttccctagtagaaattactgaacataaagattttacactaaaaacagaggagcttatagagagccccaagttagaatcttctgagggtgaaattatacagacagtggacagacaatctgttaagagcccagaggttcaattgcttgggcatgttgaaactgaagatgtagaaataattgcaacatgtgatacttttgggaatgaagatttcaataatattcaagactctgaaaataacttactaaaaaataatcttctgaacaccaaattggaaaaatctttagaagaaaagaatgaatcgctgaccgaacatcctagatctacagagttgcctaaaacacacattgaacagattcagaagcattttagtgaggacaacaatgaaatgatacctatggagtgtgattcattttgcagtgaccaaaatgaatctgaagttgaaccatctgtaaatgctgatcttaaacaaatgaatgaaaattctgtgacacactgttctgaaaataatatgccgtcttctgatcttgcggatgaaaaggttgaaactgtttctcaaccatctgaaagcccaaaagataccatagataaaaccaaaaagcctcgtactcgaagatctagatttcattctccatctacaacttggtcacccaacaaagacactccacaagaaaagaagcggccccagtctccatctcccagaagagaaactgggaaagaaagcaggaagtctcaatcaccatctcctaagaatgagtcagccagaggccggaaaaaatcccgttctcagtccccaaaaaaggatattgcaagagaaaggaggcaatctcagtctcggtctccaaaaagggatactactagggaaagcagaagatctgaatcactgtccccaagaagagaaacttctagagagaacaaaagatctcagccaagagtgaaagattcttccccaggagaaaaatccaggtcccagagcagagaacgagaaagtgatagagatgggcagaggagagagagagaaaggagaaccagaaagtggtctaggtccagatctcattctaggtccccctcaagatgtagaacaaaaagtaagagttcatcatttggtagaattgacagagatagttactctccccggtggaagggaagatgggcaaatgatggttggagatgtccacgaggaaatgatcggtacagaaagaatgacccagagaaacagaatgaaaatacaagaaaagaaaaaaatgacatccatctagatgctgatgatccaaattctgctgacaaacatagaaatgactgtcccaattggataacagaaaaaataaactctgggcctgatccaagaaccagaaatccagaaaagttgaaagagtctcattgggaagaaaatagaaatgaaaattcaggaaattcttggaataaaaactttggttctggttgggtatctaaccgtggtagaggcagaggcaaccgtggcagaggcacttacagaagtagttttgcctataaagatcagaatgaaaatcggtggcaaaatcgaaaacccctctcagggaattcaaacagttcagggagtgaatctttcaagtttgtggaacagcaatcctataagcgaaaaagtgaacaggagttctcatttgatacaccagcagatagatctggatggacatctgcatccagctgggccgtgagaaagactttgccagcagatgtacaaaactactactcacgacgaggcagaaattcttcaggtccacagtctggatggatgaaacaagaggaggaaacatctggacaggattctagcctaaaagaccaaacaaaccagcaagttgatggttctcagctacctataaatatgatgcaaccgcaaatgaatgtaatgcagcaacaaatgaatgcacaacaccagcctatgaatatcttcccatatccagtgggtgttcatgctcctttgatgaacatccaacgcaatccatttaacattcatcctcagctacccttgcatctccacacaggagtgcccctcatgcaggtagccactcctaccagtgtatctcagggactaccaccaccaccaccccctcccccaccatcccaacaagtcaactacattgcttcacaaccagatggaaagcaattgcagggtattcctagttcttctcatgtaagtaataacatgagtacaccagttttgcctgctccgacagcagccccaggaaatacgggaatggttcagggaccaagttctggtaatacttcgtcatcaagtcacagcaaagcctctaatgctgctgtaaaattggcagaaagcaaagtaagtgttgcagtggaagccagcgcagatagctcgaagacagacaagaaattgcaaattcaagaaaaagcagcacaagaggtaaaattggccatcaagccattttaccaaaataaagatatcaccaaggaagaatataaagaaattgtacggaaagcagtagataaagtttgtcatagtaagagtggagaagtaaattctactaaagtggcaaatctggttaaagcctatgtagacaaatacaaatattcacggaaggggagccaaaagaaaactctggaagaacctgtgtctactgaaaaaaacataggctga

SEQ ID NO: 335002 - DNA, 51 bp, Artificial Sequence
  derived and/or modified sequence
agaatggaaaggaatcgaaacgaaaggaatggagacagatggaatggaatg

SEQ ID NO: 335003 - protein, 379 aa, Artificial Sequence
  derived and/or modified sequence
MVLASFSSSVVQLYLTMGFITGLGLAFNLQPALTIIGKYFYRKRPMANGLAMAGSPVFLSSLAPFNQYLFNTFGWKGSFLILGSLLLNACVAGSLMRPLGPNQTTSKSKNKTGKTEDDSSPKKIKTKKSTWEKVNKYLDFSLFKHRGFLIYLSGNVIMFLGFFAPIIFLAPYAKDQGIDEYSAAFLLSVMAFVDMFARPSVGLIANSKYIRPRIQYFFSFAIMFNGVCHLLCPLAQDYTSLVLYAVFFGLGFGSVSSVLFETLMDLVGAPRFSSAVGLVTIVECGPVLLGPPLAGKLVDLTGEYKYMYMSCGAIVVAASVWLLIGNAINYRLLAKERKEENARQKTRESEPLSKSKHSEDVNVKVSNAQSVTSERETNI

SEQ ID NO: 335004 - DNA, 1140 bp, Artificial Sequence
  derived and/or modified sequence
atggtcctggctagtttctcatccagcgtggttcagctgtatctgaccatgggcttcataacaggcctgggcctggctttcaacctgcagcctgccctgactataatcggcaaatatttctaccgaaagaggcctatggctaacggcctggccatggccggaagcccagtatttttgagctcattggccccttttaatcagtacctcttcaacacctttgggtggaaaggcagttttctgatattaggctctctgctgttgaatgcatgtgtagcaggtagcctgatgaggccactgggtccaaatcagacaacgagcaaaagtaagaacaagaccggtaaaacagaggacgacagcagtcctaaaaaaataaagactaagaagtccacttgggagaaggtcaataagtatctggatttcagcctgtttaaacatagaggatttctcatctatctgtctggaaacgtgataatgttcctgggattcttcgcacccatcatctttttagctccttatgctaaagaccaggggatcgatgaatactcggctgcttttctcttatccgtaatggcctttgtcgacatgttcgcaaggccatcagtcggcctcatcgctaatagcaagtatatacgtcccagaatacaatacttcttttctttcgccataatgttcaacggagtgtgccacctgttatgcccgctagcccaggactatacatccctcgtgctctatgccgtgttttttggactgggattcgggtcagtgagtagtgtcctgtttgagactcttatggatttagtcggggcaccaaggttttcctcagccgtgggacttgtgactattgttgagtgtgggccagtattgttgggtccccccctcgctgggaaattggttgacctgaccggggaatacaagtatatgtatatgagctgtggcgcaatcgtcgtggcagcctcggtgtggctactcatagggaatgccataaactatcgcctgttagccaaagaacgcaaggaggaaaacgccaggcagaaaacccgagagtctgagccattaagcaaatctaaacattctgaagatgtgaacgttaaggtgtcaaatgcacagtccgtcaccagcgagagagaaacgaacatatag

SEQ ID NO: 335005 - DNA, 1140 bp, Artificial Sequence
  derived and/or modified sequence
atggtgctggccagcttcagcagctctgtggtgcagctgtacctgaccatgggcttcatcaccggcctgggcctggccttcaacctgcagcctgccctgaccatcatcggcaagtacttctacaggaagaggcccatggccaacggcctggccatggccggcagccctgtgttcctgagcagcctggcccccttcaaccagtacctgttcaacaccttcggctggaagggcagcttcctgatcctgggcagcctgctgctgaatgcctgtgtggccggcagcctgatgaggcccctgggccccaaccagaccaccagcaagagcaagaacaagacaggcaagacagaagatgacagcagccccaagaagatcaagaccaagaagagcacctgggagaaggtgaacaagtacctggacttcagcctcttcaagcaccggggcttcctgatctacctgtctggaaatgtcatcatgttcctgggcttctttgcccccatcatcttcctggccccctatgccaaggaccagggcattgatgagtacagcgctgccttcctgctgtctgtgatggcctttgtggacatgtttgcccggcccagcgtgggcctcatcgccaacagcaagtacatccggccccgcatccagtacttcttctcctttgccatcatgtttaatggagtgtgccacctgctgtgccccctggcccaggactacaccagcctggtgctgtatgctgtgttcttcggcctgggcttcggctctgtgtcctctgtgctgtttgagaccctgatggacctggtgggcgccccccgcttcagcagcgctgtgggcctggtgaccatcgtggagtgtggccctgtgctgctgggcccccccctggccggcaagctggtggacctgactggagagtacaagtacatgtacatgagctgtggggccatcgtggtggccgcctctgtgtggctgctgattggaaatgccatcaactaccgcctgctggccaaggagaggaaggaggagaatgcccggcagaagacccgggagagcgagcccctgagcaagagcaagcacagtgaagatgtgaatgtgaaggtgtccaatgcccagagcgtgaccagcgagcgggagaccaacatctag

SEQ ID NO: 335006 - DNA, 1140 bp, Artificial Sequence
  derived and/or modified sequence
atggtgctggccagcttcagcagcagcgtggtgcagctgtacctgacaatgggattcattaccggcctgggattagcgtttaatctacagcccgctctcacaatcatcggcaaatacttttatcgaaagaggccaatggcaaatggactggccatggcaggcagtcccgtgttcctttcctccttggcgccatttaatcagtatctttttaacactttcggctggaagggcagtttcttgatcctgggtagcctgctgcttaatgcatgcgttgcaggaagcttgatgcgcccgctgggcccaaatcagaccacatccaagagcaaaaataagaccggtaagacagaagacgattcctcccccaaaaaaatcaaaaccaagaagtccacctgggagaaggtcaacaaatatctcgacttcagcttgttcaagcatcgagggtttttaatttatctgtccggcaacgtgatcatgttccttggcttttttgctcctataatctttttggctccgtacgctaaggatcaaggaattgatgaatacagcgcggcattcctcctctccgtaatggcattcgtcgatatgttcgctcgtccctcagtaggactcatcgctaactccaagtatatccggccacgcatccagtacttcttcagttttgctataatgttcaatggcgtctgccacttgctatgccccctggcccaagattacactagtctcgtcctgtatgctgtcttcttcggactgggctttggcagcgtgtcctccgtgcttttcgaaacactgatggacctagtgggagctccccgtttctctagtgctgtcggtctggtgacaatagtggagtgcggacccgtgctgttgggcccccccctcgccggcaaactcgtagatttaaccggggaatataagtatatgtacatgagttgtggtgccatcgtggtagccgcctcagtgtggctgcttattggaaacgcgatcaactatcgcctcttggccaaggagagaaaggaagagaatgcgagacaaaaaactagagagtctgagcccctttccaagtccaagcattctgaagacgtcaatgtaaaggtctccaacgcccagagtgtgacgtccgagcgcgagactaatatctag

SEQ ID NO: 335007 - DNA, 1140 bp, Artificial Sequence
  derived and/or modified sequence
atggtgctggcaagctttagcagcagcgtggtccaactgtacctaaccatgggctttataaccgggctaggattggccttcaacctccagcctgcactgaccatcattggaaaatacttctaccgcaagcgcccaatggccaacgggctggccatggctggatctcctgtctttctctccagtcttgccccattcaaccagtacctgtttaacacctttgggtggaagggcagtttcctgatacttggatcccttctcctcaacgcatgcgttgcagggtccctcatgcgccctctgggcccaaaccagaccacttccaagagtaagaacaagaccggcaagactgaggacgacagttctcctaagaagatcaaaaccaaaaagtcaacgtgggagaaagtcaataaatacctggacttcagcctattcaagcatcggggattcttgatatatctgtctggaaacgttattatgttcctagggttctttgccccaatcatatttctcgcaccatacgcgaaagaccagggcatcgacgagtattccgcagcattcttgctgtcggttatggctttcgttgatatgttcgccagaccctccgtcggacttatcgccaacagcaagtacatcagacctcgcatccaatacttcttctcctttgccatcatgtttaacggagtctgtcatttgctttgtccgctagcccaggattacaccagcttagtgctttacgccgtgtttttcggactgggcttcggatcagtctcctccgttctctttgagaccctgatggatcttgtcggcgcacccaggttctcatccgcagtggggctggttacaattgtcgagtgcggccctgtgcttctggggccacccctggccggaaaactcgtcgacttgaccggcgaatataaatatatgtacatgtcctgcggggctatcgtagtggcagccagcgtgtggctgcttataggtaacgccatcaactataggctactggccaaagaacgaaaagaggaaaatgcaaggcaaaaaacgagggagagtgagccattgtccaaatcaaaacacagcgaggatgtgaatgtgaaggtaagtaatgctcagtctgtcacctccgaacgcgaaaccaacatctag

SEQ ID NO: 335008 - DNA, 1140 bp, Artificial Sequence
  derived and/or modified sequence
atggtgctggccagcttcagcagcagcgtggtgcagctgtacctgaccatgggcttcatcaccggcctgggcctggccttcaacctgcagcccgccctgaccatcatcggcaagtacttctacagaaagagacccatggccaacggcctggccatggccggcagccccgtgttcctgagcagcctggcccccttcaaccagtacctgttcaacaccttcggctggaagggcagcttcctgatcctgggcagcctgctgctgaacgcctgcgtggccggcagcctgatgagacccctgggccccaaccagaccaccagcaagagcaagaacaagaccggcaagaccgaggacgacagcagccccaagaagatcaagaccaagaagagcacctgggagaaggtgaacaagtacctggacttcagcctgttcaagcacagaggcttcctgatctacctgagcggcaacgtgatcatgttcctgggcttcttcgcccccatcatcttcctggccccctacgccaaggaccagggcatcgacgagtacagcgccgccttcctgctgagcgtgatggccttcgtggacatgttcgccagacccagcgtgggcctgatcgccaacagcaagtacatcagacccagaatccagtacttcttcagcttcgccatcatgttcaacggcgtgtgccacctgctgtgccccctggcccaggactacaccagcctggtgctgtacgccgtgttcttcggcctgggcttcggcagcgtgagcagcgtgctgttcgagaccctgatggacctggtgggcgcccccagattcagcagcgccgtgggcctggtgaccatcgtggagtgcggccccgtgctgctgggcccccccctggccggcaagctggtggacctgaccggcgagtacaagtacatgtacatgagctgcggcgccatcgtggtggccgccagcgtgtggctgctgatcggcaacgccatcaactacagactgctggccaaggagagaaaggaggagaacgccagacagaagaccagagagagcgagcccctgagcaagagcaagcacagcgaggacgtgaacgtgaaggtgagcaacgcccagagcgtgaccagcgagagagagaccaacatctag

SEQ ID NO: 335009 - protein, 329 aa, Artificial Sequence
  derived and/or modified sequence
MALTPPLLLLSAGTMTLGSPRKGLLMLLMALVTQGKGRYGEVWRGLWHGESVAVKIFSSRDEQSWFRETEIYNTVLLRHDNILGFIASDMTSRNSSTQLWLITHYHEHGSLYDFLQRQTLEPHLALRLAVSAACGLAHLHVEIFGTQGKPAIAHRDFKSRNVLVKSNLQCCIADLGLAVMHSQGSDYLDIGNNPRVGTKRYMAPEVLDEQIRTDCFESYKWTDIWAFGLVLWEIARRTIVNGIVEDYRPPFYDVVPNDPSFEDMKKVVCVDQQTPTIPNRLAADPVLSGLAQMMRECWYPNPSARLTALRIKKTLQKISNSPEKPKVIQ

SEQ ID NO: 335010 - protein, 159 aa, Artificial Sequence
  derived and/or modified sequence
MALTPPLLLLSAGTMTLGSPRKGLLMLLMALVTQGDPVKPSRGPLVTCTCESPHCKGPTCRGAWCTVVLVREEGRHPQEHRGCGNLHRELCRGRPTEFVNHYCCDSHLCNHNVSLVLEGKGRYGEVWRGLWHGESVAVKIFSSRDEQSWFRETEIYNTV

SEQ ID NO: 335011 - DNA, 990 bp, Artificial Sequence
  derived and/or modified sequence
atggcattgacaccacccttgctgctgctcagcgcggggacaatgacactgggcagtcctaggaaaggtctgctgatgctgctaatggccctggtgactcaggggaagggccgatacggcgaggtgtggcggggactgtggcacggagagtctgtcgcggtgaagattttttcctctagggacgaacagtcttggttccgcgagactgagatctacaatactgtcctgctcaggcatgataacatcctgggatttattgcctccgacatgacgagccggaacagctccactcagctctggctcataacccactatcacgaacacggtagtctgtatgattttctccagcggcagacactagaacctcacctggcactccggctggcagtgtccgctgcatgcggcctcgcacatttacatgtcgagattttcggaacccagggtaagccagcaatcgctcatcgagacttcaagtcccggaacgtgctagtgaagtcaaacttacagtgctgtatagccgatttaggcttggctgtcatgcatagccagggttctgattatctggatatcggtaacaaccccagagttggaacaaaacggtatatggcccctgaggtcttagacgaacagattagaactgactgcttcgagtcatacaagtggactgatatttgggccttcgggcttgtcttatgggaaatcgcaaggagaaccatcgttaatggcattgtggaagattaccgacctcccttctacgacgtggtacctaacgacccttcattcgaagacatgaagaaggtcgtgtgcgttgatcagcaaaccccaaccatcccaaataggctcgcagccgaccctgtcctgagcggactcgcccagatgatgcgcgagtgctggtatcccaaccctagtgcgagactgaccgctctaagaattaagaaaaccttgcaaaagataagtaacagccccgagaagcccaaggtgattcaatag

SEQ ID NO: 335012 - DNA, 480 bp, Artificial Sequence
  derived and/or modified sequence
atggctctaactcctccgttactcctgttgagcgcagggacaatgacactgggaagtccacgaaagggcctgcttatgctgctgatggccctggttactcagggggatcccgtcaaaccatccagaggcccccttgtaacttgcacgtgtgagtccccccattgcaaggggccaacatgcagaggcgcctggtgtactgttgtgctcgttcgcgaagagggccggcacccccaagagcatagagggtgcggaaatctccatcgtgagttatgcagaggccggcccactgaattcgtgaaccactattgttgcgattctcatctgtgcaaccacaatgtctctctggtcctggagggtaaaggccgttatggtgaggtttggagaggtctgtggcatggcgagtcggtggcggtaaaaattttcagctcaagagacgagcagtcttggtttagagaaacggaaatatataatacagtttag

SEQ ID NO: 335013 - DNA, 990 bp, Artificial Sequence
  derived and/or modified sequence
atggccctgaccccacccctgctgctgctgtctgctggcaccatgaccctgggcagccccaggaagggcctgctgatgctgctgatggccctggtgacccagggcaagggccgctatggagaggtgtggaggggcctgtggcacggggagagcgtggccgtgaagatcttcagcagcagagatgagcagagctggttccgggagacagagatctacaacacagtgctgctgcggcatgacaacatcctgggcttcatcgccagtgacatgaccagcaggaacagcagcacccagctgtggctgatcacccactaccacgagcacggcagcctgtatgacttcctgcagaggcagaccctggagccccacctggccctgcggctggccgtgtctgctgcctgtggcctggcccacctgcacgtggagatcttcggcacccagggcaagccagccatcgcccaccgggacttcaagagcagaaatgtgctggtgaagagcaacctgcagtgctgcatcgctgacctgggcctggccgtgatgcacagccagggcagtgactacctggacatcggcaacaacccccgggtgggcaccaagcgctacatggcccctgaggtgctggatgagcagatcagaacagactgctttgagagctacaagtggacagacatctgggccttcggcctggtgctgtgggagatcgcccggaggaccatcgtgaatggaattgtggaggactacagaccacccttctatgatgtggtgcccaatgaccccagctttgaggacatgaagaaggtggtgtgtgtggaccagcagacccccaccatccccaaccggctggccgctgaccctgtgctgagcggcctggcccagatgatgagggagtgctggtaccccaaccccagcgcccggctgacagccctgcgcatcaagaagaccctgcagaagatcagcaacagccctgagaagcccaaggtgatccagtag

SEQ ID NO: 335014 - DNA, 480 bp, Artificial Sequence
  derived and/or modified sequence
atggccctgaccccacccctgctgctgctgtctgctggcaccatgaccctgggcagccccaggaagggcctgctgatgctgctgatggccctggtgacccagggcgaccctgtgaagcccagccggggccccctggtgacctgcacctgtgagagcccccactgcaagggccccacctgccgcggggcctggtgcaccgtggtgctggtgcgggaggagggccgccacccccaggagcaccggggctgcggcaacctgcaccgggagctgtgccggggccggcccacagaatttgtgaaccactactgctgtgacagccacctgtgcaaccacaacgtgtccctggtgctggagggcaagggccgctatggagaggtgtggaggggcctgtggcacggggagagcgtggccgtgaagatcttcagcagcagagatgagcagagctggttccgggagacagagatctacaacacagtgtag

SEQ ID NO: 335015 - DNA, 990 bp, Artificial Sequence
  derived and/or modified sequence
atggccctgaccccccccctgctgctgctgagcgccggcaccatgactttgggaagccctcggaaaggactgttgatgctgctgatggctctggtaacccaagggaagggacgttacggagaggtatggagaggcctctggcatggagagagcgtcgctgtcaaaatattttcctctagggatgaacagagctggtttcgggaaacggagatctataacacagtgctgctgcggcacgataatatcttgggtttcatcgcatcagacatgacaagtcgtaacagttcaacacagctctggctgatcacccactaccacgaacacggctccctctatgattttcttcagaggcagacactggagccacacttagcccttcgtctggccgtgtcagctgcatgcggtttggcccatttacacgttgagatttttggaacacagggcaagccagccatagctcaccgtgatttcaaatctcggaacgttctggtgaagtccaacctgcagtgttgcatagctgatctaggattagccgtcatgcactcccagggcagtgactaccttgatatcggcaacaacccacgagttgggacaaaacggtacatggctcccgaggtgttagacgagcagatacgcactgactgttttgaaagttataagtggacggacatttgggcctttggactcgtcttatgggagatagcccggagaacgatagtgaatggcatagtggaggattaccggcctcctttttacgacgttgtccccaacgacccctctttcgaggatatgaaaaaagtagtttgtgtcgaccagcagaccccgacaatcccaaacaggctggcggcagatccggttctgagcggccttgcgcagatgatgcgggagtgctggtacccgaatccctctgctaggctgaccgctctcagaattaagaagacactgcagaagatcagcaacagccccgagaaaccgaaggtaattcagtag

SEQ ID NO: 335016 - DNA, 480 bp, Artificial Sequence
  derived and/or modified sequence
atggccctgaccccccccctgctgctgctgagcgccggcaccatgacattggggagtcctcgcaaggggctgctgatgctgctcatggcactggtaacacagggagacccagtcaagcctagccggggccctctggtgacgtgtacttgtgagagtccacattgtaagggacccacatgtcgcggagcctggtgtaccgttgtgttagtgcgcgaggaggggcgacaccctcaggagcaccgcggatgcggtaatttgcatcgcgaactgtgcaggggaagaccaacagagttcgtgaaccactattgctgtgacagtcacttgtgtaatcacaatgtgagtctggtgctggaaggcaaaggacggtatggagaggtgtggcgtgggctgtggcatggagaaagcgttgcagtgaagatttttagtagtagagatgagcagagttggttccgagagacagagatttataataccgtatag

SEQ ID NO: 335017 - DNA, 990 bp, Artificial Sequence
  derived and/or modified sequence
atggctctcacaccccctctccttcttttatctgctggcacgatgacacttggtagccctagaaaggggttgttgatgctactcatggcattagtcacacaaggcaaaggtaggtacggggaggtctggcgcggtttatggcacggggagagtgtcgccgtgaagatcttctcttcacgcgacgagcagagttggttcagagaaacagaaatttacaacacagtgctgctgcgccatgacaacatcctgggtttcattgcgtctgatatgacaagtagaaattcctccacgcagctgtggctgatcacccattatcatgaacacggctctctctatgacttcctgcagcggcagacactggagccccaccttgctcttcgcctggccgtgagtgcagcctgcggacttgcccatctgcacgtcgagatatttggcacacaagggaagccggcaatcgcccatcgcgactttaagagtcggaacgtgctcgtcaaatcgaacctccagtgctgtattgcagatctgggccttgcggtgatgcattcccaaggcagcgattacctggatataggcaacaatcccagggtcggaacgaagcgttacatggcaccagaggttctcgacgagcagatcaggacagattgtttcgagagctataaatggacagacatttgggccttcggactggtgctgtgggagatcgcccgacggacgatagtgaatggaatagtcgaggactatcgtcctccgttttacgacgttgtgcccaacgatcctagctttgaggacatgaagaaggtggtttgcgtagatcagcaaacccctactatcccaaatagattggccgctgatcccgttttaagcggcctggctcagatgatgagagaatgctggtaccccaatccatccgctcgacttaccgccctacgcattaaaaaaactctacagaagatatctaatagtccagaaaaacctaaggtgatacagtag

SEQ ID NO: 335018 - DNA, 480 bp, Artificial Sequence
  derived and/or modified sequence
atggccttaacaccacctttgctcctactaagcgcaggaacaatgactctgggatcgcccagaaagggcctcctgatgttgctgatggcgttggtgactcagggtgatccggttaaaccatcccggggacccttagtaacatgcacctgcgaatctccacattgtaagggacccacgtgcaggggtgcctggtgtaccgtggttctggtacgcgaagaaggccgtcatcctcaagagcacagaggctgcggcaaccttcaccgagagctgtgccgagggcgacccaccgagttcgtgaaccactactgttgtgattcccatttgtgtaatcacaacgtgagcctggtgctcgaggggaaaggcagatacggggaagtctggcgcggactctggcacggggagagcgtcgccgtgaagatcttttccagccgcgacgagcaaagctggtttcgcgagacagaaatttacaacacggtatag

SEQ ID NO: 335019 - DNA, 990 bp, Artificial Sequence
  derived and/or modified sequence
atggccctgaccccccccctgctgctgctgagcgccggcaccatgaccctgggcagccccagaaagggcctgctgatgctgctgatggccctggtgacccagggcaagggcagatacggcgaggtgtggagaggcctgtggcacggcgagagcgtggccgtgaagatcttcagcagcagagacgagcagagctggttcagagagaccgagatctacaacaccgtgctgctgagacacgacaacatcctgggcttcatcgccagcgacatgaccagcagaaacagcagcacccagctgtggctgatcacccactaccacgagcacggcagcctgtacgacttcctgcagagacagaccctggagccccacctggccctgagactggccgtgagcgccgcctgcggcctggcccacctgcacgtggagatcttcggcacccagggcaagcccgccatcgcccacagagacttcaagagcagaaacgtgctggtgaagagcaacctgcagtgctgcatcgccgacctgggcctggccgtgatgcacagccagggcagcgactacctggacatcggcaacaaccccagagtgggcaccaagagatacatggcccccgaggtgctggacgagcagatcagaaccgactgcttcgagagctacaagtggaccgacatctgggccttcggcctggtgctgtgggagatcgccagaagaaccatcgtgaacggcatcgtggaggactacagaccccccttctacgacgtggtgcccaacgaccccagcttcgaggacatgaagaaggtggtgtgcgtggaccagcagacccccaccatccccaacagactggccgccgaccccgtgctgagcggcctggcccagatgatgagagagtgctggtaccccaaccccagcgccagactgaccgccctgagaatcaagaagaccctgcagaagatcagcaacagccccgagaagcccaaggtgatccagtag

SEQ ID NO: 335020 - DNA, 480 bp, Artificial Sequence
  derived and/or modified sequence
atggccctgaccccccccctgctgctgctgagcgccggcaccatgaccctgggcagccccagaaagggcctgctgatgctgctgatggccctggtgacccagggcgaccccgtgaagcccagcagaggccccctggtgacctgcacctgcgagagcccccactgcaagggccccacctgcagaggcgcctggtgcaccgtggtgctggtgagagaggagggcagacacccccaggagcacagaggctgcggcaacctgcacagagagctgtgcagaggcagacccaccgagttcgtgaaccactactgctgcgacagccacctgtgcaaccacaacgtgagcctggtgctggagggcaagggcagatacggcgaggtgtggagaggcctgtggcacggcgagagcgtggccgtgaagatcttcagcagcagagacgagcagagctggttcagagagaccgagatctacaacaccgtgtag

SEQ ID NO: 335021 - DNA, 1356 bp, Artificial Sequence
  derived and/or modified sequence
aaaaaaaactctgtgatttcctctgggcaggagggagccacggccagcggctgtcacacttcatggctcttactccacctctcttgctcctctctgcagggaccatgaccttgggctcccccaggaaaggccttctgatgctgctgatggccttggtgacccagggaaaaggccgctatggcgaagtgtggcggggcttgtggcacggtgagagtgtggccgtcaagatcttctcctcgagggatgaacagtcctggttccgggagactgagatctataacacagtgttgctcagacacgacaacatcctaggcttcatcgcctcagacatgacctcccgcaactcgagcacgcagctgtggctcatcacgcactaccacgagcacggctccctctacgactttctgcagagacagacgctggagccccatctggctctgaggctagctgtgtccgcggcatgcggcctggcgcacctgcacgtggagatcttcggtacacagggcaaaccagccattgcccaccgcgacttcaagagccgcaatgtgctggtcaagagcaacctgcagtgttgcatcgccgacctgggcctggctgtgatgcactcacagggcagcgattacctggacatcggcaacaacccgagagtgggcaccaagcggtacatggcacccgaggtgctggacgagcagatccgcacggactgctttgagtcctacaagtggactgacatctgggcctttggcctggtgctgtgggagattgcccgccggaccatcgtgaatggcatcgtggaggactatagaccacccttctatgatgtggtgcccaatgaccccagctttgaggacatgaagaaggtggtgtgtgtggatcagcagacccccaccatccctaaccggctggctgcagacccggtcctctcaggcctagctcagatgatgcgggagtgctggtacccaaacccctctgcccgactcaccgcgctgcggatcaagaagacactacaaaaaattagcaacagtccagagaagcctaaagtgattcaatagcccaggagcacctgattcctttctgcctgcagggggctgggggggtggggggcagtggatggtgccctatctgggtagaggtagtgtgagtgtggtgtgtgctggggatgggcagctgcgcctgcctgctcggcccccagcccacccagccaaaaatacagctgggctgaaacctgatcccctgctgtctggcctgctcaaagcggcaggctccctgacgcctggctctctccccacccctatggccagcatggtgcaccccctaccactcccgggacaggatgcaaaagaggctccagagtca

SEQ ID NO: 335022 - DNA, 582 bp, Artificial Sequence
  derived and/or modified sequence
aggcggcagggagtagggaggcggcctccctgcctcccctccaaaaaaaactctgtgatttcctctgggcaggagggagccacggccagcggctgtcacacttcatggctcttactccacctctcttgctcctctctgcagggaccatgaccttgggctcccccaggaaaggccttctgatgctgctgatggccttggtgacccagggagaccctgtgaagccgtctcggggcccgctggtgacctgcacgtgtgagagcccacattgcaaggggcctacctgccggggggcctggtgcacagtagtgctggtgcgggaggaggggaggcacccccaggaacatcggggctgcgggaacttgcacagggagctctgcagggggcgccccaccgagttcgtcaaccactactgctgcgacagccacctctgcaaccacaacgtgtccctggtgctggagggaaaaggccgctatggcgaagtgtggcggggcttgtggcacggtgagagtgtggccgtcaagatcttctcctcgagggatgaacagtcctggttccgggagactgagatctataacacagtgt

SEQ ID NO: 335023 - protein, 585 aa, Artificial Sequence
  derived and/or modified sequence
MAKLWFKFQRYFRRKPVRFFTFLALYLTAGSLVFLHSGFVGQPAVSGNQANPAAAGGPAEGAELSFLGDMHLGRGFRDTGEASSIARRYGPWFKGKDGNERAKLGDYGGAWSRALKGRVVREKEEERAKYIGCYLDDTQSRALRGVSFFDYKKMTIFRCQDNCAERGYLYGGLEFGAECYCGHKIQATNVSEAECDMECKGERGSVCGGANRLSVYRLQLAQESARRYGSAVFRGCFRRPDNLSLALPVTAAMLNMSVDKCVDFCTEKEYPLAALAGTACHCGFPTTRFPLHDREDEQLCAQKCSAEEFESCGTPSYFIVYQTQVQDNRCMDRRFLPGKSKQLIALASFPGAGNTWARHLIELATGFYTGSYYFDGSLYNKGFKGERDHWRSGRTICIKTHESGQKEIEAFDAAILLIRNPYKALMAEFNRKYGGHIGFAAHAHWKGKGAVPGSLQILFRSICTASVGEWPEFVRNYAPWWATHTLDWLKFGKKVLVVHFEDLKQDLFVQLGRMVSLLGVAVREDRLLCVESQKDGNFKRSGLRKLEYDPYTADMQKTISAYIKMVDAALKGRNLTGVPDDYYPR

SEQ ID NO: 335024 - DNA, 1758 bp, Artificial Sequence
  derived and/or modified sequence
atggccaagctgtggttcaagttccagagatacttcagaagaaagcccgtgagattcttcaccttcctggccctgtacctgaccgccggcagcctggtgttcctgcacagcggcttcgtgggccagcccgccgtgagcggcaaccaggccaaccccgccgccgccggcggccccgccgagggcgccgagctgagcttcctgggcgacatgcacctgggcagaggcttcagagacaccggcgaggccagcagcatcgccagaagatacggcccctggttcaagggcaaggacggcaacgagagagccaagctgggcgactacggcggcgcctggagcagagccctgaagggcagagtggtgagagagaaggaggaggagagagccaagtacatcggctgctacctggacgacacccagagcagagccctgagaggcgtgagcttcttcgactacaagaagatgaccatcttcagatgccaggacaactgcgccgagagaggctacctgtacggcggcctggagttcggcgccgagtgctactgcggccacaagatccaggccaccaacgtgagcgaggccgagtgcgacatggagtgcaagggcgagagaggcagcgtgtgcggcggcgccaacagactgagcgtgtacagactgcagctggcccaggagagcgccagaagatacggcagcgccgtgttcagaggctgcttcagaagacccgacaacctgagcctggccctgcccgtgaccgccgccatgctgaacatgagcgtggacaagtgcgtggacttctgcaccgagaaggagtaccccctggccgccctggccggcaccgcctgccactgcggcttccccaccaccagattccccctgcacgacagagaggacgagcagctgtgcgcccagaagtgcagcgccgaggagttcgagagctgcggcacccccagctacttcatcgtgtaccagacccaggtgcaggacaacagatgcatggacagaagattcctgcccggcaagagcaagcagctgatcgccctggccagcttccccggcgccggcaacacctgggccagacacctgatcgagctggccaccggcttctacaccggcagctactacttcgacggcagcctgtacaacaagggcttcaagggcgagagagaccactggagaagcggcagaaccatctgcatcaagacccacgagagcggccagaaggagatcgaggccttcgacgccgccatcctgctgatcagaaacccctacaaggccctgatggccgagttcaacagaaagtacggcggccacatcggcttcgccgcccacgcccactggaagggcaagggcgccgtgcccggcagcctgcagatcctgttcagaagcatctgcaccgccagcgtgggcgagtggcccgagttcgtgagaaactacgccccctggtgggccacccacaccctggactggctgaagttcggcaagaaggtgctggtggtgcacttcgaggacctgaagcaggacctgttcgtgcagctgggcagaatggtgagcctgctgggcgtggccgtgagagaggacagactgctgtgcgtggagagccagaaggacggcaacttcaagagaagcggcctgagaaagctggagtacgacccctacaccgccgacatgcagaagaccatcagcgcctacatcaagatggtggacgccgccctgaagggcagaaacctgaccggcgtgcccgacgactactaccccagatag

SEQ ID NO: 335025 - DNA, 1758 bp, Artificial Sequence
  derived and/or modified sequence
atggcgaaactctggttcaagtttcagcgctacttccggagaaagccagtgcggttttttacttttctggcactctatctgacggcaggaagcctagtctttctacactcagggttcgtgggccagccggctgtgtcaggaaaccaggccaaccccgctgctgctggggggcccgctgagggtgccgaactgtcttttctgggtgatatgcacttggggcggggattccgggacaccggcgaggcaagcagcattgccagacggtacgggccctggttcaaaggcaaagacggtaacgagcgggcaaagctcggggactatggaggagcatggtctcgagcgctaaaaggacgagttgtgagggagaaggaagaggagagggctaaatacatcggctgttatctggatgacacccagagtcgagctctgcgcggggtgtcttttttcgattacaaaaagatgacaatatttcgttgccaggataactgcgccgagaggggatatctttacggtgggcttgaatttggggctgaatgctactgtgggcataagatccaagcaacaaacgtgagcgaggccgagtgcgacatggagtgcaagggtgagcgcggcagcgtctgcggcggagcgaacaggctgtccgtgtacagactccagttggcccaagaatctgctaggcgatacgggtctgctgtgttccgcgggtgtttccgaagaccggacaatctgagcctggctctcccagtgacagccgcgatgctgaacatgtcagtagataaatgcgtggatttctgtactgagaaagagtatccgcttgccgctctcgcaggtacggcttgccactgcggctttccaaccacccgctttccactacatgatcgagaggatgaacagttgtgcgctcagaaatgctccgcagaggagtttgagtcatgcgggaccccatcttacttcattgtgtatcaaacccaagtgcaagacaacagatgcatggaccgccggtttcttccaggcaaatccaagcaactgatcgcactggccagcttccctggtgcaggaaatacttgggcccgacatttgattgaattagcgactggcttttacactggctcttattattttgatggcagcctctataataaaggttttaagggcgaaagggatcactggcgctcaggacgaaccatatgtattaagacgcatgagtcagggcagaaggagatagaggcattcgatgctgctatacttctgatcaggaacccctacaaggcgctcatggcggaattcaaccgcaagtacggggggcacataggatttgccgcccacgcccactggaaggggaaaggtgcagtgcccggcagtctgcagatcctgttcagaagcatctgtacagcaagcgtgggggagtggcctgaattcgtccgtaattacgcaccttggtgggcaactcatacccttgactggcttaaattcggtaaaaaagtactggtggtgcatttcgaagacctgaagcaggatctgtttgtccaactgggccgcatggtgtctcttctgggtgtggcagtgcgggaggatcgacttttatgcgttgaaagccagaaagacgggaactttaagcggtctggcttgcgcaagctggaatacgatccttacaccgcagacatgcagaaaacaatttctgcttacatcaagatggtcgatgctgcgctgaaaggcaggaacctcacgggcgttcccgatgattattacccccgatag

SEQ ID NO: 335026 - DNA, 1758 bp, Artificial Sequence
  derived and/or modified sequence
atggccaagttgtggttcaaatttcaacggtattttagaagaaagccagtgcggtttttcaccttcctggcgctgtatttgactgctggctctctcgtgttcttgcactctggttttgttgggcagcctgcagtgtctggcaatcaggccaatcccgctgccgcaggcggacccgctgagggcgcagagctgtccttccttggggacatgcatttggggagaggatttagggatacaggtgaggcctcctccatcgctaggagatacggcccatggttcaaaggaaaagacgggaatgagcgcgcaaaactcggcgactacggcggtgcctggtctagagcgctcaagggacgagtcgttcgggagaaggaggaagaacgcgccaaatatatcggctgctatctcgacgatactcaatcaagagcgctccggggggtcagtttctttgattacaagaaaatgactatattccggtgccaggataattgtgcagaaaggggctacttgtacggaggcctagaatttggggcggagtgctactgcgggcataagattcaggcaaccaatgtgtccgaggctgagtgcgatatggaatgtaaaggagaacgcggcagtgtgtgtggaggggcgaatcgactctccgtataccggctgcaactagcgcaggagagcgcacggaggtacggatccgcggtgtttaggggctgtttcagacgacccgacaacctgtccttggcactgcccgtgacagcagctatgctaaacatgagcgtcgacaaatgcgtcgacttttgcacagaaaaggaatatcctctggcagcgctcgcagggacagcttgtcactgcggattcccaaccactcggttccctctccacgatcgcgaagacgagcagctgtgtgctcagaagtgcagtgctgaagagttcgagagttgcggtacaccatcatattttatcgtctaccaaacccaggtccaggacaaccggtgtatggaccggcgctttctgccggggaagagtaagcagcttattgccctggcttcctttcccggtgctggaaacacctgggccagacatctcattgagctagccaccggtttctacaccggttcctactattttgatggctccctgtacaataagggatttaaaggcgaaagagatcattggcggtctggtagaactatttgtattaagacacacgagtctggacaaaaagagatagaggcctttgacgccgcaatcctactaatccgaaacccttataaagcacttatggcagagtttaaccgaaagtacggaggccatatcgggtttgcagctcacgcacactggaaggggaagggcgccgtccctgggtcgttgcagatcctatttaggagcatttgtaccgcgagcgtgggagagtggcccgaatttgtgcgcaactacgcgccctggtgggccacccacaccctggattggctcaaattcggtaaaaaggtgctggtggtgcactttgaggatctcaagcaggacctctttgtgcagttgggcaggatggtgtctctgctgggtgtcgccgtgcgtgaggatcgactcctgtgcgtggagagccagaaggatggaaattttaagcgatcaggattgaggaaactggaatacgatccctacactgccgatatgcagaaaactatatccgcatacatcaagatggtggatgcagctctcaagggccgcaatcttaccggcgtacctgacgactattaccctcggtag

SEQ ID NO: 335027 - DNA, 1758 bp, Artificial Sequence
  derived and/or modified sequence
atggccaagctgtggttcaagttccagcgctacttccggaggaagcctgtgcgcttcttcaccttcctggccctgtacctgacagctggcagcctggtgttcctgcacagcggctttgtgggccagcctgctgtgtctggcaaccaggccaacccagctgctgctgggggccctgctgagggcgctgagctgtccttcctgggggacatgcacctgggccggggcttccgggacacaggagaggccagcagcatcgccaggagatatggcccctggttcaagggcaaggatggaaatgaaagagccaagctgggggactatggaggagcctggagccgggccctgaagggccgggtggtgcgggagaaggaggaggagcgggccaagtacatcggctgctacctggatgacacccagagccgggccctgcggggcgtgtccttctttgactacaagaagatgaccatcttccgctgccaggacaactgtgccgagcggggctacctgtatggaggcctggagtttggagctgagtgctactgcggccacaagatccaggccaccaacgtgtctgaggccgagtgtgacatggagtgcaagggggagcggggctctgtgtgtggcggggccaaccggctgtctgtgtaccgcctgcagctggcccaggagagcgcccggcgctatggcagcgctgtgttccggggctgcttccggcggccagacaacctgagcctggccctgcctgtgacagctgccatgctgaacatgtctgtggacaagtgtgtggacttctgcacagagaaggagtaccccctggccgccctggccggcacagcctgccactgcggcttccccaccacccgcttccccctgcatgacagagaagatgagcagctgtgtgcccagaagtgcagcgctgaggagtttgagagctgtggcacccccagctacttcatcgtgtaccagacccaggtgcaggacaaccgctgcatggaccggcgcttcctgcccgggaagagcaagcagctgattgccctggccagcttccctggggccggcaacacctgggcccggcacctgattgagctggccaccggcttctacacaggcagctactactttgatggcagcctgtacaacaagggcttcaagggggagcgggaccactggaggagcggccgcaccatctgcatcaagacccatgaaagtggccagaaggagattgaggcctttgatgctgccatcctgctgatccggaacccctacaaggccctgatggccgagttcaacagaaaatatggaggccacatcggctttgctgcccacgcccactggaagggcaaaggagctgtgcccggcagcctgcagatcctcttccgcagcatctgcacagcctctgtgggggagtggccagagtttgtgagaaattatgccccctggtgggccacccacaccctggactggctgaagtttgggaagaaggtgctggtggtgcactttgaggacctgaagcaggacctgtttgtgcagctgggccgcatggtgtccctgctgggcgtggccgtgcgggaggaccggctgctgtgtgtggagagccagaaggatggcaacttcaagaggagcggcctgaggaagctggagtatgacccctacacagctgacatgcagaagaccatcagcgcctacatcaagatggtggatgctgccctgaagggcaggaacctgactggagtgcctgatgactactaccccaggtag

SEQ ID NO: 335028 - DNA, 1758 bp, Artificial Sequence
  derived and/or modified sequence
atggccaagctgtggttcaagttccagcggtacttccggcggaagcccgtcagattcttcacctttctcgctctttaccttaccgccgggtctcttgtgtttctgcactcaggattcgtcggacaaccagcggtgtccggcaaccaggcaaatcctgcggccgcagggggcccggctgaaggagccgagctgtccttcctgggagacatgcacctggggcgaggcttccgcgatactggggaggccagctctattgcacggagatacggtccgtggttcaaagggaaagacggaaatgagcgcgcaaagctgggagattatgggggtgcctggagccgggccctgaagggacgcgtggtgagggagaaagaagaggagagggcaaagtacattggatgttacctggacgatacccagtcaagggccttgcgcggtgtctccttcttcgattacaagaagatgactatctttcgctgtcaggataattgtgccgagcgtggctacttgtacggtggcttagaattcggggcagaatgctattgtggacacaagatacaagccacgaacgtgtcagaggccgaatgtgatatggagtgcaagggcgagcgggggtccgtctgcggcggggccaaccggttgtccgtgtatcgcttgcagctcgcacaggagtcagctagacggtatggaagtgctgtgttccgcggctgcttccgccgtcctgataacctgagtctggcgctgccagtcaccgcagcaatgctgaatatgtccgtggataaatgtgtggatttttgcactgagaaagagtacccgctcgctgccctggccggcaccgcctgccattgcggcttccccaccacacgctttcctctgcatgaccgggaggatgaacaactctgcgcacagaaatgctctgccgaggagttcgagagctgtgggacgccttcctactttatagtctatcagacacaagtgcaggataaccgatgtatggatcgcagattcttaccaggtaagagcaagcaattgatcgcgcttgcctctttccccggggcagggaacacatgggcccgccatttgattgagttagccaccggcttctacaccggcagctactatttcgatggctccctgtataacaagggattcaagggggaacgagaccattggaggtccgggaggactatctgtattaaaacccacgaaagcggccagaaggaaatcgaggcgttcgacgccgccatccttttaatccgcaacccttacaaagccttgatggcagagttcaaccggaagtatggcggccatatcggattcgctgcccacgcacactggaagggcaagggcgccgtcccgggctccctgcaaatcctgtttagaagcatttgtactgcaagcgtgggcgagtggcctgagtttgttaggaactacgccccttggtgggctacccacaccctggactggctcaaatttggtaagaaagtgttggtcgtgcacttcgaggacctgaaacaagacttatttgtccaactgggtaggatggtgtccttgctgggggtcgctgtccgggaggatcgactgttatgtgtagagtctcagaaagacggaaattttaagaggagtggcctgcggaagctggagtacgacccctatacagcggatatgcagaaaaccataagtgcatatatcaagatggtcgacgccgcactgaaaggcaggaatctgacaggcgtgccggatgactactaccctcggtag

SEQ ID NO: 335029 - DNA, 1758 bp, Artificial Sequence
  derived and/or modified sequence
atggccaagctgtggttcaagttccagcggtacttccggcggaagccggtccggttttttaccttccttgccctgtacctgacggctggttctctagtcttcctccatagcgggtttgtcggtcaaccagccgtctccggtaaccaggctaatcccgccgcagctggcggacctgcggaaggagctgagctgtcctttctgggcgatatgcatttgggacgcgggtttagagatactggcgaggcctctagcatagccaggcgttacgggccctggtttaaaggcaaggatggtaatgaacgggctaagcttggggactacgggggcgcctggtcccgggccctgaaaggccgagtcgtgcgggagaaagaagaggagcgggctaagtacattgggtgctatctggacgatacgcagtcgcgggccctaaggggggtctccttcttcgattataagaagatgaccatcttccggtgccaggacaactgtgcggaacgggggtatctgtacggtggcttggaatttggcgcggaatgctattgtgggcataaaatccaggctaccaatgtctcggaagctgaatgcgacatggaatgtaaaggcgagaggggatctgtttgtggaggtgccaatagattatcagtctatcggctgcagttggctcaggagtcggcccgtcgctacggttcggctgtgttcaggggctgtttccggagaccagacaacctctctctggccctgcctgttacggcagccatgctgaacatgtcagtggacaagtgtgtcgacttctgcaccgagaaggaatatccactcgccgcattggcgggcacagcttgccattgtggctttccgactacccggttccctctccatgaccgcgaagatgaacagctctgcgcacaaaagtgtagcgcagaggagtttgaaagctgcggaactcccagctacttcatagtttatcagactcaggtccaagataatagatgtatggacagacgctttctgcccggtaagtctaaacagttgattgcactcgccagctttcccggcgcaggcaacacttgggctaggcacctcatcgaactcgcaaccggattctacacaggtagctattattttgatggatctctctataataaaggatttaagggggaaagagatcactggcgttctggccggaccatctgcattaagactcatgaatcaggacagaaggaaatcgaggcgtttgacgctgctatcctactgatcaggaatccttataaggccctgatggctgagttcaaccggaagtatggtggccatattggatttgctgctcatgcgcactggaagggaaaaggggctgtgcccggcagcctgcagattctgtttcgatctatctgtaccgcttccgtcggggagtggcccgagtttgtcaggaattacgccccctggtgggctactcacaccctcgactggttaaaattcggcaagaaggttcttgtcgttcattttgaagatctgaaacaggatctgttcgtacagctcggccggatggtctcactgcttggggtcgctgtccgtgaggatcggctcctgtgcgttgagtctcagaaggatggcaactttaaacggagcggactgagaaaactcgagtatgatccttacactgctgacatgcagaagacgatctctgcgtacataaagatggttgacgcagctttgaaaggcagaaacctgactggggtccccgacgattattatccccgctag

SEQ ID NO: 335030 - DNA, 1758 bp, Artificial Sequence
  derived and/or modified sequence
atggccaaactttggttcaagttccagcgctactttcggaggaagccagtacggttttttacattcctggctttgtacttgaccgcgggaagcctggtctttctgcattctggctttgttggacagcccgcagtgtctggcaaccaggctaatcccgctgcggcaggcggacccgcagagggagccgaactgagtttcctcggggacatgcatctggggcgaggcttccgggacaccggggaggcctccagtatcgccagacggtacggcccttggtttaaaggaaaagacggcaacgaacgggctaaacttggagactacggcggtgcatggagcagggcactcaaaggcagggtcgtaagggagaaggaggaggagagggccaaatacattggttgctatcttgacgatacccaaagccgcgcattgcgcggtgtaagcttctttgactataaaaaaatgaccattttccggtgtcaagataactgcgcggaaagagggtatctctatgggggactggaatttggagcggagtgttattgcggacacaaaattcaggccaccaatgtgtctgaggcggaatgtgacatggaatgcaagggcgaaagaggatcagtgtgtggcggtgcgaacagactttccgtctacaggcttcagctcgcccaggagagtgccagacgctatggatcggccgtgttccgcggttgctttcgcaggcccgataacctcagtctggcactccccgtcaccgctgccatgctgaatatgagcgttgataaatgcgtggacttctgcacggagaaggagtacccactggctgctctagccggaaccgcatgccactgcggattcccaaccactcgcttccccctgcatgatcgagaggacgaacagctgtgtgcccagaagtgctctgccgaggagtttgaaagttgcggtactccttcctacttcatcgtgtaccagactcaggtgcaggataataggtgcatggataggagatttctcccgggtaagagcaagcagctgatagccctcgcgtcgtttccaggagctggcaatacttgggcaaggcacctgattgagctcgcaaccgggttttacaccggttcctactatttcgatggaagtctctataataaggggttcaaaggtgagagagaccactggagatctggcaggacaatttgtatcaagacccatgagagcggccagaaggaaatcgaggctttcgatgccgctattctgctgattcggaacccatacaaagcactcatggccgagttcaatcggaagtatgggggacatataggatttgcagcccacgctcactggaagggtaagggggcagtcccgggtagtcttcagattctgttcaggtctatttgcactgccagcgttggtgaatggcccgagttcgtccgaaattatgctccttggtgggccacacacaccctggactggctgaaatttgggaaaaaagtattggtggtgcatttcgaggacttaaagcaggacctttttgtccagctgggacggatggtctctctgcttggagtcgctgtgagagaggaccggctgctgtgcgtcgaatctcagaaggacggaaattttaagcggagcgggcttagaaagctcgagtacgacccatacacagccgatatgcagaagaccatttcagcctatattaaaatggtcgatgctgctcttaagggcagaaaccttactggtgtgcctgacgactactatcccagatag

SEQ ID NO: 335031 - DNA, 1758 bp, Artificial Sequence
  derived and/or modified sequence
atggccaaattgtggtttaagtttcagcgttattttcggcgtaaacctgtgaggtttttcacctttctggctctctatctgacggccggatcccttgttttcctgcactctgggttcgttggacagcctgctgtttcagggaaccaagccaatcctgctgctgctggcggaccagctgagggggcagaactgtccttcctgggagacatgcacttaggcagaggcttcagagatacaggagaagcatcttcaatcgcaaggcggtacggaccttggtttaagggcaaggacggtaatgagcgcgcaaagctgggcgattatggaggggcatggagccgggcactgaaagggcgtgtcgttagagagaaggaggaggaacgcgctaaatatatcgggtgttacctagatgacactcaatctagagctttgcggggtgtctcgttctttgattataaaaaaatgacaatattcaggtgccaggacaactgcgcagagcgcggatacttatacgggggattggaattcggggcagaatgttattgcgggcacaaaatccaagccaccaacgtgagtgaggctgagtgcgatatggagtgtaaaggggagcggggttccgtatgcggcggagcaaatagattgtccgtgtacagactccagctggcacaagaaagcgctaggcggtatggaagcgcagtctttagagggtgcttccgccgtccagataacctctcccttgctctgcccgttacagccgcaatgcttaacatgtccgttgataaatgcgttgatttttgcacggagaaggaataccctctcgcagctcttgccggtaccgcatgccactgtgggttccctaccacccggtttccattgcatgacagagaggacgagcagctgtgtgcccagaagtgttcagccgaggaattcgagagctgcggaacaccttcctattttatcgtgtaccaaacgcaagtccaggataacaggtgtatggatagaaggttcctgcctgggaaatccaaacaacttatagccctggcgtctttcccaggagccggaaacacttgggctcggcatcttatcgagctggccacgggattttataccgggtcttattattttgacggctccctctacaacaaggggttcaaaggagaaagagaccattggcgctctggccgaacgatttgcatcaagacacacgagtccgggcagaaagagatcgaagcattcgacgctgccattcttctcatacggaacccgtataaggccctgatggccgagttcaatcgcaaatacggaggccacattggctttgccgctcatgcgcactggaagggtaagggcgctgttccaggctctctccaaatcttgttcaggtctatctgtaccgcatccgttggcgaatggccggagtttgtgagaaactatgcgccatggtgggcaacgcatacactggattggctcaagtttggtaaaaaggtcctggttgtccatttcgaagacttaaagcaagatctgtttgtgcagctcgggaggatggtatccctgctgggagtggccgtcagagaagataggctcctctgtgtcgagagccagaaggacggcaattttaaacgaagtggtctccggaagctggaatatgacccatacaccgccgacatgcagaagaccatttccgcgtacatcaaaatggtggatgccgctttaaaaggaaggaacctgactggagttcccgatgactactatcctcggtag

SEQ ID NO: 335032 - DNA, 4693 bp, Artificial Sequence
  derived and/or modified sequence
cccagggcccggcaggaggagccttggtggcgagaaaggaaatccaggctcccctttccttaaagccactgcagcagctgggaaggcgcccacagagcgggcgcgccaagcgggacgcgggagtcgcagagagggaccccgggcgcctgctgagctcagctggcagagtttgcaagtggcggagacccttcaggtggcatccctgagtcctgatgcctgactggatggaggcccaccagcttctgttcccatgaggtagaaaggccaagcttggtcttcagctggggaagaggccagaaacaaggcccccagtgaaataacccagatccattggcctgaggagcagagaaagggcaagaagtgaactgcagctgctggtaaccctcagaaaccttctccaagtgctattctcacagttctttaggaacactctgaagtgaagaacaatatgtaggaaaatgggaccaacttatgtgtgttctgagcctcaaaacccccttgttggcccaaagaagctcaccttcagtttgggagggctggtaagctccatcctttctcatggcctcagccaagcattgaacttgccctccccttctggccttggtgatcactttttcaggaagagtgagactgaggacccccaagtgttccatccctaaggaaagcttgggaaaccaagccccttccatcctctcccaagcaccccagccaagccccagagagccagtccggaatgatcccactatggccaagctctggttcaaattccagcggtacttccgccggaaacctgtgcgcttctttaccttcctggcactctacctgactgctgggagccttgtcttccttcactctggctttgtgggccagcccgctgtctcggggaaccaggcgaaccccgctgctgcaggaggcccagctgagggtgctgagctgtccttcttgggtgacatgcatctgggcagaggtttccgggacacaggtgaagcctcaagcattgctcgcaggtacggaccctggttcaagggcaaggatgggaatgagagagccaagcttggcgactacggtggagcctggagccgagccctcaaggggagggttgtccgggagaaggaggaagagcgagccaagtacatcggctgctacctggatgacacccagagtcgggcccttcgaggagtgtccttttttgactacaaaaagatgaccatcttccgttgccaggacaactgtgctgaacggggttacctgtatggcgggctggagttcggcgccgagtgctactgcggccacaagatccaggcgacgaacgtgagcgaggcagagtgcgacatggagtgcaagggcgagcgaggcagcgtgtgcggcggcgccaaccgcctctctgtctaccggctgcagctggcccaggagtcggcccgcaggtatggaagtgcagtgttccggggctgcttccgcaggcccgacaacctttccctggccttacccgtgacagctgccatgctgaacatgtctgtggacaaatgcgtggacttctgcactgagaaggagtacccgctggcagctcttgcaggcaccgcctgccactgtgggtttcccaccacccgattcccgctccatgacagagaggatgagcagctctgtgcccagaagtgcagcgcggaggagtttgagagctgcgggactcctagttacttcattgtgtaccagacacaagtccaagacaaccgttgcatggacagaaggttcctgccaggcaagtccaagcagctcattgctttggccagcttcccaggtgctggcaacacgtgggctcgccacctcattgaattggccacaggcttctacactggcagctactacttcgatggctccctctacaacaaagggtttaaaggtgagcgggaccactggcgcagcggacggaccatctgcatcaagacgcacgaaagcggccagaaagagatcgaggccttcgacgccgccatcctgctcatccgcaacccctacaaagccctcatggctgagttcaaccgcaagtacggcggccacataggctttgctgcgcatgcccactggaagggcaaaggagccgtaccaggatctttgcaaatcttatttcgctcgatttgcacagcatctgtaggagagtggccagagttcgtgaggaactatgccccgtggtgggccactcacacactggactggctcaagtttggcaagaaggtgctggtggtgcactttgaggacctgaagcaggacctctttgtccagctgggccggatggtcagcctgctgggcgtggctgtcagggaggaccggctgctctgtgtggagagccagaaggatggcaacttcaagcgctcagggctccggaagctcgagtatgacccctatactgcggacatgcagaagaccatctctgcctacatcaagatggtggatgcagccctcaaagggcggaacctaacgggtgtccccgatgactactacccaagatgatgcgtccacacagggggagggtagactgggagtcctgaccacgcaggccctggggactcaagacccctggttacccccactcatctgtcctctctttggtctggggacaatccccttggctgctctttgccttcaatgagtttcctgcatgacagaggaggctcaagggaagagattgcccaggcactaccactctgctcacatgttccccccttggcaatgtggggcatcttgtttagggggttctagttacatggactcttttctgtctcctgggtccctgcccccaccactctgggttccatttgtgggagggagggctcatccacatcatggagacttgctggatgccccatggcaattgtcaaggctcttgatgcaagagcccagggggctattgtaaaaacttggccccagatgcttgtcccttctgggctgagatttcgcagcccccttctcatctccacccaagaagtgctggcaccgatgtttaactcaggccaccttctgttctaaagaaagattgctgggaagtttctccgtggccttaggtttctgacatcctggatagtgtggggaggtaatggtgctcacagtaggttaattggagacaccatgtggggccattggtgttatgagccccccaggccacactgcttctcagaaatgagctgcttgcctttccacctccagggcatgaaccctgcccctttctatccatgctgtgtccaggaggtgaccttgagatcctgataccaccttcaaggaacctcaggcaccaacagtgagcccacgaggatggtcacatgccatgtgcagaatttgacttaagagagagccccagtgacacatctctccatggtgggctccagtcagtcttacactgcccttctgacccctacaaatgggtcctttgctatccaggtgagacagcaagagtgttcttaatcagatggaaccacacccaaaatggacccccactaccttcccagaccatatatctccccttgatcatagtccaacagggccagcttcccttgggggccctttaaggaatggggtgaatgaaattgtgtcatttctatacaaacactgctctcttgatgctgaaatgccaaaccgaaggatttctgaggacctaaatcacggagcatcaatcttacaaagtgttggtccagagtcccatctcttccccaaccctggataccagtagcttcccacccagtccaaacctgcaccatccatcattatgtagatgaaaaagccataggtcatagcctctttgctattctattggagtagcctccctaggcagtccctctgaagccttggagtgcaggtaaatgctcattcccaagtagcaaagagaccatggagaaggtgcgtgtaaagagatatatttttgtaagaggaatatgattaatacattccgccccttggaacctggccatgcaaagcaagggcacagggattagacctgtggcacacttccccaattccctcatctgtaggatttgggctgccccaggcccacccagggggctctgaatgtattttgtaccgtgtttctttcccccaggagaatttttagtcttctttcatgaagcagtggaggggttggcctcccttctactgggaggttgactctctctgggagactcttggtccaagacctgggtcagttctttgctggtggtcccctctgaccacaagcttctgcctgaagattcctcaggtcaacaccatcattaaatgcgagttttgttgatgattctaccatgtggtagagtgttgtgtaagacaggttcacaaatgggatgttttcctagtgtgtgtgtgtgtgtgtgtgtgtgtgtatgagagagagagagagagacaacagagacagagagaggcagagaggcatagagagacagagagagagacaagaaacagagatagacagaaaatgttcggggtggcaggcgggttggtgtataactgctttgtgcctgtgtgactctggcatagctgctcagggagaattacgtgcctctgtgtgtaaaattgcctttgtgttctcctgcctttctatgttttgaaactgtatcccacaagttgccggtatgaccatcttatttgtaatgagtctgtgcaggtccttgtgtatggaattgcacccgtgtaaaggaggaaatggtcagtgtgcatg

SEQ ID NO: 335033 - DNA, 3534 bp, Artificial Sequence
  derived and/or modified sequence
atggccaagctctggttcaaattccagcggtacttccgccggaaacctgtgcgcttctttaccttcctggcactctacctgactgctgggagccttgtcttccttcactctggctttgtgggccagcccgctgtctcggggaaccaggcgaaccccgctgctgcaggaggcccagctgagggtgctgagctgtccttcttgggtgacatgcatctgggcagaggtttccgggacacaggtgaagcctcaagcattgctcgcaggtacggaccctggttcaagggcaaggatgggaatgagagagccaagcttggcgactacggtggagcctggagccgagccctcaaggggagggttgtccgggagaaggaggaagagcgagccaagtacatcggctgctacctggatgacacccagagtcgggcccttcgaggagtgtccttttttgactacaaaaagatgaccatcttccgttgccaggacaactgtgctgaacggggttacctgtatggcgggctggagttcggcgccgagtgctactgcggccacaagatccaggcgacgaacgtgagcgaggcagagtgcgacatggagtgcaagggcgagcgaggcagcgtgtgcggcggcgccaaccgcctctctgtctaccggctgcagctggcccaggagtcggcccgcaggtatggaagtgcagtgttccggggctgcttccgcaggcccgacaacctttccctggccttacccgtgacagctgccatgctgaacatgtctgtggacaaatgcgtggacttctgcactgagaaggagtacccgctggcagctcttgcaggcaccgcctgccactgtgggtttcccaccacccgattcccgctccatgacagagaggatgagcagctctgtgcccagaagtgcagcgcggaggagtttgagagctgcgggactcctagttacttcattgtgtaccagacacaagtccaagacaaccgttgcatggacagaaggttcctgccaggcaagtccaagcagctcattgctttggccagcttcccaggtgctggcaacacgtgggctcgccacctcattgaattggccacaggcttctacactggcagctactacttcgatggctccctctacaacaaagggtttaaaggtgagcgggaccactggcgcagcggacggaccatctgcatcaagacgcacgaaagcggccagaaagagatcgaggccttcgacgccgccatcctgctcatccgcaacccctacaaagccctcatggctgagttcaaccgcaagtacggcggccacataggctttgctgcgcatgcccactggaagggcaaaggagccgtaccaggatctttgcaaatcttatttcgctcgatttgcacagcatctgtaggagagtggccagagttcgtgaggaactatgccccgtggtgggccactcacacactggactggctcaagtttggcaagaaggtgctggtggtgcactttgaggacctgaagcaggacctctttgtccagctgggccggatggtcagcctgctgggcgtggctgtcagggaggaccggctgctctgtgtggagagccagaaggatggcaacttcaagcgctcagggctccggaagctcgagtatgacccctatactgcggacatgcagaagaccatctctgcctacatcaagatggtggatgcagccctcaaagggcggaacctaacgggtgtccccgatgactactacccaagatgatgcgtccacacagggggagggtagactgggagtcctgaccacgcaggccctggggactcaagacccctggttacccccactcatctgtcctctctttggtctggggacaatccccttggctgctctttgccttcaatgagtttcctgcatgacagaggaggctcaagggaagagattgcccaggcactaccactctgctcacatgttccccccttggcaatgtggggcatcttgtttagggggttctagttacatggactcttttctgtctcctgggtccctgcccccaccactctgggttccatttgtgggagggagggctcatccacatcatggagacttgctggatgccccatggcaattgtcaaggctcttgatgcaagagcccagggggctattgtaaaaacttggccccagatgcttgtcccttctgggctgagatttcgcagcccccttctcatctccacccaagaagtgctggcaccgatgtttaactcaggccaccttctgttctaaagaaagattgctgggaagtttctccgtggccttaggtttctgacatcctggatagtgtggggaggtaatggtgctcacagtaggttaattggagacaccatgtggggccattggtgttatgagccccccaggccacactgcttctcagaaatgagctgcttgcctttccacctccagggcatgaaccctgcccctttctatccatgctgtgtccaggaggtgaccttgagatcctgataccaccttcaaggaacctcaggcaccaacagtgagcccacgaggatggtcacatgccatgtgcagaatttgacttaagagagagccccagtgacacatctctccatggtgggctccagtcagtcttacactgcccttctgacccctacaaatgggtcctttgctatccaggtgagacagcaagagtgttcttaatcagatggaaccacacccaaaatggacccccactaccttcccagaccatatatctccccttgatcatagtccaacagggccagcttcccttgggggccctttaaggaatggggtgaatgaaattgtgtcatttctatacaaacactgctctcttgatgctgaaatgccaaaccgaaggatttctgaggacctaaatcacggagcatcaatcttacaaagtgttggtccagagtcccatctcttccccaaccctggataccagtagcttcccacccagtccaaacctgcaccatccatcattatgtagatgaaaaagccataggtcatagcctctttgctattctattggagtagcctccctaggcagtccctctgaagccttggagtgcaggtaaatgctcattcccaagtagcaaagagaccatggagaaggtgcgtgtaaagagatatatttttgtaagaggaatatgattaatacattccgccccttggaacctggccatgcaaagcaagggcacagggattagacctgtggcacacttccccaattccctcatctgtaggatttgggctgccccaggcccacccagggggctctgaatgtattttgtaccgtgtttctttcccccaggagaatttttagtcttctttcatgaagcagtggaggggttggcctcccttctactgggaggttgactctctctgggagactcttggtccaagacctgggtcagttctttgctggtggtcccctctgaccacaagcttctgcctgaagattcctcaggtcaacaccatcattaaatgcgagttttgttgatgattcta

SEQ ID NO: 335034 - DNA, 1587 bp, Artificial Sequence
  derived and/or modified sequence
atggagagacacggcgtggaccaccaggtgatcagcgacagcagcaaggagctggaggagctgagagccgccttcaccagagccctggagtacctgaagcaggaggtggaggagagattcaacgagagcggcgaccccagctgcgtgatcatgcagaactgggccagaatcgaggccagactgtgcaacaacatgcagaaggccagagagctgtgggacagcatcatgaccagaggcaacgccaagtacgccaacatgtggctggagtactacaacctggagagagcccacggcgacacccagcactgcagaaaggccctgcacagagccgtgcagtgcaccagcgactaccccgagcacgtgtgcgaggtgctgctgaccatggagagaaccgagggcagcctggaggactgggacatcgccgtgcagaagaccgagaccagactggccagagtgaacgagcagagaatgaaggccgccgagaaggaggccgccctggtgcagcaggaggaggagaaggccgagcagagaaagagagccagagccgagaagaaggccctgaagaagaagaagaagatcagaggccccgagaagagaggcgccgacgaggacgacgagaaggagtggggcgacgacgaggaggagcagcccagcaagagaagaagagtggagaacagcatccccgccgccggcgagacccagaacgtggaggtggccgccggccccgccggcaagtgcgccgccgtggacgtggagccccccagcaagcagaaggagaaggccgccagcctgaagagagacatgcccaaggtgctgcacgacagcagcaaggacagcatgcaggagcccgacaccaagctgagacccctgttcgaggcctgcggcgaggtggtgcagatcagacccatcttcagcaacagaggcgacttcagaggctactgctacgtggagttcaaggaggagaagagcgccctgcaggccctggagatggacagaaagagcgtggagggcagacccatgttcgtgagcccctgcgtggacaagagcaagaaccccgacttcaaggtgttcagatacagcaccagcctggagaagcacaagctgttcatcagcggcctgcccttcagctgcaccaaggaggagctggaggagatctgcaaggcccacggcaccgtgaaggacctgagactggtgaccaacagagccggcaagcccaagggcctggcctacgtggagtacgagaacgagagccaggccagccaggccgtgatgaagatggacggcatgaccatcaaggagaacatcatcaaggtggccatcagcaaccccccccagagaaaggtgcccgagaagcccgagaccagaaaggcccccggcggccccatgctgctgccccagacctacggcgccagaggcaagggcagaacccagctgagcctgctgcccagagccctgcagagacccagcgccgccgccccccaggccgagaacggccccgccgccgcccccgccgtggccgcccccgccgccaccgaggcccccaagatgagcaacgccgacttcgccaagctgttcctgagaaagtag

SEQ ID NO: 335035 - DNA, 1587 bp, Artificial Sequence
  derived and/or modified sequence
atggagcggcatggggtagaccatcaggtgatctccgattccagtaaggaactggaagaactgagggcagccttcacccgggccctagaataccttaaacaggaagttgaggaacgattcaacgagagcggtgacccatcctgcgttattatgcagaactgggcccgaattgaagctcgcttgtgtaataacatgcagaaggctcgcgaactgtgggactccattatgacgagaggcaatgccaagtatgccaacatgtggttggagtactacaacctagaacgcgcccatggggacacccaacactgcaggaaagctttacacagagccgtgcaatgcacaagtgattaccccgaacacgtctgcgaggtgctcctcactatggaacggaccgaggggagccttgaggattgggatatagctgttcaaaaaaccgagactagactggcacgcgtcaatgaacagcggatgaaagctgccgagaaggaagcggccctggtccaacaagaagaggagaaagccgaacagcgcaagagagcacgggctgaaaaaaaggccctgaagaagaagaaaaagatccgcggaccggagaagcgtggcgctgacgaagatgatgaaaaagagtggggcgacgatgaagaggagcaaccaagcaagcggcgtcgtgttgagaactctatcccagcagccggggagacacagaatgtggaggtggccgcaggcccagccggcaaatgtgctgccgtggatgtcgagcccccgagcaagcagaaggagaaagcagcatccctaaaacgcgacatgcccaaagtgttgcacgattcaagcaaggactctatgcaggagccagacacaaagctgcgcccactcttcgaggcgtgcggagaagtggtccagatcaggcccatttttagcaataggggagactttcgaggttactgctatgtggaatttaaggaggagaaatctgccctccaagcactcgagatggaccggaagagtgtcgaaggaaggcccatgttcgtgtccccctgtgtcgataagtctaaaaaccccgacttcaaagtatttcggtattcaactagtttggaaaaacacaaactctttatttctggcctgccctttagttgcactaaagaggagttagaagagatctgcaaagcccatggcaccgtcaaagacttacgcctggtgaccaatagagctggaaagccaaagggtcttgcctacgtagagtacgagaacgagtctcaagcatcccaggccgtaatgaagatggatggcatgactataaaggagaacatcattaaggtcgccatcagcaatcccccccagcgtaaggtccccgaaaagccagagacaagaaaggcgcctggaggacctatgctgctgccgcagacatacggcgctagaggcaaaggccgaacccagctctctttgctgccccgcgcgctgcagcggccatcagctgccgccccccaggctgagaatgggccggcagccgcccctgccgtcgctgcccccgctgccaccgaggctcctaaaatgtcaaatgctgatttcgccaaactgttcctgcggaaatag

SEQ ID NO: 335036 - DNA, 1587 bp, Artificial Sequence
  derived and/or modified sequence
atggagagacatggagtggaccaccaggtgatcagtgacagcagcaaggagctggaggagctgcgggccgccttcacccgggccctggagtacctgaagcaggaggtggaggagcgcttcaatgaaagtggggaccccagctgtgtgatcatgcagaactgggccagaattgaggcccggctgtgcaacaacatgcagaaggcccgggagctgtgggacagcatcatgaccagaggaaatgccaagtatgccaacatgtggctggagtactacaacctggagcgggcccatggagacacccagcactgcaggaaggccctgcacagagctgtgcagtgcaccagtgactacccagagcacgtgtgtgaggtgctgctgaccatggagaggacagagggcagcctggaggactgggacattgctgtgcagaagacagagacccggctggcccgggtgaatgagcagaggatgaaggctgctgagaaggaggccgccctggtgcagcaggaggaggagaaggccgagcagaggaagagggcccgggcagagaagaaggccctgaagaagaagaagaagatccggggccctgagaagagaggagcagatgaagatgatgagaaggagtggggagatgatgaggaggagcagcccagcaagagaagaagagtggagaacagcatcccagctgctggggagacccagaatgtggaggtggccgccggccctgctggaaaatgtgccgctgtggatgtggagccccccagcaagcagaaggagaaggccgccagcctgaagagggacatgcccaaggtgctgcatgacagcagcaaggacagcatgcaggagccagacaccaagctgcggcccctgtttgaggcctgtggggaggtggtgcagatccggcccatcttcagcaacagaggagacttccggggctactgctacgtggagttcaaggaggagaagagcgccctgcaggccctggagatggacaggaagtctgtggagggccggcccatgtttgtgagcccctgtgtggacaagagcaagaacccagacttcaaggtgttccgctacagcaccagcctggagaagcacaagctgttcatcagcggcctgcccttcagctgcaccaaggaggagctggaggagatctgcaaggcccatggaacagtgaaggacctgcggctggtgaccaacagagctgggaagcccaagggcctggcctacgtggagtatgaaaatgaaagccaggccagccaggccgtgatgaagatggatggcatgaccatcaaggagaacatcatcaaggtggccatcagcaaccccccccagaggaaggtgcctgagaagccagagaccaggaaggcccctgggggccccatgctgctgccccagacctacggggcccggggcaaaggaagaacccagctgagcctgctgccccgggccctgcagaggccttctgctgctgccccccaggccgagaatggacctgctgctgccccagctgtggccgccccagctgccacagaggcccccaagatgagcaatgctgactttgccaagctgttcctgaggaagtag

SEQ ID NO: 335037 - DNA, 1587 bp, Artificial Sequence
  derived and/or modified sequence
atggagcggcacggcgtggaccaccaggtgatcagcgacagcagcaaagagcttgaagagttgcgggcagcctttacccgcgctctggagtacctaaagcaagaagtagaagaaaggttcaacgagagcggggacccaagctgcgtgattatgcagaactgggcccggatcgaggccaggctgtgcaacaacatgcaaaaggctagagagttgtgggattctattatgacccgtggcaacgccaaatacgccaatatgtggctggagtactacaatctggagcgggctcacggggatacacaacattgccgaaaagcactgcatcgtgccgtccagtgtacaagcgattatcccgagcacgtctgtgaggtcctgctcaccatggaacgcacagagggaagcttggaggactgggacatcgccgtgcagaaaacggaaacccgactggcgcgggtaaatgaacagcggatgaaagcggcagaaaaggaggccgccttagtccaacaggaggaagaaaaagctgaacagcggaaaagagctagggcagagaagaaggccctgaagaaaaagaagaaaatccgggggcccgagaagaggggcgcggatgaagacgatgagaaggaatggggggacgatgaagaagaacaaccctccaagcgtagacgcgttgaaaactccatccctgccgccggcgagacgcagaacgtcgaggttgcggcgggcccagctggcaaatgcgcggcagttgacgtggagcctccctcaaagcaaaaggagaaggccgcttctctaaagagagatatgccaaaagttctgcacgacagttctaaagactccatgcaagagccagacacaaagttgcgccccctgtttgaggcttgcggggaagtggtgcagatccgccccattttttctaataggggagactttaggggctactgctatgtggaattcaaggaagaaaagtctgctctccaggcactggagatggatcgaaagtctgtcgagggccggcccatgttcgtgtcaccgtgtgtcgataagagcaagaatcctgattttaaggtgttccggtactctacaagcctggaaaaacataagctgttcattagcgggcttccatttagttgtactaaggaagaactcgaggaaatctgtaaagcccatggcaccgtgaaggatctgcgactggttaccaatcgagcaggcaagcccaaaggactagcgtatgtagaatacgagaacgaatcccaggcaagccaggcggtgatgaaaatggatggcatgactattaaggagaacattatcaaagtcgccatctctaatccaccgcagaggaaggtaccggaaaagcctgaaactcggaaggccccaggcggccccatgctgctcccacagacgtacggggctcgtggcaagggacgcactcagctgtcgttgttaccacgcgcattgcagcggccctctgcggccgctccacaggccgaaaacggccccgccgccgccccagcggtggccgctcccgcagcaacagaagcccctaagatgtccaacgcagatttcgcaaagctattcttgagaaagtag

SEQ ID NO: 335038 - DNA, 1587 bp, Artificial Sequence
  derived and/or modified sequence
atggaacgacacggcgtggaccatcaggtgatcagcgattcgtccaaagagctggaagaattgcgggctgcatttacacgagctttagagtatcttaagcaggaggtggaagagaggttcaatgaatcaggcgatccgtcttgtgttataatgcagaactgggcaagaatcgaggctaggctttgcaacaatatgcaaaaggcccgagaattgtgggacagcattatgacgagggggaacgcaaagtatgccaatatgtggctggaatactacaatttggagagagcccatggcgatacccagcattgcagaaaggctctgcacagagcggttcagtgtaccagcgactatccagagcatgtatgtgaggtgcttcttaccatggaaaggacagaagggagccttgaggattgggatatagccgtgcagaagaccgaaacgcgactggcacgggttaatgagcagcggatgaaggctgcggagaaagaagccgctcttgttcagcaagaggaggaaaaggccgaacaaagaaaacgcgctagagcagagaaaaaggcactgaagaaaaaaaagaagatacgaggacctgaaaagcgaggagccgacgaggatgacgagaaagagtggggcgacgacgaagaggaacagccgtccaaacgacgtagggtggagaattccatccccgcagcgggtgaaacccagaatgtcgaggtggctgccggacccgcaggaaaatgtgctgccgttgacgtcgagcccccaagtaagcagaaggaaaaggctgccagcctcaaacgcgacatgcctaaggttctgcacgatagcagtaaggactcaatgcaggaacctgatacaaagctgagacctctcttcgaggcatgtggcgaggtggttcagattaggcctattttcagtaatagaggtgatttccgcggatactgctacgtggagtttaaggaggaaaagtctgctctgcaagccctggagatggatagaaagagtgtggagggccgaccaatgttcgtgagcccttgtgtggataagagcaagaacccagatttcaaggtgtttcgctactctactagcctcgagaagcataaactgttcatctccggcctgcccttcagttgcaccaaggaagagttagaggagatttgcaaggcccacggcactgttaaggatttacggctcgtcactaatcgtgccggaaaaccaaaggggctcgcctacgtggaatacgagaatgaaagccaggcgtctcaggccgtgatgaagatggacggtatgacaatcaaggagaacatcatcaaagtggcaatttccaatccaccacagcgtaaggtgccagaaaagcccgaaacccgaaaggccccaggtggccctatgctcctgcctcaaacttatggtgctcggggtaaaggcagaacccagctctcactactcccacgcgctctacagaggccttctgctgccgcacctcaggccgagaatggccctgctgcggctcccgctgtggctgcaccggctgctactgaggctcctaaaatgtccaacgctgacttcgccaagctttttcttcgtaagtag

SEQ ID NO: 335039 - DNA, 1332 bp, Artificial Sequence
  derived and/or modified sequence
atgctggagcacgtgatcaccctgcccagcgccgcccagaccagactgcccttccacctgatcttcttcggcaccgcccagaacttctggaagatcctgagcaccgagctgagcgaggagagcttccccaccctgctgctgatcagcaagctgatgaagttcagcctggacaccctgtacgtgagcaccgccaagcacgtgttcgagaagaagctgaagcccaagctgctgaagctgacccaggccaagagcagcaccctgatcaacaaggagatcaccaagatcacccagaccatcgagagctgcctgctgagcatcgtgaaccccgagtgggccgtggccatcgccatcagcctggcccaggacatccccgagggcagcttcaagatcagcgccctgaagttctgcctgtacctggccgagagatggctgcagaacatccccagccaggacgagaagagagagaaggccgaggccctgctgaagaagctgcacatccagtacagaagaagcggcaccgaggccgtgctgatcgcccacaagctgaacaccgaggagtacctgagagtgatcggcaagcccgcccacctgatcgtgagcctgtacgagcaccccagcatcaaccagagaatccagaacagcagcggcaccgactaccccgacatccacgccgccgccaaggagatcgccgaggtgaacgagatcaacctggagaaggtgtgggacatgctgctggagaagtggctgtgccccagcaccaagcccggcgagaagcccagcgagctgttcgagctgcaggaggacgaggccctgagaagagtgcagtacctgctgctgagcagacccatcgactacagcagcagaatgctgttcgtgttcgccaccagcaccaccaccaccctgggcatgcaccagctgaccttcgcccacagaaccagagccctgcagtgcctgttctacctggccgacaaggagaccatcgagagcctgttcaagaagcccatcgaggaggtgaagagctacctgagatgcatcaccttcctggccagcttcgagaccctgaacatccccatcacctacgagctgttctgcagcagccccaaggagggcatgatcaagggcctgtggaagaaccacagccacgagagcatggccgtgagactggtgaccgagctgtgcctggagtacaagatctacgacctgcagctgtggaacggcctgctgcagaagctgctgggcttcaacatgatcccctacctgagaaaggtgctgaaggccatcagcagcatccacagcctgtggcagagatggagaagctgctacgtggcctag

SEQ ID NO: 335040 - DNA, 1332 bp, Artificial Sequence
  derived and/or modified sequence
atgcttgaacatgtaattacgctaccttctgccgcccagacgcgcctgccattccacctgatattttttggtactgcccaaaacttttggaagatcctgtcaaccgaacttagcgaggagagctttcctacacttttgctgatttccaagctcatgaagttttccctcgacactctatacgtgtctacagccaaacacgttttcgagaaaaagctcaaaccaaaattgctgaagctgacccaggcaaagtcttcaaccctgataaataaggagatcactaagattacgcagacaatcgagagctgtcttctctccattgtaaaccctgaatgggccgttgccatcgctatcagtctcgcccaagacatcccagaagggtcctttaagatctccgctctgaaattctgtctgtatcttgctgaaaggtggctgcagaatatcccgagccaagacgaaaaaagggagaaggcggaggccttactgaaaaagctccatattcagtaccggcgatcaggtactgaagctgtcctcatcgcccataaacttaacaccgaggagtatcttcgggtcatcggcaaaccagcccatctgatcgtgtcattatatgaacatccctctattaatcaacggattcagaattcctccgggaccgattatccggacatccatgccgctgctaaggaaattgccgaagtcaacgagataaacctggaaaaagtgtgggatatgctgctggagaaatggctgtgcccatctacaaaacccggggagaaaccatcggaactgttcgagctgcaggaggacgaggctctgagacgcgtccagtacctcctcctcagtagaccgatcgactattcatcccgcatgttatttgtgttcgccacttcaacgactacaacgttgggcatgcaccagctaacgtttgcacatcgaaccagggcgctgcaatgtttgttttacttggcggacaaggaaaccattgagtcactgtttaaaaagcccatcgaagaagtgaagtcctatttacggtgcattacctttctggcctcgttcgagactttgaatattcccatcacctacgaactgttctgctcaagtccgaaggagggaatgataaaaggtttgtggaaaaaccatagccacgagagtatggctgtcagactggtgaccgagctctgtttggagtataagatctatgacctgcaactgtggaacggtctgctgcagaagctgctcggattcaatatgattccttatctgcgaaaggtactaaaagctatctcctctatccacagcctgtggcagcgttggaggagttgctacgtggcttag

SEQ ID NO: 335041 - DNA, 1332 bp, Artificial Sequence
  derived and/or modified sequence
atgctggagcacgtgatcaccctgcccagcgctgcccagacccggctgcccttccacctgatcttctttggaacagcccagaacttctggaagatcctgagcacagagctgtctgaggagagcttccccaccctgctgctgatcagcaagctgatgaagttcagcctggacaccctgtatgtgtccacagccaagcacgtgtttgagaagaagctgaagcccaagctgctgaagctgacccaggccaagagcagcaccctcatcaacaaggagatcaccaagatcacccagaccatcgagagctgcctgctgagcatcgtgaaccctgagtgggccgtggccatcgccatcagcctggcccaggacatccctgagggcagcttcaagatcagcgccctgaagttctgcctgtacctggccgagcgctggctgcagaacatccccagccaggatgagaagcgggagaaggccgaggccctgctgaagaagctgcacatccagtacagaagaagtggcacagaagctgtgctgattgcccacaagctgaacacagaggagtacctgcgggtgattggcaagccagcccacctgattgtgtccctgtatgagcaccccagcatcaaccagaggatccagaacagcagcggcacagactacccagacatccacgccgccgccaaggagattgctgaggtgaatgagatcaacctggagaaggtgtgggacatgctgctggagaagtggctgtgccccagcaccaagccaggagagaagcccagcgagctgtttgagctgcaggaggatgaggccctgcggcgggtgcagtacctgctgctgagccggcccatcgactacagcagcaggatgctgtttgtgtttgccaccagcaccaccaccaccctgggcatgcaccagctgacctttgcccacaggacccgggccctgcagtgcctcttctacctggccgacaaggagaccatcgagagcctcttcaagaagcccatcgaggaggtgaagagctacctgcgctgcatcaccttcctggccagctttgagaccctgaacatccccatcacctatgagctgttctgcagcagccccaaggagggcatgatcaagggcctgtggaagaaccacagccatgagagcatggctgtgcggctggtgacagagctgtgcctggagtacaagatctatgacctgcagctgtggaatggcctgctgcagaagctgctgggcttcaacatgatcccctacctgaggaaggtgctgaaggccatcagcagcatccacagcctgtggcagcgctggaggagctgctacgtggcctag

SEQ ID NO: 335042 - DNA, 1332 bp, Artificial Sequence
  derived and/or modified sequence
atgctggagcacgtgatcaccctgcccagcgccgcccagacccggctgccatttcacctgatctttttcggaacagcacagaatttctggaagatcttgagcacggaactgagtgaagaaagctttcccactctgttgctcatcagcaagctgatgaaatttagcctagataccctatatgtctcaaccgcgaagcacgtctttgagaagaagctgaagcctaaacttctgaaactcacccaagccaaatcctcgactctcataaacaaagaaattactaagatcacccagaccatcgaatcctgcctgctgtctatcgttaaccccgagtgggctgtggccattgctatctctttggcccaagacatccctgagggctcctttaagataagtgcccttaagttctgtctctacctggcggagcgatggctccagaacattccctcccaggatgagaagagagagaaagctgaggccctgctgaaaaagcttcacatccagtacagacgatctggcaccgaggccgttcttatcgcccataagcttaatactgaggagtaccttcgagtcattggtaaaccagctcacctgattgtgtccctgtacgaacacccatctattaatcagcggatccagaattcatcagggactgactatcccgatattcacgccgctgccaaggaaatagctgaggtaaatgagataaacctggaaaaggtatgggacatgctattggagaagtggctgtgcccttcaacgaagcccggtgaaaagccgtctgaattattcgagctgcaggaggatgaggctctacgaagggtgcagtacctgttactctcgcgcccgattgattattcatcccgtatgctctttgtgttcgccacgtctacaacaacgacattaggaatgcaccagcttacattcgctcatcgcacaagagcgctgcaatgtttattctatctggccgacaaggaaacaatcgagagcttgtttaagaagccaattgaggaggtcaagtcctacctgcgctgtatcacatttctcgcttccttcgagactctgaatatccctatcacctatgaactgttctgctcctctcccaaggaggggatgataaagggactctggaagaatcatagccatgagtctatggctgtgagactcgtcaccgagctgtgcctagaatacaaaatctacgacctgcagctctggaatgggctcctgcaaaagctgctcggctttaacatgattccataccttagaaaagtgctgaaggctatctcctctatccacagcctatggcagcgctggcgatcatgctacgtagcttag

SEQ ID NO: 335043 - DNA, 1332 bp, Artificial Sequence
  derived and/or modified sequence
atgcttgagcacgttataactttaccctcagcagcacaaacacgcctgccattccacctgatcttctttggaactgcacaaaatttttggaaaatcttgtctaccgaattgtccgaggagtcattcccaactctcctgctaatcagcaagctgatgaaattttctcttgataccctctacgtgtcaacagcaaaacacgtgttcgagaagaaactcaagccaaagcttttgaaacttactcaggcaaaatcgtctactctcatcaataaggagatcacaaagatcactcagaccatagagtcttgtcttctaagcatcgtaaatccagagtgggctgtcgctatcgctatcagcctagcacaggacatccccgaagggagttttaagatctccgccctgaaattttgcctttatctggccgagagatggctccagaacatcccgtctcaggacgagaaaagagagaaagcagaagcacttctgaaaaagttacatatccaatatcgccgatccggcacggaggcagtgctgatagcgcataaactgaatactgaagagtacctcagggtgatcggcaaaccagcacacctgattgtgtccctgtacgagcaccctagcatcaatcagcggatccagaattcttccgggaccgactatcctgatatccacgctgccgcaaaagagattgcagaggtgaatgagatcaacctcgagaaagtctgggacatgctcttagagaagtggctttgcccatccaccaagccaggcgagaagccaagtgagctgttcgaactccaagaggatgaggccttgagaagggtgcagtaccttttgttatctcggccaatcgattatagttccaggatgctgttcgttttcgccactagcaccacgacgacactaggaatgcaccagctgaccttcgcgcaccgtacaagggctctgcagtgcctgttctacctcgctgacaaagagacgatagagtctctgttcaagaaacctatagaagaagtgaagtcatatttgcgctgcatcaccttcctggcatctttcgagacgctgaacattcccatcacatacgagctgttctgctcttcccctaaagagggcatgatcaaagggttatggaagaaccactcgcacgaatctatggcagtgagactcgtcaccgaactgtgtctggagtataaaatttatgacttgcagctgtggaacggcctactacagaagctgctgggcttcaacatgataccctacttgcgcaaggtgctgaaagccatctcatctatccattcactttggcagaggtggagatcatgttatgtcgcgtag

SEQ ID NO: 335044 - protein, 275 aa, Artificial Sequence
  derived and/or modified sequence
MAFCALTIVALYILSLKDQDRRVPNLPPSNITSSQEPALLPTASSSAPNTSLVTTPASLQVPEITFCEILPCQETYCCPIRGMKEVSSSPVQRQSEEKEFHQRRWSEDKSKSVLARNALSGPDWESDWIDTTISSIQIMEIQQIIDHQYCIQSLQCGSGNYNYNIPVNKHTPTNVKFSLEINTTEPLIVFQCKFTLGNICFHSKRGTKGLESHREISQEMTQGYQHIWSLPVAPFSDSMFHFRVAAPDLADCSTDPYFAGIFFTDYFFYFYRRCA

SEQ ID NO: 335045 - DNA, 1237 bp, Artificial Sequence
  derived and/or modified sequence
aatatggaacagaaagctggcccggctaaagcggctcagtagttggaagtcatcagccagtgaagcaagcacaatcagcaaatctagcagagccgttagtgcatcttctccaagaagggccgttcataaaaaaaacaacaaggtttatttttcaggaaaaagacaggcgtgtcctaattgggttttccagaccttggttataactctgattgctgtgatggcattttgtgctttgacgatagttgccctctatatacttagcttaaaagatcaagaccgacgtgtcccaaatctccctccaagcaatatcacaagctcacaggagccagctctgctgcccacagcctcctcctcagcacctaatacatccctggtaaccacaccggcctccttacaagtacctgaaattactttctgtgaaatcctgccgtgtcaggagacttattgctgccccatccggggaatgaaagaagtctcttcaagtcctgtgcaaagacaatctgaggagaaggaattccatcagaggcgatggtcagaagacaaaagcaaatcagttttggcaagaaatgcactcagcggccctgactgggagagtgactggattgatacaaccatcagttctattcagattatggaaatccagcaaataatagatcatcagtattgcattcaaagcctccagtgcggatctggaaattataattacaatattcctgttaataaacacacacccaccaatgtcaagttctctctggaaataaacacaacagagccattgatagtcttccagtgcaaattcacccttggaaatatatgtttccatagtaaaaggggaaccaaagggctggaaagccacagagaaatctcccaggagatgacacagggatatcagcacatttggagcctccctgtagccccattttctgacagcatgttccatttccgtgtagctgcaccggatttagctgactgttcaactgatccttattttgctgggatattcttcaccgattacttcttttacttctatcgacgctgtgcctaatttgttcaagtttggggactttaccaaagaaaaatactcaggaatacatttaacagaaacgaacatcctcttgcaacttcttttttcttctttgtaaaacatttacgtttattgctgaaggactttttcaggctttagcttccaacagttttgagacattaatgaggagaataaaatgtttgctgaaacttg

SEQ ID NO: 335046 - DNA, 828 bp, Artificial Sequence
  derived and/or modified sequence
atggccttctgcgccctgaccatcgtggccctgtacatcctgagcctgaaggaccaggacagaagagtgcccaacctgccccccagcaacatcaccagcagccaggagcccgccctgctgcccaccgccagcagcagcgcccccaacaccagcctggtgaccacccccgccagcctgcaggtgcccgagatcaccttctgcgagatcctgccctgccaggagacctactgctgccccatcagaggcatgaaggaggtgagcagcagccccgtgcagagacagagcgaggagaaggagttccaccagagaagatggagcgaggacaagagcaagagcgtgctggccagaaacgccctgagcggccccgactgggagagcgactggatcgacaccaccatcagcagcatccagatcatggagatccagcagatcatcgaccaccagtactgcatccagagcctgcagtgcggcagcggcaactacaactacaacatccccgtgaacaagcacacccccaccaacgtgaagttcagcctggagatcaacaccaccgagcccctgatcgtgttccagtgcaagttcaccctgggcaacatctgcttccacagcaagagaggcaccaagggcctggagagccacagagagatcagccaggagatgacccagggctaccagcacatctggagcctgcccgtggcccccttcagcgacagcatgttccacttcagagtggccgcccccgacctggccgactgcagcaccgacccctacttcgccggcatcttcttcaccgactacttcttctacttctacagaagatgcgcctag

SEQ ID NO: 335047 - DNA, 828 bp, Artificial Sequence
  derived and/or modified sequence
atggccttctgtgccctcacgattgttgccctgtacatactttccctgaaggatcaagataggcgggtccccaatctccccccttctaatatcaccagttctcaagaacccgccctgctgcccacggccagcagttccgcaccaaacacatccctggtcaccacaccagcaagcctacaggtgccagaaattactttctgcgagatcctgccatgccaggaaacctactgttgtccaataagggggatgaaggaagtgtcctcctctcccgtgcagcgccagagcgaagagaaggagttccaccaaaggaggtggtctgaagataagagtaagagtgtccttgcaaggaacgcactgtccggccctgattgggagtctgactggattgacaccaccatctcaagcatacagatcatggagatccagcagatcattgatcatcagtactgcattcagagcctacagtgcggatctggaaactataactataacatccctgtcaacaagcataccccaacaaacgtaaaattctccctggagataaacactacagaacccctgattgttttccaatgtaaattcaccctgggtaatatttgtttccactcaaagaggggaactaaaggcctggagagtcatagagaaatctctcaagaaatgactcagggctaccagcacatttggtcacttccagttgccccattttccgacagtatgtttcatttcagggtcgcagcccccgacttagcagactgttccacagatccatacttcgccggcatctttttcactgactactttttctatttttatcggaggtgcgcctag

SEQ ID NO: 335048 - DNA, 828 bp, Artificial Sequence
  derived and/or modified sequence
atggccttctgtgccctgaccatcgtggccctgtacatcctgagcctgaaggaccaggacagaagagtgcccaacctgccccccagcaacatcaccagcagccaggagcccgccctgctgcccacagccagcagcagcgcccccaacaccagcctggtgaccaccccagccagcctgcaggtgcctgagatcaccttctgtgagatcctgccctgccaggagacctactgctgccccatccggggcatgaaggaggtgagcagcagccctgtgcagaggcagagcgaggagaaggagttccaccagaggcgctggagcgaggacaagagcaagtctgtgctggccagaaatgccctgagcggccctgactgggagagtgactggattgacaccaccatcagcagcatccagatcatggagatccagcagatcatcgaccaccagtactgcatccagagcctgcagtgtggcagcggcaactacaactacaacatccctgtgaacaagcacacccccaccaacgtgaagttcagcctggagatcaacaccacagagcccctcatcgtgttccagtgcaagttcaccctgggcaacatctgcttccacagcaagaggggcaccaagggcctggagagccaccgggagatcagccaggagatgacccagggctaccagcacatctggagcctgcctgtggcccccttcagtgacagcatgttccacttccgggtggccgccccagacctggccgactgcagcacagacccctactttgctggcatcttcttcacagactacttcttctacttctaccgccgctgtgcctag

SEQ ID NO: 335049 - DNA, 828 bp, Artificial Sequence
  derived and/or modified sequence
atggccttctgcgccctgaccatcgtggccctgtacatcctgagcctgaaagatcaggaccgaagggttccgaatttaccaccctctaacatcacaagtagccaggagcctgcgctcctgcctactgcaagtagctccgcacctaacacatctttggttacaacacctgccagtctgcaagtaccagagatcaccttctgtgagatcctcccctgccaagaaacttactgttgcccaatcaggggcatgaaggaagtgagctcgtcacctgtgcagcgccagtctgaagaaaaagagttccaccaaaggcgctggtccgaggacaaatctaaaagcgtgctcgcccggaatgcgctcagtggtcccgactgggagagtgactggattgacaccaccatatcaagcatccagataatggagatacagcagatcatcgaccaccaatactgcattcaatctctacagtgcggttccgggaattacaactataacatcccagtaaacaagcacacaccaacaaatgtcaaattttccctagaaatcaacacaaccgagccactgattgtctttcagtgcaaattcactctcgggaatatctgtttccacagcaaaaggggcacgaagggcctcgaatctcaccgagagatcagccaggaaatgactcaggggtatcagcacatctggtctttgccagtggctccctttagcgatagcatgttccatttccgcgtggccgcacccgacctggccgattgctctacagacccctattttgccggtatcttttttactgattacttcttttacttctaccggcgctgtgcatag

SEQ ID NO: 335050 - DNA, 828 bp, Artificial Sequence
  derived and/or modified sequence
atggcgttctgcgcactcaccatcgttgctctttacatactgagccttaaggaccaggaccggcgagtccctaacctacccccttccaacataacctctagccaggagccagcactgctcccaaccgctagttcctccgcaccaaacacatcactagtgaccactcctgcctccttgcaggtaccggaaattaccttctgtgaaattctgccttgccaggaaacatattgctgcccaattcgaggcatgaaagaggtatctagctccccggtgcagcggcagagcgaagagaaagagttccatcagagaagatggtccgaggataagtctaaatccgtgttggcaagaaatgccttgtctggacctgactgggagtcagattggatcgacaccaccatctcttctattcagatcatggagattcaacaaataatagatcaccagtattgcattcaatccctgcagtgtggaagtggaaattataactataacattcctgtgaataagcatacccccaccaacgtaaaatttagcctcgaaattaacaccacagagcctcttatcgtgtttcagtgcaaattcactctcggaaacatctgtttccactctaagcgagggaccaaaggactcgagagtcaccgcgaaatttctcaggagatgacccagggataccagcatatctggagtctgcccgtcgctcctttcagtgattccatgttccattttagagtggcggcacccgacctggccgattgttctacagatccctacttcgctggtatcttctttaccgattattttttctacttttacaggagatgcgcgtag

SEQ ID NO: 335051 - protein, 171 aa, Artificial Sequence
  derived and/or modified sequence
MEGGGGSGNKTTGGLAGFFGAGGAGYSHADLAGVPLTGMNPLSPYLNVDPRYLVQDTDEFILPTGANKTRGRFELAFFTIGGCCMTGAAFGAMNGLRLGLKETQNMAWSKPRNVQILNMVTRQGALWANTLGSLALLYSAFGVIIEKTRGAEDDLNTVAAGTMTGMLYKCT

SEQ ID NO: 335052 - protein, 149 aa, Artificial Sequence
  derived and/or modified sequence
MTGAAFGAMNGLRLGLKETQNMAWSKPRNVQILNMVTRQGALWANTLGSLALLYSAFGVIIEKTRGAEDDLNTVAAGTMTGMLYKCTASASQGAGIADGVSFTQCSMLPRLECSGVISASYNLHLPAACLGLPKCRDCSLCPAATPSGK

SEQ ID NO: 335053 - DNA, 405 bp, Artificial Sequence
  derived and/or modified sequence
atggagggcggcggcggcagcggcaacaagaccaccggcggcctggccggcttcttcggcgccggcggcgccggctacagccacgccgacctggccggcgtgcccctgaccggcatgaaccccctgagcccctacctgaacgtggaccccagatacctggtgcaggacaccgacgagttcatcctgcccaccggcgccaacaagaccagaggcagattcgagctggccttcttcaccatcggcggctgctgcatgaccggcgccctgtgggccaacaccctgggcagcctggccctgctgtacagcgccttcggcgtgatcatcgagaagaccagaggcgccgaggacgacctgaacaccgtggccgccggcaccatgaccggcatgctgtacaagtgcacctag

SEQ ID NO: 335054 - DNA, 516 bp, Artificial Sequence
  derived and/or modified sequence
atggagggcggcggcggcagcggcaacaagaccaccggcggcctggccggcttcttcggcgccggcggcgccggctacagccacgccgacctggccggcgtgcccctgaccggcatgaaccccctgagcccctacctgaacgtggaccccagatacctggtgcaggacaccgacgagttcatcctgcccaccggcgccaacaagaccagaggcagattcgagctggccttcttcaccatcggcggctgctgcatgaccggcgccgccttcggcgccatgaacggcctgagactgggcctgaaggagacccagaacatggcctggagcaagcccagaaacgtgcagatcctgaacatggtgaccagacagggcgccctgtgggccaacaccctgggcagcctggccctgctgtacagcgccttcggcgtgatcatcgagaagaccagaggcgccgaggacgacctgaacaccgtggccgccggcaccatgaccggcatgctgtacaagtgcacctag

SEQ ID NO: 335055 - DNA, 450 bp, Artificial Sequence
  derived and/or modified sequence
atgaccggcgccgccttcggcgccatgaacggcctgagactgggcctgaaggagacccagaacatggcctggagcaagcccagaaacgtgcagatcctgaacatggtgaccagacagggcgccctgtgggccaacaccctgggcagcctggccctgctgtacagcgccttcggcgtgatcatcgagaagaccagaggcgccgaggacgacctgaacaccgtggccgccggcaccatgaccggcatgctgtacaagtgcaccgccagcgccagccagggcgccggcatcgccgacggcgtgagcttcacccagtgcagcatgctgcccagactggagtgcagcggcgtgatcagcgccagctacaacctgcacctgcccgccgcctgcctgggcctgcccaagtgcagagactgcagcctgtgccccgccgccacccccagcggcaagtag

SEQ ID NO: 335056 - DNA, 405 bp, Artificial Sequence
  derived and/or modified sequence
atggagggcggaggtggcagtggaaataagacaactggcggactggccggattcttcggtgcgggtggtgccgggtactcacatgccgacctggcgggcgtgccactgacgggaatgaaccctctgtcgccctatttgaacgtggacccgcggtatttagtccaggacaccgatgaattcatacttccaacaggagctaataagacacggggccgattcgaactcgccttcttcacaatcggaggctgctgtatgaccggcgccttgtgggcaaatacacttggcagtctcgctctcctctactccgcgtttggggtgatcattgaaaaaacacgtggagccgaggatgaccttaataccgtcgccgccgggactatgaccgggatgctctataaatgtacctag

SEQ ID NO: 335057 - DNA, 516 bp, Artificial Sequence
  derived and/or modified sequence
atggagggtggaggcggtagcggaaacaaaaccaccggaggacttgcaggcttcttcggtgccgggggcgccggatactcacatgctgatcttgccggcgtgcccctcacaggcatgaaccccctatctccatatctgaatgtcgacccccgctatttagtgcaggacactgatgagttcatcctgcccacgggagccaacaagaccagagggagattcgagttggccttctttactatcggcgggtgctgcatgaccggggcagctttcggtgcaatgaatggtctgagactggggctgaaagagacccagaacatggcctggtctaaacccaggaacgtgcagatccttaacatggttacgaggcagggcgccctgtgggctaatacccttgggtcactggccctcttgtactctgcattcggtgttataattgagaagactcgtggcgccgaagacgatttgaacaccgtggccgcgggcaccatgacaggtatgctctacaagtgcacctag

SEQ ID NO: 335058 - DNA, 450 bp, Artificial Sequence
  derived and/or modified sequence
atgacaggcgccgcatttggcgctatgaatggactgcgcttgggccttaaggaaacccagaatatggcttggtccaaaccgcggaacgtccagatcttaaacatggtcacccgccagggcgcactgtgggcaaacacattgggatcattggcactgctgtatagcgcattcggggtgatcatcgagaaaacccgtggagccgaagatgatctgaatacagtggctgctgggactatgactggcatgctctacaagtgcacagccagtgcaagccagggagccggtatcgctgatggcgtgtctttcacccaatgctctatgttgccacgcctcgaatgttctggagtgatcagcgcttcctataacctgcatcttcccgccgcttgcctgggcttaccgaaatgtagggactgctctctgtgcccggctgctacgccatctgggaagtag

SEQ ID NO: 335059 - DNA, 405 bp, Artificial Sequence
  derived and/or modified sequence
atggagggcggcggcggcagcggcaacaagaccaccggcggcctggccggcttctttggagctggaggagctggctacagccatgctgacctggccggcgtgcccctgaccggcatgaaccccctgagcccctacctgaatgtggacccccgctacctggtgcaggacacagatgagttcatcctgcccaccggggccaacaagacccggggccgctttgagctggccttcttcaccatcggcggctgctgcatgaccggggccctgtgggccaacaccctgggcagcctggccctgctgtacagcgccttcggggtcatcatcgagaagaccagaggagcagaagatgacctgaacacagtggccgccggcaccatgacaggcatgctgtacaagtgcacctag

SEQ ID NO: 335060 - DNA, 516 bp, Artificial Sequence
  derived and/or modified sequence
atggagggcggcggcggcagcggcaacaagaccaccggcggcctggccggcttctttggagctggaggagctggctacagccatgctgacctggccggcgtgcccctgaccggcatgaaccccctgagcccctacctgaatgtggacccccgctacctggtgcaggacacagatgagttcatcctgcccaccggggccaacaagacccggggccgctttgagctggccttcttcaccatcggcggctgctgcatgaccggggccgccttcggggccatgaatggcctgcggctgggcctgaaggagacccagaacatggcctggagcaagcccagaaatgtgcagatcctgaacatggtgacccggcagggcgccctgtgggccaacaccctgggcagcctggccctgctgtacagcgcctttggagtcatcatcgagaagaccagaggagcagaagatgacctgaacacagtggccgccggcaccatgacaggcatgctgtacaagtgcacctag

SEQ ID NO: 335061 - DNA, 450 bp, Artificial Sequence
  derived and/or modified sequence
atgaccggggccgccttcggggccatgaatggcctgcggctgggcctgaaggagacccagaacatggcctggagcaagcccagaaatgtgcagatcctgaacatggtgacccggcagggcgccctgtgggccaacaccctgggcagcctggccctgctgtacagcgcctttggagtcatcatcgagaagaccagaggagcagaagatgacctgaacacagtggccgccggcaccatgacaggcatgctgtacaagtgcacagccagcgccagccagggcgccggcattgctgatggagtgtccttcacccagtgcagcatgctgccccggctggagtgcagcggggtcatcagcgccagctacaacctgcacctgcctgctgcctgcctgggcctgcccaagtgccgggactgcagcctgtgcccagctgccaccccatctgggaagtag

SEQ ID NO: 335062 - DNA, 405 bp, Artificial Sequence
  derived and/or modified sequence
atggagggcggcggcggcagcggcaacaagaccaccggcggcctggctggtttcttcggggcaggtggggcgggctactctcacgcggatctggctggtgttcccctgacagggatgaaccctctttctccgtacctcaacgtcgaccctaggtatctagtgcaggatacggatgaattcattctacccactggcgctaataagaccagaggaagatttgagctggcctttttcacaatcggtggctgctgcatgacaggcgccctgtgggcaaacacactggggagcctggccctactgtattccgcttttggcgtcataattgaaaagactaggggcgccgaagacgacttaaacacagtagctgcgggtactatgacaggaatgctttacaagtgcacctag

SEQ ID NO: 335063 - DNA, 516 bp, Artificial Sequence
  derived and/or modified sequence
atggagggcggcggcggcagcggcaacaagaccaccggcggcctggcgggatttttcggagctggcggtgcagggtactctcacgcagatctggccggcgtgcctttgacaggcatgaatccccttagcccctatttaaatgtggatcctcgctacctcgtccaggatacagatgagttcatcttgcctaccggcgccaataaaacaagaggacggttcgaactggccttctttaccattggaggatgctgcatgacaggcgccgctttcggcgccatgaacggcctgaggctgggactgaaagaaactcagaatatggcctggagcaagccgcgtaatgtgcaaatccttaacatggtgacaaggcagggcgcactatgggcaaacaccctggggtcattggccctgctgtatagcgctttcggagttatcatagaaaaaacccgcggagccgaagacgatctgaacactgttgcagcaggaacgatgaccgggatgctgtataagtgtacttag

SEQ ID NO: 335064 - DNA, 450 bp, Artificial Sequence
  derived and/or modified sequence
atgaccggcgccgccttcggcgccatgaacggcctgcggctgggcctgaaagaaactcagaatatggcatggtcaaagccacgaaatgtgcagattcttaatatggttacccgccagggagccttgtgggctaatacactaggctcactcgccctgctgtattctgctttcggggtgattattgaaaaaacccggggtgctgaagacgacctgaacactgttgcagcaggtacaatgaccggcatgttgtacaagtgcaccgcgtccgccagtcagggcgccggaatcgccgacggcgtctccttcactcaatgctctatgttgccaagactggagtgtagtggagtaatctctgcctcttacaacttgcacctcccggctgcgtgtcttggcctccccaagtgcagggactgttccttatgccccgcagctactccttccggtaagtag

SEQ ID NO: 335065 - DNA, 405 bp, Artificial Sequence
  derived and/or modified sequence
atggagggaggtggtggaagcgggaataagacaacaggagggctggccggattctttggtgctggcggagctgggtattcacacgccgacttggctggtgtgcctctcactggtatgaatcccctttccccatacctgaacgttgaccccaggtatctggttcaggacactgatgagttcatccttcccacaggcgctaataagacaagaggtcgctttgagttggctttctttacaattggtggctgttgtatgaccggcgctctctgggcgaatacactgggatctctggctctgctgtactcagctttcggtgtcattatagagaaaacccgcggtgccgaagacgacctcaacacggtcgctgccggtactatgaccggtatgctgtataagtgcacgtag

SEQ ID NO: 335066 - DNA, 516 bp, Artificial Sequence
  derived and/or modified sequence
atggaaggaggcggaggatccggtaacaagacaacaggcggtctggccggtttttttggcgcaggcggagccggatatagtcatgctgacctggccggagtccccttgaccgggatgaatccactgtcaccgtacctgaatgtcgacccacgctacttggtgcaggacaccgacgagtttatcctgcctaccggcgctaataagacaagggggaggtttgaactggccttcttcactatcggcggatgttgtatgaccggcgcagctttcggagcgatgaatgggctaagacttggactcaaagaaacacaaaacatggcctggagcaagccaaggaatgttcagatactcaatatggttactagacagggggcactgtgggccaacaccctgggctccctcgcactgctgtattctgcgttcggtgtcattattgagaaaacacgcggagctgaagacgacctcaacaccgtagcagcgggaaccatgacgggcatgctgtacaagtgcacctag

SEQ ID NO: 335067 - DNA, 450 bp, Artificial Sequence
  derived and/or modified sequence
atgactggggcagcgttcggcgcaatgaatgggctgaggctggggctgaaggaaactcagaacatggcctggtcaaaaccaagaaatgtgcaaatcctgaacatggtgacccgacaaggggctctctgggctaataccctcggttctctggcactgctttattccgcctttggagtgatcattgagaagacacggggagcagaagatgacctcaacaccgttgcagccggtaccatgacagggatgctctataagtgcacggctagcgctagtcagggagctggaatcgcagatggcgtgtccttcacccaatgtagtatgctcccacgtctagagtgctcgggcgtgatctccgctagttacaatctgcacctgcccgcagcttgtctgggccttcccaagtgtagagattgcagtctttgcccggctgctacaccttctgggaaatag

SEQ ID NO: 335068 - DNA, 508 bp, Artificial Sequence
  derived and/or modified sequence
aggcgctggcaacgcggggttacccgctgttattgaggagtaacggcccagcggaccacccaggcttgaggcagcggcgggaaccactcggtttgctgcgataccatggaaggaggcgggggaagcggcaacaaaaccacagggggattggccggctttttcggagccggcggagcaggttactcgcacgcggatttggctggcgtcccgctaactggtatgaaccctctgtctccttatttaaatgtggatccacgatacctcgtgcaggatacagatgagtttattttacctaccggagctaataaaacccggggcagatttgagctggccttctttacgattggaggatgttgcatgacaggggcactttgggctaatactctaggttctctggctttgctctatagtgcatttggtgtcatcattgagaaaacacgaggtgcagaagatgaccttaacacagtagcagctggaaccatgacaggcatgttgtataaatgtacag

SEQ ID NO: 335069 - DNA, 638 bp, Artificial Sequence
  derived and/or modified sequence
gaaggtcagcgtgtgaagtaggcgctggcaacgcggggttacccgctgttattgaggagtaacggcccagcggaccacccaggcttgaggcagcggcgggaaccactcggtttgctgcgataccatggaaggaggcgggggaagcggcaacaaaaccacagggggattggccggctttttcggagccggcggagcaggttactcgcacgcggatttggctggcgtcccgctaactggtatgaaccctctgtctccttatttaaatgtggatccacgatacctcgtgcaggatacagatgagtttattttacctaccggagctaataaaacccggggcagatttgagctggccttctttacgattggaggatgttgcatgacaggggctgcgtttggtgcaatgaatggtcttcggctaggattgaaggaaacccagaacatggcctggtccaaaccaagaaatgtacagattttgaatatggtgactaggcaaggggcactttgggctaatactctaggttctctggctttgctctatagtgcatttggtgtcatcattgagaaaacacgaggtgcagaagatgaccttaacacagtagcagctggaaccatgacaggcatgttgtataaatgtacag

SEQ ID NO: 335070 - DNA, 1156 bp, Artificial Sequence
  derived and/or modified sequence
gtgtgaagtaggcgctggcaacgcggggttacccgctgttattgaggagtaacggcccagcggaccacccaggcttgaggcagcggcgggaaccactcggtttgctgcgataccatggaaggaggcgggggaagcggcaacaaaaccacagggggattggccggctttttcggagccggcggagcaggttactcgcacgcggatttggctggcgtcccgcgatacagatgagtttattttacctaccggagctaataaaacccggggcagatttgagctggccttctttacgattggaggatgttgcatgacaggggctgcgtttggtgcaatgaatggtcttcggctaggattgaaggaaacccagaacatggcctggtccaaaccaagaaatgtacagattttgaatatggtgactaggcaaggggcactttgggctaatactctaggttctctggctttgctctatagtgcatttggtgtcatcattgagaaaacacgaggtgcagaagatgaccttaacacagtagcagctggaaccatgacaggcatgttgtataaatgtacagcctcggcctcccaaggtgccgggattgcagatggagtctcgttcactcagtgctcaatgttgcccaggctggagtgcagtggcgtgatctcggctagctacaacctccacctcccagccgcctgccttggcctcccaaagtgccgagattgcagcctctgcccggctgccaccccgtctgggaagtgaggagcgtctctgcctggccgcccatcgtctgggatgtgaggagcccctctgcccgggctgcccagtctgggaagtgaggagcgccttttcccggctgccatcccgtctaggaagtgaggagcgtctcggcccggccacccatcgtctgagatgaggggagcgcctctgccccgccgccccgtctgggatgtgaggagcgcctctgcctggccgcgaccccgtctgggagtgtcagagatggctttggattccccgttctgtgtgctgctgtctggctcctgaacccagctgtagaggtgtgtgtcaatcccaactggtgaagtactgagaagaagctacacaaaaggcagcaaagtattagtaagtgtacctctgacattttaaccacctctgactttt

SEQ ID NO: 335071 - DNA, 81 bp, Artificial Sequence
  derived and/or modified sequence
ttcctgatggacaagagcagcctgaccggcgccctgtgcagcatcaccctggccagcccctgcggcacccccggcatctag

SEQ ID NO: 335072 - DNA, 1239 bp, Artificial Sequence
  derived and/or modified sequence
atgccggttctggggatgacacccgccgacgacttttgccaagggaccaaagcagctctagccgggggcaccactatgatactcgaccacgtgttcccggataccggcgtttcattgctggccgcttatgagcaatggagggaaagagccgatagtgcggcttgctgcgattacagcctgcacgtggacatcaccaggtggcatgaatctataaaggaggagctggaagccctggtcaaggaaaaaggggtcaactcctttttagtgttcatggcttacaaagaccgctgccaatgcagtgattctcaaatgtatgaaatcttttcaatcatcagggatttgggggccctagcccaggtccacgccgaaaacggggatatagtggaagaggtggaagccgaagcagtctaccgagctgttaccatcgcaaagcaagctaactgtccattgtacgtcaccaaagtcatgagcaagggggctgccgacgcgatagcccaggctaagcggagaggggtagtagtttttggagagcccataacagcatctctgggcacagatggaagtcactactggtcaaagaattgggcaaaagccgctgccttcgttacgtccccaccggtgaatccagatcctacaaccgcagaccacctaacctgcctgctgtcaagcggcgacctgcaagttaccgggtccgcgcattgcacctttacaaccgcccaaaaggcagttggaaaggacaacttcgccctgatcccagagggcacgaatggcatcgaggagagaatgtctatggtctgggagaaatgtgtggctagtggaaagatggatgaaaatgagtttgtcgccgtgaccagcacaaacgcagccaagatttttaacttctaccctcggaagggacgggtggccgtaggttccgatgccgaccttgttatctggaacccaaaggccactaaaataatctccgcaaagactcacaatctcctggccgagatccacggggtgcccaggggactgtacgatgggccggtgcatgaagtgatggttccagcaaagccgggctccggagcccccgccagagcttcttgcccaggaaagatttctgttccgccagtgcgcaatttacaccaaagcggattctctttgtctggctcccaggcagacgaccacatcgcccgccgaaccgcgcaaaaaatcatggcccctcctggaggccggagcaacattacgtccctatcttag

SEQ ID NO: 335073 - DNA, 1239 bp, Artificial Sequence
  derived and/or modified sequence
atgcccgtattgggcatgactcctgcagatgacttttgtcaggggactaaagctgccctggctggggggaccacgatgattctggaccacgtgtttccagacacaggggtgtctcttctcgctgcctatgaacagtggcgggaacgggcagacagtgcggcctgttgtgattacagcctgcacgttgatattactcgatggcacgagtctattaaagaggaactagaagccctagtgaaggaaaaaggggtgaattccttcttggtgttcatggcctataaggacagatgccaatgctccgacagccagatgtatgaaatcttttcgatcatcagagatctgggagctctagcccaggtccacgcagagaatggggacatcgttgaggaagtggaggcggaagccgtctaccgggccgtcaccatcgcaaaacaggccaattgcccactttatgtcacaaaggtgatgtcaaagggtgctgcagacgctatagcccaggccaagagacgaggcgtggtggtgttcggcgaacccattactgcctcgctcggaaccgatggctcacactactggtcaaagaactgggctaaagctgccgctttcgtgacttctccccctgttaaccctgaccccacaaccgctgatcatctgacatgcctgttgtcaagcggcgacctgcaagtgacaggaagtgcacactgtacgtttactactgcacagaaggccgtagggaaggacaactttgccctgatacccgaaggtacaaacgggattgaagaacggatgagcatggtttgggaaaagtgcgtggccagtgggaagatggatgagaatgagttcgtagctgttacctctaccaacgcagctaagatctttaacttctaccctcgcaaggggagagtagctgtggggtccgatgctgatctggtgatttggaatcctaaagcaactaaaatcatttccgccaaaacacacaatcttctggccgaaatccatggcgtcccccgcggactgtacgacggaccagtgcacgaagtaatggtgccggccaagcctggttccggtgctccagccagagcctcctgtcccggcaaaatctccgtaccgccagtgagaaacttgcaccaatcgggcttcagcttgtctggatcccaggccgacgatcatattgcccgccgaactgcgcaaaaaattatggcccctcccgggggaaggtctaatatcacttctctgagttag

SEQ ID NO: 335074 - DNA, 1239 bp, Artificial Sequence
  derived and/or modified sequence
atgcctgtgctgggcatgaccccagcagatgacttctgccagggcaccaaggccgccctggccggcggcaccaccatgatcctggaccacgtgtttcctgacacaggagtgtccctgctggccgcctatgagcagtggagggagagagctgacagcgctgcctgctgtgactacagcctgcacgtggacatcacccgctggcatgagagcatcaaggaggagctggaggccctggtgaaggagaagggcgtgaacagcttcctggtgttcatggcctacaaggaccgctgccagtgcagcgacagccagatgtatgagatcttcagcatcatccgggacctgggcgccctggcccaggtgcatgctgaaaatggagacatcgtggaggaggtggaggccgaggccgtgtacagagctgtgaccatcgccaagcaggccaactgccccctgtatgtgaccaaggtgatgagcaaaggagctgctgatgccatcgcccaggccaagagaagaggagtggtggtgtttggagagcccatcacagccagcctgggcacagatggcagccactactggagcaagaactgggccaaggctgctgcctttgtgaccagcccccctgtgaacccagaccccaccacagctgaccacctgacctgcctgctgagcagcggggacctgcaggtgactggaagtgcccactgcaccttcaccacagcccagaaggctgtgggcaaggacaactttgccctgatccctgagggcaccaacggcatcgaggagaggatgtccatggtgtgggagaagtgtgtggccagcggcaagatggatgaaaatgaatttgtggccgtgaccagcaccaatgctgccaagatcttcaacttctaccccaggaagggccgggtggccgtgggcagtgatgctgacctggtgatctggaaccccaaggccaccaagatcatcagcgccaagacccacaacctgctggccgagatccacggcgtgccccggggcctgtatgatggccctgtgcatgaggtgatggtgcctgccaagccaggcagcggggccccagcccgggccagctgccctgggaagatctctgtgccccctgtgaggaacctgcaccagagcggcttcagcctgagcggcagccaggctgatgaccacatcgcccggaggacagcccagaagatcatggcccctcctgggggccgcagcaacatcaccagcctgtcctag

SEQ ID NO: 335075 - DNA, 1239 bp, Artificial Sequence
  derived and/or modified sequence
atgcccgtgctgggcatgacccccgccgacgacttctgccagggcaccaaagccgctctcgctggaggcacaactatgatcctggaccacgtattccctgataccggagtctctctcttagccgcctacgaacagtggagggaacgagctgactcggccgcttgttgcgattacagtctgcatgtggacattacgcggtggcatgaatctatcaaggaggaacttgaagccttagtgaaggagaagggtgtgaattcattcctggtgttcatggcctataaggacaggtgtcaatgctcagactcgcagatgtacgagattttctcgatcatccgagacctcggcgctctagcacaagtacatgccgagaacggcgatattgtcgaggaagtcgaggccgaagcagtgtacagggctgtcacgatcgccaaacaggccaactgtcctctgtacgtgaccaaggtgatgtcgaagggcgccgctgatgccatcgcccaggcgaagcgtcggggcgtggtggtgttcggcgaaccaattactgccagcctcggaacggacggctcacactattggagcaagaactgggccaaggcggccgccttcgttacttctcccccggtcaatcccgatccgaccacagccgatcacctcacatgcctcctgtctagtggcgatttacaggtgaccggatcggcacattgtaccttcaccacagctcaaaaagccgtgggaaaggacaattttgcattaatcccagagggaaccaatggtatcgaagaacggatgtccatggtgtgggaaaaatgtgtggcttccggcaagatggacgaaaatgagttcgtagccgtgacatctaccaatgcagccaagatctttaatttctatccaagaaagggtcgggtggccgtcggctctgatgctgatctggtgatctggaacccaaaagcgaccaagataatctctgctaaaacacacaatctgcttgcggagattcacggagtgccgcgaggactatacgacggacccgtgcatgaggtgatggtgcccgcaaaacccggatctggcgctccagcaagggcgtcttgccctggcaaaatctccgtaccaccggtgaggaatctgcaccaatcaggattttccctctccggaagtcaggccgacgaccacattgctcggagaacagcgcagaaaattatggccccacctggaggacgaagcaacatcaccagcctgtcttag

SEQ ID NO: 335076 - DNA, 1239 bp, Artificial Sequence
  derived and/or modified sequence
atgcccgtgctgggcatgacccccgccgacgacttctgccagggcactaaggcagcactcgctggaggaactactatgatcttagaccacgtgttccccgatacgggggtgtcactactggccgcctacgagcagtggcgagagagagcagatagcgctgcctgctgtgattatagtttgcatgtggacatcacccggtggcacgaatccataaaggaagaactggaagctctcgtgaaagagaaaggtgtgaacagcttcctggtcttcatggcatacaaagatcggtgccagtgttccgatagccagatgtatgagatcttttctattatcagagacttgggcgccctggcccaggtccatgctgagaacggtgacatcgtagaggaggtggaggcagaggccgtttaccgggccgtcacgattgctaagcaggccaactgccccctgtacgtgacaaaagtcatgtccaagggtgccgctgatgccatagcccaagccaagcgtaggggtgtcgtggtgttcggtgagccaattactgccagtttagggaccgatggttcccattactggagtaagaactgggccaaggccgcagcttttgtcacctctccccccgtcaacccggatcccaccacagccgatcatcttacatgcctcctgagttccggggatctgcaggtcacaggtagtgcccactgcaccttcaccaccgcacagaaagcggtgggcaaggacaactttgccctgattcctgaagggacaaatggaattgaggaacgaatgtctatggtgtgggaaaagtgcgtagcctctggaaaaatggacgagaacgaattcgtagctgttacctccacgaacgcggctaaaatttttaatttctaccccaggaaaggcagagtagccgtgggctccgatgccgacctggtgatctggaatccaaaagctaccaagatcatctcagcaaaaacccacaatctgcttgctgagatccacggggtgccccggggtctgtacgatggtcctgtgcatgaagtgatggttccagcaaagcctggatcgggtgctccagcaagagcttcatgcccagggaagatcagtgtgccgcctgttcggaaccttcaccagtctgggttctcactgtccggaagtcaggccgacgaccacatcgctaggcggactgcacagaaaattatggctccaccagggggcaggagcaacataacttcattaagctag

SEQ ID NO: 335077 - DNA, 1239 bp, Artificial Sequence
  derived and/or modified sequence
atgcccgtcctcggcatgacccccgctgacgatttctgccagggcactaaagcagccttggctggaggtacaaccatgatcctcgatcatgtgtttccagacacaggtgtatcgctccttgcagcctacgaacagtggagggaacgagcagactcggccgcatgctgcgattatagtcttcacgtcgatatcacccgctggcacgaatcaataaaagaggaactggaggccctggtgaaggagaagggagtaaattctttcctggtgtttatggcatataaggacagatgccagtgtagcgacagtcagatgtacgagattttttccataatccgcgaccttggagcattagctcaggtccacgcagaaaatggggacatcgtggaggaggtggaggctgaggccgtataccgagctgttaccattgcgaagcaagcaaattgtcccctatacgtcaccaaagtgatgtctaaaggagctgccgatgctatagcccaggccaaacgcaggggcgtggtcgtgttcggcgagcccattactgctagtctcggcaccgatgggtctcactactggtctaaaaattgggctaaggccgctgccttcgtgaccagtcctcctgtgaatcctgatcctacgacagccgaccacctaacctgcctgctctccagtggcgatcttcaggtcacaggaagtgcccattgtaccttcacaacagcccagaaggctgtgggaaaagacaacttcgcgcttatacccgagggcaccaatggaattgaggaaagaatgagtatggtctgggagaagtgtgtggcatccggtaagatggatgaaaacgaatttgtggcagtgacctccacaaacgccgctaagatcttcaacttctaccccaggaagggcagggtggcagtgggtagcgatgctgatctggttatctggaatccgaaggcaaccaaaatcatcagtgccaaaacgcacaacttgcttgccgaaatacatggagtcccaaggggcttgtacgacggcccagtgcatgaggtaatggttccagcgaaacctggatccggggctccagcacgcgcatcctgtcccggtaaaatctctgtaccccctgttagaaatctgcatcagtccgggttttctttaagcggatcccaagccgatgaccatatcgcgaggaggaccgcccagaagatcatggctccacccggaggtcggtcaaacattacctcgctcagctag

SEQ ID NO: 335078 - DNA, 1239 bp, Artificial Sequence
  derived and/or modified sequence
atgccagtcctcggcatgaccccggctgacgacttctgccagggcaccaaggccgctctcgctggcggaaccaccatgatcttggaccacgtgtttcctgacacgggagtgtcgctgctggccgcatacgagcagtggagggaacgcgctgacagtgctgcttgctgcgattactccctgcacgttgacatcacacggtggcacgagagtattaaagaggaactcgaggcgttggtcaaggagaagggggtcaatagttttctggtgttcatggcatacaaagatagatgccagtgcagtgacagtcagatgtacgagatcttctccattatccgcgacctgggtgctctggcccaggtccacgccgaaaacggagatatcgtggaggaagttgaggcagaggcagtctatagggctgtgactatagcaaaacaggctaactgtcctctctatgtgaccaaggttatgtcgaaaggggcagcggacgcaatcgctcaggccaaacggagaggtgtggtcgtctttggcgaacctatcacggccagccttggtaccgacggctcacactattggagcaaaaactgggccaaggccgcagcctttgtgactagtccccctgtgaatcccgatcccaccacagctgatcacctcacatgtttgcttagcagcggagacttgcaggtaacaggttctgctcactgcaccttcaccactgcccaaaaggctgtgggaaaggataacttcgctttgatccctgaaggtaccaatggcatcgaggagcgcatgtccatggtatgggaaaagtgcgtcgccagcggaaagatggacgagaacgaatttgtcgccgtgacctctaccaacgcagcgaagatctttaatttttatcccagaaaaggcagagtagccgtcggcagcgatgctgatctggtcatatggaatccaaaagcaaccaaaatcatcagtgccaaaacacacaacctgctagccgaaatccacggagtacctcggggactctatgatggacccgtgcacgaagtgatggtgcctgctaagccaggaagtggtgccccagcccgtgcctcttgcccaggcaagattagtgtgcccccagttcggaaccttcatcagtccgggttctcactgagcggaagccaggcagacgaccacatcgctagacggactgcccaaaagattatggccccacccggagggaggtccaacattacctcactctcatag

SEQ ID NO: 335079 - DNA, 1239 bp, Artificial Sequence
  derived and/or modified sequence
atgcccgtgctgggcatgacccccgccgacgacttctgccagggcaccaaggccgccctggccggcggcaccaccatgatcctggaccacgtgttccccgacaccggcgtgagcctgctggccgcctacgagcagtggagagagagagccgacagcgccgcctgctgcgactacagcctgcacgtggacatcaccagatggcacgagagcatcaaggaggagctggaggccctggtgaaggagaagggcgtgaacagcttcctggtgttcatggcctacaaggacagatgccagtgcagcgacagccagatgtacgagatcttcagcatcatcagagacctgggcgccctggcccaggtgcacgccgagaacggcgacatcgtggaggaggtggaggccgaggccgtgtacagagccgtgaccatcgccaagcaggccaactgccccctgtacgtgaccaaggtgatgagcaagggcgccgccgacgccatcgcccaggccaagagaagaggcgtggtggtgttcggcgagcccatcaccgccagcctgggcaccgacggcagccactactggagcaagaactgggccaaggccgccgccttcgtgaccagcccccccgtgaaccccgaccccaccaccgccgaccacctgacctgcctgctgagcagcggcgacctgcaggtgaccggcagcgcccactgcaccttcaccaccgcccagaaggccgtgggcaaggacaacttcgccctgatccccgagggcaccaacggcatcgaggagagaatgagcatggtgtgggagaagtgcgtggccagcggcaagatggacgagaacgagttcgtggccgtgaccagcaccaacgccgccaagatcttcaacttctaccccagaaagggcagagtggccgtgggcagcgacgccgacctggtgatctggaaccccaaggccaccaagatcatcagcgccaagacccacaacctgctggccgagatccacggcgtgcccagaggcctgtacgacggccccgtgcacgaggtgatggtgcccgccaagcccggcagcggcgcccccgccagagccagctgccccggcaagatcagcgtgccccccgtgagaaacctgcaccagagcggcttcagcctgagcggcagccaggccgacgaccacatcgccagaagaaccgcccagaagatcatggccccccccggcggcagaagcaacatcaccagcctgagctag

SEQ ID NO: 335080 - DNA, 1545 bp, Artificial Sequence
  derived and/or modified sequence
gatgcctgtcctgggcatgacaccggctgacgacttctgtcagggcaccaaggcagcgctagcaggaggaaccaccatgatcttggaccacgtcttccccgacacgggtgtgagcctgctggcggcctacgagcagtggcgggagcgggcggacagcgcggcctgctgcgactactccctgcacgtggacatcacccgatggcatgagagcatcaaggaggagctggaggccctggtcaaggagaagggtgtgaactccttcctggtcttcatggcatacaaggaccggtgccagtgcagcgacagccagatgtacgagatcttcagcatcatccgggacctgggggccttggcccaggtgcacgctgagaacggggacatcgtggaggaggtggaggctgaggcggtgtaccgagctgtcaccatcgccaagcaggcaaactgcccgctgtacgtcaccaaggtgatgagcaagggggcggccgacgccatcgctcaggccaagcgcagaggggtggtcgtgtttggggagcccatcaccgccagcctgggcaccgacggttcacactactggagcaagaactgggccaaggccgcagccttcgtcacatcaccccctgtcaacccagaccccaccacggcggaccacctcacctgcttgctgtccagcggggacctccaggtgacaggcagcgcccactgcaccttcaccactgcccagaaggctgtgggcaaggacaacttcgcgctgatccccgagggcaccaacggcattgaggagcgcatgtcgatggtctgggagaaatgtgtggcctctgggaagatggacgagaatgagttcgtcgcggtgaccagtacaaatgctgccaaaatcttcaatttttacccaaggaaggggcgagtggctgtgggctctgacgctgacctggtcatatggaaccccaaggccaccaagatcatctctgccaagacccacaatctgctggcggagatccacggtgtgccccgtggactgtatgacgggcccgtccacgaggtgatggtgcctgccaagccagggagtggcgctccggcccgcgcgtcctgcccaggcaagatctccgtccctcctgtgcgcaacctacatcagtcggggttcagcctatctgggtctcaggctgatgaccacatcgcccgacgcacagcacagaagatcatggcaccacctggcggccgctccaacatcacctctctctcctagacgcccaggaccggccctgtgagccgtgctggccccacccgaggccgcgggggccccagggcactcgcccccctccttagcattttcttttgtagaagtttctcgaaggtgcttggcggtcttgccttccccctccccacaggctctccttgtggggtcccaggtcctgctgccaagagcccctcaagagaagggctgaacctggggagatgtcactgccagggtgaggtggagccacatggcagggacaatgccggcagcctgagcccaggcaccccagtgcccgctgggcccagcctggggac

SEQ ID NO: 335081 - DNA, 414 bp, Artificial Sequence
  derived and/or modified sequence
atggctgccctgtctcgggcgctgggaccactcagaactccggcccctccactgtggatcggtctgtttctggtggctactggaagccagcagagcctggctcaaccattgcctggaaatacgaccgaggctacaccgcggtctctcagagcctcaggatctctttgcggccctcatgccaaggcgccatatctctgtgaggccacccatgaacccgccgctgcacgaatccgcgctcaagtgcccgatacacggtggtctcgagtcgggggtcagaggttttactctagagtactgagccccctgcaccgtggtcccagtggccataccgaggctagcgcccagcgttcccacatggggaaactcaaggaaccccagccccaggaccacaagcccggtctgggggcatcgtag

SEQ ID NO: 335082 - DNA, 699 bp, Artificial Sequence
  derived and/or modified sequence
atgatctacatagaccggattgaggtggtgaatatgctggccccctacgcggtgtttgacattgtgcgaaattatacggcagattatgataagaccctaatctttaataaaatccaccacgaactcaaccaattttgtagtgcccacactctccaggaagtatatattgagctgttcgaccagatcgatgagaacctgaaacaggctctacagaaagacctgaatcttatggcacctggactcacaattcaggccgtgcgggtcacaaagcctaaaatcccagaagccatacgtcgcaatttcgagcttatggaggctgaaaaaacgaaactcctgatcgccgcacagaaacagaaagtggttgagaaggaggccgaaacagagcgaaaaaaagcagtgatcgaggcagagaagatcgcccaggtagctaagatccgattccagcagaaagtgatggaaaaggagaccgagaagaggatctccgaaatcgaggatgccgccttcctggctcgggaaaaagccaaggcggacgccgaatattatgctgcccacaaatatgcgaccagcaacaagcataaacttacacctgaatacctagaacttaaaaagtaccaggctatcgcctcaaactccaagatttattttggaagcaacatccccaacatgttcagcatctccagatgcggccctcgaggctag

SEQ ID NO: 335083 - DNA, 699 bp, Artificial Sequence
  derived and/or modified sequence
atgatctacatcgacagaattgaggtggtgaacatgctggccccctatgctgtgtttgatattgtgaggaactacacagctgactatgacaagaccctcatcttcaacaagatccaccacgagctgaaccagttctgcagcgcccacaccctgcaggaggtgtacatcgagctgtttgaccagattgatgagaacctgaagcaggccctgcagaaggacctgaacctgatggcccctggcctgaccatccaggccgtgcgggtgaccaagcccaagatccctgaggccatcagaagaaactttgagctgatggaggccgagaagaccaagctgctgattgctgcccagaagcagaaggtggtggagaaggaggccgagacagagaggaagaaggccgtcatcgaggccgagaagatcgcccaggtggccaagatccgcttccagcagaaggtgatggagaaggagacagagaagaggatcagcgagattgaagatgctgccttcctggcccgggagaaggccaaggcagatgctgagtactatgctgcccacaagtatgccaccagcaacaagcacaagctgaccccagagtacctggagctgaagaagtaccaggccatcgccagcaacagcaagatctacttcggcagcaacatccccaacatgttcagcatcagccgctgtggcccccggggctag

SEQ ID NO: 335084 - DNA, 699 bp, Artificial Sequence
  derived and/or modified sequence
atgatctacatcgaccggatcgaggtggtgaacatgctggccccctacgcagtatttgacatcgtgaggaattataccgccgattatgacaagacactgatcttcaataaaatccatcatgaactgaatcagttctgcagtgcacatactctccaggaagtctacattgagttgttcgatcaaatagacgaaaacctgaagcaggccctgcaaaaggacctcaacttgatggcacccggcctgacgatccaggctgtgagagtaactaagccaaaaatcccggaagcgatccgacgcaatttcgaactgatggaggcggagaaaaccaagttgcttattgccgcacagaagcaaaaggttgtggagaaggaggccgagacagagcggaagaaggcggtcatcgaagccgagaagattgctcaagtggcgaagattcggtttcagcagaaggttatggagaaggaaacagagaagcgaatctccgagatcgaagacgctgcgtttctggctcgcgaaaaggcaaaagccgatgctgaatactacgccgcccacaaatatgctacctctaataaacacaaactgacacctgagtatttagaactcaaaaaataccaggcaatcgcttctaattcaaaaatctattttgggtctaacattccaaatatgttctccatcagtcgctgtggcccaagaggttag

SEQ ID NO: 335085 - DNA, 699 bp, Artificial Sequence
  derived and/or modified sequence
atgatctatatcgatcgcatcgaggtggtgaacatgcttgcaccgtacgcagtcttcgacatcgttagaaactacaccgccgattacgacaagacgctgatttttaataagattcaccatgaacttaaccagttctgcagcgctcatacgctgcaagaggtctacatcgagttgtttgaccagatcgacgagaacctcaaacaggcactgcagaaagacctgaacctaatggcaccagggctgacgatacaggccgtgagggttactaagcccaaaatccccgaggctatccgacggaacttcgagctgatggaggccgagaagaccaagctacttatcgctgctcagaaacagaaagtggtggagaaggaagcggagacagagagaaaaaaggctgtcattgaagcggagaagattgctcaagtggcgaaaattaggtttcagcagaaggtgatggaaaaggagaccgagaaaagaatcagcgagattgaggatgccgcttttctggcaagagaaaaagccaaagctgacgcagagtactacgccgctcacaaatacgccacttctaacaagcacaaattgacgccagagtatttggaactgaaaaagtaccaggctatcgcttcaaactctaaaatctacttcggctcaaatatccccaatatgttctctatttccagatgcggacccagaggatag

SEQ ID NO: 335086 - DNA, 699 bp, Artificial Sequence
  derived and/or modified sequence
atgatctacatcgacagaatcgaggtggtgaacatgctggccccctacgccgtgttcgacatcgtgagaaactacaccgccgactacgacaagaccctgatcttcaacaagatccaccacgagctgaaccagttctgcagcgcccacaccctgcaggaggtgtacatcgagctgttcgaccagatcgacgagaacctgaagcaggccctgcagaaggacctgaacctgatggcccccggcctgaccatccaggccgtgagagtgaccaagcccaagatccccgaggccatcagaagaaacttcgagctgatggaggccgagaagaccaagctgctgatcgccgcccagaagcagaaggtggtggagaaggaggccgagaccgagagaaagaaggccgtgatcgaggccgagaagatcgcccaggtggccaagatcagattccagcagaaggtgatggagaaggagaccgagaagagaatcagcgagatcgaggacgccgccttcctggccagagagaaggccaaggccgacgccgagtactacgccgcccacaagtacgccaccagcaacaagcacaagctgacccccgagtacctggagctgaagaagtaccaggccatcgccagcaacagcaagatctacttcggcagcaacatccccaacatgttcagcatcagcagatgcggccccagaggctag

SEQ ID NO: 335087 - DNA, 1041 bp, Artificial Sequence
  derived and/or modified sequence
atggagagcgaggaggtgtaccagcgacaggtgctgagcatttcctgtataattttcgggatagtgatagttgggatgttttgtgccgcattctacttcaaatccaagaaacaagctaagcagattcaggaacagttgaaggtcccccagaacggaaagagctacagcctgaaggcatcctctactatggctaaaagtgaaaacctggtgaagtcccacgtccagctgcaaaattattctaaggttgaaagacaccctgttaccgctttggagaagatgatggaaagcagctttgtggggccccaatcctttccggaagtgcctagccccgatcgcgggagccagagtgtaaaacaccacagaagtctgagttcttgctgcagtccgggccaacgctccgggatgttacatcgcaacgccttcaggcgcacgccaccctcaccaagatccaggctggggggtattgtcggtcctgcctaccagcagctggaagagtcacggatccctgaccaggatactattccctgccaagggtactcaagctctggcctcaagacacaacggaatacctctataaacatgcagttgccctccagagagacaaacccatactttaattccctggaacagaaggatcttgtgggatattctagcactagagctagctccgtgcccatcatccctagcgttggactcgaggagacatgcctgcaaatgcctggaatctccgaagtgaagtccatcaagtggtgcaagaactcatactccgcagacgtggtaaacgtgtccatccccgtgtctgactgtctgattgccgaacaacaagaggtgaaaatcctcctcgagacggttcaagagcagattagaattctcacagacgcccgcaggtctgaggattatgaactggccagcgtagaaacagaggatagtgccagcgagaataccgcttttctgcctctgagccccacggccaaaagtgaacgggaggcccaattcgtcctgaggaacgagattcagcgtgacagtgctctcactaaatag

SEQ ID NO: 335088 - DNA, 1041 bp, Artificial Sequence
  derived and/or modified sequence
atggaaagcgaagaagtctaccaaagacaggtgctgtcgatcagttgcataatatttggcatcgtgattgtgggcatgttttgtgctgctttctactttaagtctaagaaacaggctaaacagattcaggagcagctgaaagtgccacagaatgggaaatcctatagcctgaaggcttcatctactatggccaagtccgaaaacttagtcaaatcccatgtacagctacagaactattccaaggtggagcggcaccctgtgaccgcgcttgagaaaatgatggaatcatcatttgtaggtccacaatctttccctgaggttcccagtcctgacaggggaagccagtcggtaaaacatcacaggtccctatcaagttgctgttcaccaggccaacgaagcgggatgttacaccggaatgcgtttaggagaacacctccgtcccctagatcccgcctggggggtattgtcggccctgcataccagcagctggaagaaagtcggataccagatcaagataccatcccgtgtcagggatacagctcctcaggcctcaaaacacaacggaatacctccatcaacatgcagctgcccagtcgggagaccaacccatattttaattcgctcgaacagaaagacttagtggggtattcctcaacacgcgcaagttcggtgccaattattccctccgtgggtctggaggagacatgccttcagatgcccggtatttccgaggttaagtcaataaaatggtgcaagaactcctatagcgcggatgtggttaatgtgtcaataccagtttcagattgtcttatcgccgagcagcaggaagtgaaaattttgctggagactgttcaggagcaaatcaggatcttgactgatgcccggcgaagtgaggactacgaactggcttccgtggagactgaagattcagcgtcagagaacacagcatttcttcctctttcaccgaccgccaagtccgaaagggaagcacaatttgtgctccggaatgaaattcagcgtgactcggccctgactaaatag

SEQ ID NO: 335089 - DNA, 1041 bp, Artificial Sequence
  derived and/or modified sequence
atggagagcgaggaggtgtaccagaggcaggtgctgagcatcagctgcatcatctttggaattgtgattgtgggcatgttctgtgccgccttctacttcaagagcaagaagcaggccaagcagatccaggagcagctgaaggtgccccagaatggcaagagctacagcctgaaggccagcagcaccatggccaagtctgagaacctggtgaagagccacgtgcagctgcagaactacagcaaggtggagcggcaccctgtgacagccctggagaagatgatggagagcagctttgtgggcccccagagcttccctgaggtgcccagcccagaccggggcagccagagcgtgaagcaccacaggagcctgagcagctgctgcagccctggccagaggagcggcatgctgcacagaaatgccttccggaggaccccacccagccccaggagccggctgggcggcatcgtgggccctgcctaccagcagctggaggagagccgcatcccagaccaggacaccatcccctgccagggctacagcagcagcggcctgaagacccagaggaacaccagcatcaacatgcagctgcccagccgggagaccaacccctacttcaacagcctggagcagaaggacctggtgggctacagcagcacccgggccagctctgtgcccatcatccccagcgtgggcctggaggagacctgcctgcagatgcctggcatcagcgaggtgaagagcatcaagtggtgcaagaacagctacagcgcagatgtggtgaatgtgtccatccctgtgtctgactgcctgattgctgagcagcaggaggtgaagatcctgctggagaccgtgcaggagcagatccgcatcctgacagatgccaggagaagtgaggactatgagctggcctctgtggagacagaggacagcgcctctgaaaatacagccttcctgcccctgagccccacagccaagtctgagcgggaggcccagtttgtgctgagaaatgagatccagagggacagcgccctgaccaagtag

SEQ ID NO: 335090 - DNA, 1041 bp, Artificial Sequence
  derived and/or modified sequence
atggagagcgaggaggtgtaccagcggcaggtgctgagcatcagctgtatcatctttggaatcgtcattgtgggcatgttttgtgccgctttctattttaagagtaaaaaacaggccaagcagatacaggaacaactgaaggttccacagaacgggaagtcctattccctgaaagcttcaagcacaatggcaaagtcagagaaccttgttaaatcccatgtccagctgcagaactacagtaaagttgagcgtcatccggtaacggctctcgagaaaatgatggagtcctcttttgtgggtccgcagtcgttcccagaagttcctagtcccgaccggggtagccagagtgtgaaacaccacaggagcctaagcagctgctgtagcccaggtcagagaagtggaatgcttcataggaatgccttccggagaacaccccctagtcccaggtccagattgggcgggatcgtggggccagcttaccaacagctggaagaatcccgcatcccagaccaggacactattccttgtcaagggtatagctcctctggtttgaaaactcagagaaacacttccatcaacatgcaactgccttctcgcgagacgaatccttacttcaacagcctggaacagaaagacctggtgggatactcctctactcgggcgagctctgtaccaataatcccaagcgtgggtctcgaggagacgtgtctgcagatgcccggcatctcggaggtcaaatcaataaaatggtgtaaaaattcttacagcgccgacgtcgtgaatgtgtcaattcccgtcagcgactgccttatcgcagagcaacaggaggtgaagattctactcgagacggttcaagagcaaatccgcattctgaccgacgcgcggcgttccgaggattacgaactagcttctgttgagaccgaggactccgccagcgagaacacggcattcctgcctctgagtcccaccgccaagtccgaaagagaggctcaatttgtcttgagaaacgagatccaacgagacagtgcacttaccaagtag

SEQ ID NO: 335091 - DNA, 1041 bp, Artificial Sequence
  derived and/or modified sequence
atggagagcgaggaggtgtaccagcggcaggtgctgagcatcagctgtatcatattcggtattgtgatcgtcggtatgttttgtgcagctttttacttcaagtctaagaagcaggcaaagcagattcaggagcaacttaaagttccccaaaacggtaaatcgtactcacttaaggcgagctccaccatggccaaatctgagaacctcgtcaagtcccatgtgcagctgcagaactactctaaggttgagcgtcacccagtgacggccctcgaaaaaatgatggaaagctcgttcgtcggaccacaatccttccccgaagtgccgtcccctgaccggggctcccagtctgtaaaacaccacagatccctttcatcttgctgcagccctggtcaaagatccggcatgttgcatcgtaatgctttccggaggacccccccttcaccccgcagcaggctggggggcatcgtgggccctgcgtatcaacagctcgaggagtcacggatacctgatcaggatacaatcccgtgccaaggttactcttcctcaggcttgaagacgcagaggaataccagcattaatatgcagctgcccagcagagagaccaatccatatttcaactctctggagcagaaggatcttgtcggctactcctctactagagctagttcagtccctataataccgagcgtaggtttggaagaaacttgtttacagatgcccggtatctccgaagtcaagagcataaagtggtgtaagaacagctattcagccgatgtcgtcaacgtaagcatcccagtctcagattgtctcatagccgaacagcaagaagtcaagatcttgctggaaactgtacaggagcagattcggatcttaaccgatgcacgccggagcgaggactacgagctggctagtgtggaaaccgaggacagcgccagtgaaaatactgcctttctccctctttcccccacggccaagtcggaacgggaggcccagtttgtcttgcggaatgagatccagagggactctgccctcacaaagtag

SEQ ID NO: 335092 - DNA, 1174 bp, Artificial Sequence
  derived and/or modified sequence
actgtagcagacagtgtctccaggcagggtactgagcaaagaggatagtgaaaagggcagtgaaacatcggcctttttcactggcaacttcaagactcactgcctacaatcagaccacttggggattgaattcatggagagtgaagaagtttatcaaaggcaggtgctgtcaatttcatgtatcatctttggaattgtcatcgtgggcatgttctgtgcagcattctacttcaaaagcaagaaacaagctaaacaaatccaagagcagctgaaagtgccacaaaatggtaaaagctacagtctcaaagcatccagcacaatggcaaagtcagagaacttggtgaagagccatgtccagctgcaaaattattcaaaggtggaaaggcatcctgtgactgcattggagaaaatgatggagtcaagttttgtcggcccccagtcattccctgaggtcccttctcctgacagaggaagccagtctgtcaaacaccacaggagtctatcctcttgctgcagcccagggcaaagaagtggcatgctccataggaatgccttcagaaggacacccccgtcaccccgaagtaggctaggtggaattgtgggaccagcatatcagcaactcgaagaatcaaggatcccagaccaggatacgataccttgccaagggtattcatccagtggtttaaaaacccaacgaaatacatcaataaatatgcaactgccttcaagagagacaaacccctattttaatagcttggagcaaaaggacctggtgggctattcatccacaagggccagttctgtgcccatcatcccttcagtgggtttagaggaaacctgcctgcaaatgccagggatttctgaagtcaaaagcatcaaatggtgcaaaaactcctattcagctgacgttgtcaatgtgagtattccagtcagcgattgtcttatagcagaacaacaagaagtgaaaatattgctagaaactgtccaggagcagatccgaattctgactgatgccagacggtcagaagactacgaactggccagcgtagaaaccgaggacagtgcaagcgaaaacacagcctttctccccctgagtcccacagccaaatcagaacgagaggcgcaatttgtcttaagaaatgaaatacaaagagactctgcattgaccaagtga

SEQ ID NO: 335093 - DNA, 1491 bp, Artificial Sequence
  derived and/or modified sequence
actgtagcagacagtgtctccaggcagggtactgagcaaagaggatagtgaaaagggcagtgaaacatcggcctttttcactggcaacttcaagactcactgcctacaatagacggggtttcaccgtgttaaccaggatggtctcaatttcctgacctcgtgatccgcctacctcggcctcccaaagtgctgggattacagaccacttggggattgaattcatggagagtgaagaagtttatcaaaggcaggtgctgtcaatttcatgtatcatctttggaattgtcatcgtgggcatgttctgtgcagcattctacttcaaaagcaagaaacaagctaaacaaatccaagagcagctgaaagtgccacaaaatggtaaaagctacagtctcaaagcatccagcacaatggcaaagtcagagaacttggtgaagagccatgtccagctgcaaaattattcaaaggtggaaaggcatcctgtgactgcattggagaaaatgatggagtcaagttttgtcggcccccagtcattccctgaggtcccttctcctgacagaggaagccagtctgtcaaacaccacaggagtctatcctcttgctgcagcccagggcaaagaagtggcatgctccataggaatgccttcagaaggacacccccgtcaccccgaagtaggctaggtggaattgtgggaccagcatatcagcaactcgaagaatcaaggatcccagaccaggatacgataccttgccaagggtattcatccagtggtttaaaaacccaacgaaatacatcaataaatatgcaactgccttcaagagagacaaacccctattttaatagcttggagcaaaaggacctggtgggctattcatccacaagggccagttctgtgcccatcatcccttcagtgggtttagaggaaacctgcctgcaaatgccagggatttctgaagtcaaaagcatcaaatggtgcaaaaactcctattcagctgacgttgtcaatgtgagtattccagtcagcgattgtcttatagcagaacaacaagaagtgaaaatattgctagaaactgtccaggagcagatccgaattctgactgatgccagacggtcagaagactacgaactggccagcgtagaaaccgaggacagtgcaagcgaaaacacagcctttctccccctgagtcccacagccaaatcagaacgagaggcgcaatttgtcttaagaaatgaaatacaaagagactctgcattgaccaagtgacttgagatgtaggaatctgtgcattctatgctttgctcaacaggaaagagaggaaatcaaatacaaattatttatatgcattaatttaagagcatctacttagaagaaaccaaatagtctatcgccctcatatcatagtgttttttaacaaaatatttttttaagggaaagaaatgtttcaggagggataaagcttaccattaaagcttttgggtagaattctgaatcc

SEQ ID NO: 335094 - DNA, 1041 bp, Artificial Sequence
  derived and/or modified sequence
atggagtcagaagaggtgtatcagcgacaggtgttatcaatcagctgtattatcttcgggattgtgattgtgggcatgttttgcgctgcattctatttcaaatcgaaaaagcaggcgaagcagatccaggaacaattgaaggtgcctcagaacggcaagtcttatagtctcaaggcgagttctaccatggctaagtcagagaacttagtgaaaagccatgtacagcttcagaactatagcaaagttgagcgacatccggtgaccgccctcgagaaaatgatggagtctagtttcgtcggccctcagagtttccccgaggtgcccagcccagacaggggttctcagagtgtgaaacaccataggtcccttagcagttgctgcagccccggtcaacgatctggaatgttacataggaatgctttcaggcgcacgccgccatctcctaggagccggcttggcggtatagtgggccctgcttaccagcagctggaagagagcaggatccctgatcaggacaccatcccttgccaagggtacagcagttcagggttgaagactcaacgaaataccagcatcaacatgcagctcccatccagagaaactaacccgtatttcaatagcctggagcagaaagacctggttggctatagcagcacccgagcctctagcgttccaataatcccatccgtgggtctggaagaaacatgtctgcagatgccaggaataagcgaagttaagtctattaaatggtgtaaaaactcatattcagcagacgtcgtcaatgtgagcatacccgttagcgactgtctcatagccgaacagcaagaagttaagattctgctggagaccgtccaagaacaaattagaattctgactgatgcacggaggagcgaggactatgagttggccagtgtcgagactgaggattcagcttcagaaaatacagcatttctgccactgagccccaccgcaaagagcgaacgagaagcccaattcgttttgcgtaacgagattcagcgcgacagcgctctgaccaagtag

SEQ ID NO: 335095 - DNA, 1041 bp, Artificial Sequence
  derived and/or modified sequence
atggagtccgaggaggtgtaccaaagacaggtcctgtccataagctgtattatatttggcatcgttatcgttggaatgttctgcgcagccttctatttcaaatcaaaaaaacaggccaagcagatccaagagcaactgaaagtgcctcagaacggcaagagctacagtctgaaagcatcatctaccatggcaaaatcagagaatctggttaagtctcacgttcagctccagaactacagcaaggtcgagcgccatcccgtaactgctctggagaagatgatggagtcttctttcgtcgggccacagagttttccagaagtaccctctccagatcgcggaagccaaagtgtgaaacatcacagatccctgagcagctgctgttcccctgggcagagatctgggatgcttcaccgcaacgctttccgacggacgcctccttcacctaggtcacgacttgggggtatagtgggcccagcttaccagcagctggaagagtctagaattccagatcaggacacaatcccttgccaaggctattcctcatccggattaaagacacagagaaacacttcaatcaacatgcaactacctagcagggagacaaacccatattttaattctctggagcagaaagaccttgtgggctactctagcacacgcgcttcttcagtacctattattccgtcagtcgggctggaggagacttgcctacagatgccaggtatcagcgaggtgaaaagcatcaagtggtgcaagaactcctattctgcagacgtggttaacgtgtctatccccgtcagcgattgcctgatagccgagcagcaggaggtgaaaatccttttggagactgtccaggagcagataagaattctcacggacgccagaaggtccgaggactacgagctcgccagcgtggaaacagaggatagcgcttcggagaacaccgcttttctgcctttaagtccgaccgccaaatccgagcgggaagcccagtttgtgctgcgcaacgaaatccagcgagatagcgcattgacaaaatag

SEQ ID NO: 335096 - DNA, 1041 bp, Artificial Sequence
  derived and/or modified sequence
atggagagcgaggaggtgtaccagagacaggtgctgagcatcagctgcatcatcttcggcatcgtgatcgtgggcatgttctgcgccgccttctacttcaagagcaagaagcaggccaagcagatccaggagcagctgaaggtgccccagaacggcaagagctacagcctgaaggccagcagcaccatggccaagagcgagaacctggtgaagagccacgtgcagctgcagaactacagcaaggtggagagacaccccgtgaccgccctggagaagatgatggagagcagcttcgtgggcccccagagcttccccgaggtgcccagccccgacagaggcagccagagcgtgaagcaccacagaagcctgagcagctgctgcagccccggccagagaagcggcatgctgcacagaaacgccttcagaagaaccccccccagccccagaagcagactgggcggcatcgtgggccccgcctaccagcagctggaggagagcagaatccccgaccaggacaccatcccctgccagggctacagcagcagcggcctgaagacccagagaaacaccagcatcaacatgcagctgcccagcagagagaccaacccctacttcaacagcctggagcagaaggacctggtgggctacagcagcaccagagccagcagcgtgcccatcatccccagcgtgggcctggaggagacctgcctgcagatgcccggcatcagcgaggtgaagagcatcaagtggtgcaagaacagctacagcgccgacgtggtgaacgtgagcatccccgtgagcgactgcctgatcgccgagcagcaggaggtgaagatcctgctggagaccgtgcaggagcagatcagaatcctgaccgacgccagaagaagcgaggactacgagctggccagcgtggagaccgaggacagcgccagcgagaacaccgccttcctgcccctgagccccaccgccaagagcgagagagaggcccagttcgtgctgagaaacgagatccagagagacagcgccctgaccaagtag

SEQ ID NO: 335097 - protein, 677 aa, Artificial Sequence
  derived and/or modified sequence
MVQKESQATLEERESELSSNPAASAGASLEPPAAPAPGEDNPAGAGGAAVAGAAGGARRFLCGVVEGFYGRPWVMEQRKELFRRLQKWELNTYLYAPKDDYKHRMFWREMYSVEEAEQLMTLISAAREYEIEFIYAISPGLDITFSNPKEVSTLKRKLDQVSQFGCRSFALLFDDIDHNMCAADKEVFSSFAHAQVSITNEIYQYLGEPETFLFCPTEYCGTFCYPNVSQSPYLRTVGEKLLPGIEVLWTGPKVVSKEIPVESIEEVSKIIKRAPVIWDNIHANDYDQKRLFLGPYKGRSTELIPRLKGVLTNPNCEFEANYVAIHTLATWYKSNMNGVRKDVVMTDSEDSTVSIQIKLENEGSDEDIETDVLYSPQMALKLALTEWLQEFGVPHQYSSRQVAHSGAKASVVDGTPLVAAPSLNATTVVTTVYQEPIMSQGAALSGEPTTLTKEEEKKQPDEEPMDMVVEKQEETDHKNDNQILSEIVEAKMAEELKPMDTDKESIAESKSPEMSMQEDCISDIAPMQTDEQTNKEQFVPGPNEKPLYTAEPVTLEDLQLLADLFYLPYEHGPKGAQMLREFQWLRANSSVVSVNCKGKDSEKIEEWRSRAAKFEEMCGLVMGMFTRLSNCANRTILYDMYSYVWDIKSIMSMVKSFVQWLGRCTRNNLFSSNILSL

SEQ ID NO: 335098 - protein, 151 aa, Artificial Sequence
  derived and/or modified sequence
MVQKESQATLEERESELSSNPAASAGASLEPPAAPAPGEDNPAGAGGAAVAGAAGGARRFLCGVVEGFYGRPWVMEQRKELFRRLQKWELNTYLYAPKDDYKHRMFWREMYSVEEAGSFLFFYLVTIQLAEIERVLCASKVMTICVISWAC

SEQ ID NO: 335099 - protein, 256 aa, Artificial Sequence
  derived and/or modified sequence
AAGGARRFLCGVVEGFYGRPWVMEQRKELFRRLQKWELNTYLYAPKDDYKHRMFWREMYSVEEAEQLMTLISAAREYEIEFIYAISPGLDITFSNPKEVSTLKRKLDQVSQFGCRSFALLFDDIDHNMCAADKEVFSSFAHAQVSITNEIYQYLGEPETFLFCPTGPKVVSKEIPVESIEEVSKIIKRAPVIWDNIHANDYDQKRLFLGPYKGRSTELIPRLKGVLTNPNCEFEANYVAIHTLATWYKSNMNGVRK

SEQ ID NO: 335100 - DNA, 456 bp, Artificial Sequence
  derived and/or modified sequence
atggtgcagaaggagtcccaggcgactctcgaagagcgggaatccgagctgagcagtaatcccgcagcctctgcaggagcatctctcgaaccccctgccgcacctgcacccggcgaggataaccccgccggcgccggtggcgccgctgtggccggcgcagctggtggtgcacggcgctttctctgtggcgtcgtggaagggttttatgggcgcccatgggtgatggaacaacggaaagagctgttccgtaggctacagaaatgggaactgaacacatacctctatgctcccaaagacgattacaaacatcgaatgttctggcgagaaatgtactcagtagaagaggccggatcattcttgtttttctacctggtgaccatccagctggctgagattgaacgcgttttatgtgcctcgaaggtgatgacaatttgtgtgatcagctgggcatgctag

SEQ ID NO: 335101 - DNA, 771 bp, Artificial Sequence
  derived and/or modified sequence
gccgccggcggcgctaggcggttcctgtgtggagtggtggagggcttctatgggcgcccttgggtaatggagcagcgaaaggagctcttccggcgcttgcagaagtgggagttaaacacatacctctacgcacccaaagatgactataagcaccggatgttctggcgtgagatgtattcggtggaagaggccgagcagctcatgaccttgatttctgctgcccgtgaatacgagattgagttcatctatgctataagccccggattagatatcactttctcaaacccaaaagaggtgtccactctaaagcgcaaactggatcaagtctctcagttcgggtgccggtctttcgcgctgctgttcgacgacatcgatcataacatgtgcgcagcagataaagaagtgttttccagctttgcacacgctcaggtaagtattactaatgaaatttatcagtacttgggggaacccgaaacgtttctgttctgtccaactggaccgaaagtggtgtcaaaggagatccccgtcgagagcatcgaggaggtttcaaagatcatcaagcgggcacctgttatctgggataacatccacgccaacgattacgaccagaaaaggctctttcttggcccttacaagggacgctccaccgagctcatacctcggctgaagggagtgcttaccaaccccaactgcgagttcgaggctaactacgttgctatccatacactggcgacatggtacaaaagcaacatgaacggggtcagaaagtag

SEQ ID NO: 335102 - DNA, 456 bp, Artificial Sequence
  derived and/or modified sequence
atggtgcagaaggagagccaggccaccctggaggagcgggagagcgagctgagcagcaacccagctgccagcgctggggccagcctggagcccccagctgccccagcccctggagaggacaacccagctggagctggaggagctgctgtggccggggccgccggcggggcccggcgcttcctgtgtggggtggtggagggcttctacggccggccctgggtgatggagcagaggaaggagctgttccggcggctgcagaagtgggagctgaacacctacctgtatgcccccaaggatgactacaagcacaggatgttctggagggagatgtacagcgtggaggaggccggcagcttcctgttcttctacctggtgaccatccagctggccgagattgaaagagtgctgtgtgccagcaaggtgatgaccatctgtgtgatctcctgggcctgctag

SEQ ID NO: 335103 - DNA, 771 bp, Artificial Sequence
  derived and/or modified sequence
gctgctgggggcgcccggcgcttcctgtgtggggtggtggagggcttctacggccggccctgggtgatggagcagaggaaggagctgttccggcggctgcagaagtgggagctgaacacctacctgtatgcccccaaggatgactacaagcacaggatgttctggagggagatgtacagcgtggaggaggccgagcagctgatgaccctcatctctgctgcccgggagtatgaaattgagttcatctatgccatcagccctggcctggacatcaccttcagcaaccccaaggaggtgtccaccctgaagaggaagctggaccaggtgtcccagtttggctgccgcagctttgccctgctgtttgatgacatcgaccacaacatgtgtgccgctgacaaggaggtgttcagcagctttgcccacgcccaggtgtccatcaccaatgagatctaccagtacctgggggagcctgagaccttcctgttctgccccaccggccccaaggtggtgtccaaggagatccctgtggagagcattgaggaggtgtccaagatcatcaagagggcccctgtgatctgggacaacatccacgccaatgactatgaccagaagaggctcttcctgggcccctacaagggccgcagcacagagctgatcccccggctgaagggcgtgctgaccaaccccaactgtgaatttgaggccaactacgtggccatccacaccctggccacctggtacaagagcaacatgaatggagtgaggaagtag

SEQ ID NO: 335104 - DNA, 1082 bp, Artificial Sequence
  derived and/or modified sequence
aaatgggattaggggaaaatgattcaaggcagaggggtgagctgagctccttggaatggtgtctttaccgaaccaagcctgggttaggcagatgtaatgagcccacctattacaagaatctccatagaaagtagggctccgggccggtgccccaacggacagaggtcgaggaggacccgcagaggtggcagcggccgggggcaggaggatggtgcagaaggagagtcaagcgacgttggaggagcgggagagcgagctcagctccaaccctgccgcctctgcgggggcatcgctggagccgccggcagctccggcacccggagaagacaaccccgccggggctgggggagcggcggtggccggggctgcaggaggggctcggcggttcctctgcggtgtggtggaaggattttatggaagaccttgggttatggaacagagaaaagaactctttagaaggctccagaaatgggaattaaatacatacttgtatgccccaaaagatgactacaaacataggatgttttggcgagagatgtattcagtggaggaagctggtagtttccttttcttctatctggtaactattcagttagctgagattgaaagagtgctctgcgctagcaaggtcatgaccatatgtgtgatatcatgggcgtgctaggctgactccatctgttctgtggtcatagattgtgctgcttacttctgccagtggattaaacagtgggccactgggcaaagaagtgctggagctgggctaggcccagggcaaggaagtatccacattgaaacgtaaattggaccaggtttctcagtttgggtgcagatcatttgctttgctttttgatgatatagaccataatatgtgtgcagcagacaaagaggtattcagttcttttgctcatgcccaagtctccatcacaaatgaaatctatcagtacctaggagagccagaaactttcctcttctgtcccacagaatactgtggcactttctgttatccaaatgtgtctcagtctccatatttaaggactgtgggtgaaaagcttctacctggaattgaagtgctttggacaggt

SEQ ID NO: 335105 - DNA, 769 bp, Artificial Sequence
  derived and/or modified sequence
gctgcaggaggggctcggcggttcctctgcggtgtggtggaaggattttatggaagaccttgggttatggaacagagaaaagaactctttagaaggctccagaaatgggaattaaatacatacttgtatgccccaaaagatgactacaaacataggatgttttggcgagagatgtattcagtggaggaagctgagcaacttatgactctcatctctgctgcacgagaatatgagatagagttcatctatgcgatctcacctggattggatatcactttttctaaccccaaggaagtatccacattgaaacgtaaattggaccaggtttctcagtttgggtgcagatcatttgctttgctttttgatgatatagaccataatatgtgtgcagcagacaaagaggtattcagttcttttgctcatgcccaagtctccatcacaaatgaaatctatcagtacctaggagagccagaaactttcctcttctgtcccacaggtcccaaagttgtttctaaagaaattccagtagagtccatcgaagaggtttctaagattattaagagagctccagtaatctgggataacattcatgctaatgattatgatcagaagagactgtttctgggcccgtacaaaggaagatccacagaactcatcccacggttaaaaggagtcctcactaatccaaattgtgaatttgaagccaactacgttgctatccacacccttgccacctggtacaaatcaaacatgaatggagtgagaaaag

SEQ ID NO: 335106 - DNA, 456 bp, Artificial Sequence
  derived and/or modified sequence
atggtgcagaaggagagccaggccaccctggaggagcgggagagcgagctctcttccaatcccgccgcgtctgccggtgcttccctggaaccccccgcggcacccgctcctggtgaagacaaccccgcgggagcaggtggcgctgcggttgctggcgctgccgggggggcgcggaggtttctctgtggagtggtggagggattctatggtagaccttgggtgatggagcagcgcaaagaactttttaggagactgcagaaatgggagctcaacacctacttatatgctccaaaggacgactacaagcataggatgttttggcgggagatgtactcagtggaggaggccgggagcttcttgtttttctacttggtaacaatacagctggctgaaattgagcgtgtactttgcgccagcaaggtgatgactatttgtgtgatttcctgggcatgttag

SEQ ID NO: 335107 - DNA, 771 bp, Artificial Sequence
  derived and/or modified sequence
gccgccggcggcgcccggcggttcctgtgcggcgtggtggagggcttctacgggaggccttgggtgatggagcagcggaaggaattgtttcggcggctccagaagtgggaattgaatacatatttgtacgcgcctaaagatgattataagcataggatgttctggcgggagatgtattcagtcgaagaggctgaacaactgatgaccctgatttctgcagcccgcgagtacgaaattgagtttatctatgccattagccctggcttggacataaccttctctaatccgaaggaggtgtctactctgaagaggaaactggaccaggtcagccagttcggctgccgaagcttcgccctgctgttcgacgacatcgaccacaatatgtgtgcagctgacaaggaagtgtttagttcctttgctcacgctcaggtaagtataaccaacgagatatatcaatatcttggagagcccgagacattccttttttgtcccacaggacccaaggtggtgagcaaagaaattcccgtggagagcattgaagaagtttccaagattataaaacgcgcccctgttatttgggataatatccacgccaacgactatgaccagaagaggctgttcttagggccctacaagggacggtctacggaactgattccacggttaaaaggagtcctgacaaatccgaactgtgaatttgaagctaactacgtggccattcacacattggccacttggtacaagtcaaacatgaatggggtacggaagtag

SEQ ID NO: 335108 - DNA, 456 bp, Artificial Sequence
  derived and/or modified sequence
atggtccaaaaggagtcccaggcgaccctggaggagagggaaagtgagttatcttcaaacccagcggcatccgccggtgcttccctcgaacctcctgcagctcctgcaccaggcgaagataatcctgcaggcgcaggtggggctgccgtggccggagctgctgggggagccagacgctttctttgtggcgtggtggaaggattttacggacggccatgggtgatggagcaacgaaaggaacttttccgacgcttacagaagtgggagctgaacacatacctgtacgcacctaaggacgactacaaacaccgcatgttttggagagagatgtattccgtcgaggaggccggttcatttctgttcttttacctcgttaccatccagctcgcggaaattgaacgagtcctgtgtgcctccaaggttatgacgatttgcgtgattagctgggcctgctag

SEQ ID NO: 335109 - DNA, 771 bp, Artificial Sequence
  derived and/or modified sequence
gccgctggtggagccaggcgcttcttgtgtggcgtggtggagggattctacgggagaccatgggtgatggaacagcgtaaagagttatttcgcagacttcagaagtgggagcttaacacctacctttacgcccctaaggacgattataagcacaggatgttttggcgagaaatgtattctgtcgaggaggcagagcaactaatgacactgatctccgccgcaagagagtacgagatcgaattcatttatgctattagcccgggactcgacatcaccttttcgaaccccaaagaagtgtccaccctaaaacgcaaattggaccaagtgagccagtttggctgcagaagctttgcgctgctttttgacgatatcgatcacaatatgtgcgccgctgataaggaggtgttttcttcgttcgcccacgcacaggtttcaataacaaatgaaatttatcagtacttgggcgagccagagaccttcttattttgtccaaccggtcccaaggtcgtcagcaaagagattcctgtggagagtatcgaggaagtctctaagataataaagagagcacccgtgatctgggacaacatccatgcaaacgattacgaccagaaaagattgtttcttggaccttacaaaggtcgaagcaccgagctcatccctaggttgaagggcgtacttacaaatccgaactgtgagtttgaggctaattacgttgcaattcacacacttgccacatggtacaagtcaaacatgaatggtgtccggaagtag

SEQ ID NO: 335110 - DNA, 456 bp, Artificial Sequence
  derived and/or modified sequence
atggtgcagaaggagagccaggccaccctggaggagagagagagcgagctgagcagcaaccccgccgccagcgccggcgccagcctggagccccccgccgcccccgcccccggcgaggacaaccccgccggcgccggcggcgccgccgtggccggcgccgccggcggcgccagaagattcctgtgcggcgtggtggagggcttctacggcagaccctgggtgatggagcagagaaaggagctgttcagaagactgcagaagtgggagctgaacacctacctgtacgcccccaaggacgactacaagcacagaatgttctggagagagatgtacagcgtggaggaggccggcagcttcctgttcttctacctggtgaccatccagctggccgagatcgagagagtgctgtgcgccagcaaggtgatgaccatctgcgtgatcagctgggcctgctag

SEQ ID NO: 335111 - DNA, 771 bp, Artificial Sequence
  derived and/or modified sequence
gccgccggcggcgccagaagattcctgtgcggcgtggtggagggcttctacggcagaccctgggtgatggagcagagaaaggagctgttcagaagactgcagaagtgggagctgaacacctacctgtacgcccccaaggacgactacaagcacagaatgttctggagagagatgtacagcgtggaggaggccgagcagctgatgaccctgatcagcgccgccagagagtacgagatcgagttcatctacgccatcagccccggcctggacatcaccttcagcaaccccaaggaggtgagcaccctgaagagaaagctggaccaggtgagccagttcggctgcagaagcttcgccctgctgttcgacgacatcgaccacaacatgtgcgccgccgacaaggaggtgttcagcagcttcgcccacgcccaggtgagcatcaccaacgagatctaccagtacctgggcgagcccgagaccttcctgttctgccccaccggccccaaggtggtgagcaaggagatccccgtggagagcatcgaggaggtgagcaagatcatcaagagagcccccgtgatctgggacaacatccacgccaacgactacgaccagaagagactgttcctgggcccctacaagggcagaagcaccgagctgatccccagactgaagggcgtgctgaccaaccccaactgcgagttcgaggccaactacgtggccatccacaccctggccacctggtacaagagcaacatgaacggcgtgagaaagtag

SEQ ID NO: 335112 - protein, 470 aa, Artificial Sequence
  derived and/or modified sequence
MSYSVTLTGPGPWGFRLQGGKDFNMPLTISRITPGSKAAQSQLSQGDLVVAIDGVNTDTMTHLEAQNKIKSASYNLSLTLQKSKRPIPISTTAPPVQTPLPVIPHQKASSYSPAVAASSAPATHTSYSEGPAAPAPKPRVVTTASIRPSVYQPVPASTYSPSPGANYSPTPYTPSPAPAYTPSPAPAYTPSPVPTYTPSPAPAYTPSPAPNYNPAPSVAYSGGPAEPASRPPWVTDDSFSQKFAPGKSTTSISKQTLPRGGPAYTPAGPQVPPLARGTVQRAERFPASSRTPLCGHCNNVIRGPFLVAMGRSWHPEEFTCAYCKTSLADVCFVEEQNNVYCERCYEQFFAPLCAKCNTKIMGEVMHALRQTWHTTCFVCAACKKPFGNSLFHMEDGEPYCEKDYINLFSTKCHGCDFPVEAGDKFIEALGHTWHDTCFICAVCHVNLEGQPFYSKKDRPLCKKHAHTINL

SEQ ID NO: 335113 - protein, 213 aa, Artificial Sequence
  derived and/or modified sequence
  misc_feature (1)..(1): Xaa can be any naturally occurring amino acid
XLDDYNPDIPEWRRDIGRVIKKSLVEATGVPGQHILVAVLPGLPTTAELFVLPYQDPAGENKRSTDDLEQISELLIHTLNQNSVHFELKPGVRVLVHAAHLTAAPLVDLTPTHSGSAMLMLLSVVFVGLAVFVIYKFKRKIPGINVYAQMQNEKEQEMISPVSHSESRPNVPQTELRRPGQLIDEKVESQLIGSISIVAENQSTKEIPTYVNV

SEQ ID NO: 335114 - DNA, 642 bp, Artificial Sequence
  derived and/or modified sequence
tgactggacgactacaaccccgacatccccgagtggagaagagacatcggcagagtgatcaagaagagcctggtggaggccaccggcgtgcccggccagcacatcctggtggccgtgctgcccggcctgcccaccaccgccgagctgttcgtgctgccctaccaggaccccgccggcgagaacaagagaagcaccgacgacctggagcagatcagcgagctgctgatccacaccctgaaccagaacagcgtgcacttcgagctgaagcccggcgtgagagtgctggtgcacgccgcccacctgaccgccgcccccctggtggacctgacccccacccacagcggcagcgccatgctgatgctgctgagcgtggtgttcgtgggcctggccgtgttcgtgatctacaagttcaagagaaagatccccggcatcaacgtgtacgcccagatgcagaacgagaaggagcaggagatgatcagccccgtgagccacagcgagagcagacccaacgtgccccagaccgagctgagaagacccggccagctgatcgacgagaaggtggagagccagctgatcggcagcatcagcatcgtggccgagaaccagagcaccaaggagatccccacctacgtgaacgtgtag

SEQ ID NO: 335115 - DNA, 642 bp, Artificial Sequence
  derived and/or modified sequence
tgactagatgattacaacccagatattcctgagtggaggagagacataggccgggttataaagaaatcccttgttgaggccacgggggtgcctggtcaacacatactggtggcagttctgcctggtcttcccaccaccgccgagctctttgttttaccataccaggacccagcaggggagaataaacgctctacagacgacctggagcagatctccgaactgctgatccatacccttaatcagaacagcgtgcacttcgaacttaagcctggagttagggtgttggttcacgcagctcacttgacagctgctcccctggttgatctgacccctacgcatagcgggtccgctatgctgatgctcctgagcgtcgtatttgtgggcttggcggttttcgtgatatataaatttaaacgcaaaattccaggaataaacgtgtacgcgcaaatgcaaaacgagaaggagcaggaaatgattagcccggtgtcccactccgagagcaggccaaatgtgccacagaccgagcttcgtcgcccaggccagcttattgacgaaaaagtcgagtctcaactcatcggatccattagtatcgtggctgagaatcagagcaccaaggagattcccacatacgttaacgtgtag

SEQ ID NO: 335116 - DNA, 642 bp, Artificial Sequence
  derived and/or modified sequence
tgactggatgactacaacccagacatccctgagtggaggcgggacatcggccgggtcatcaagaagagcctggtggaggccaccggggtgcccggccagcacatcctggtggccgtgctgcccggcctgcccaccacagctgagctgtttgtgctgccctaccaggaccctgctggggagaacaagaggagcacagatgacctggagcagatcagcgagctgctgatccacaccctgaaccagaacagcgtgcactttgagctgaagccaggagtgcgggtgctggtgcacgccgcccacctgacagctgcccccctggtggacctgacccccacccacagcggcagcgccatgctgatgctgctgtctgtggtgtttgtgggcctggccgtgtttgtgatctacaagttcaagaggaagatccctggcatcaacgtgtatgcccagatgcagaatgagaaggagcaggagatgatcagccctgtgagccacagcgagagccggcccaacgtgccccagacagagctgcggcggcccggccagctgattgatgagaaggtggagagccagctgattggcagcatcagcatcgtggccgagaaccagagcaccaaggagatccccacctacgtgaatgtgtag

SEQ ID NO: 335117 - DNA, 642 bp, Artificial Sequence
  derived and/or modified sequence
tgactggacgactacaaccccgacatccccgagtggcggcgggacattggccgcgtcatcaagaagtccttagtggaggcaaccggagtgcctggacaacatatcctagtcgccgtgcttcctgggctgcccactacagcggagctgttcgtcctaccataccaggacccagccggtgagaacaaaagatctaccgacgatcttgagcaaatctctgagctgctaattcatacattaaatcagaatagcgtccatttcgagttgaaacccggcgtgcgagtgctagtgcatgcggctcacctaacagctgctcccttggtggatttgacaccaacacactccggatcagctatgttaatgctgctctccgtcgtgtttgtgggactggccgtatttgtgatatataagttcaagaggaaaatccccgggatcaatgtgtacgcacagatgcagaatgaaaaggaacaggagatgatttcacctgtgagccactccgaatccaggccaaacgtgccacagacagaattacgtcgccctggccagctgatcgacgagaaggttgagtcacagctcattggcagcatctccattgtggccgagaatcagagcactaaggaaatccctacttatgtcaatgtgtag

SEQ ID NO: 335118 - DNA, 642 bp, Artificial Sequence
  derived and/or modified sequence
taactcgacgattacaaccctgatattcctgaatggagaagagacattggcagagtcatcaagaaaagcctcgtggaggcaaccggagtgccaggtcagcacatccttgtggcagtgctgcctggacttccaaccacggcggagcttttcgtgttgccatatcaggaccccgctggggagaacaagagaagcaccgatgatctagagcagatttctgaattattgatacatacactaaaccagaacagtgtgcactttgagctcaaaccaggagtgcgggttctggtccatgctgcgcacctgaccgctgctccgttagttgacctgacccccacacattccggatccgccatgctgatgctgctctccgtcgtgttcgtcggccttgcagttttcgtcatctataaattcaaacgcaagattcccggaattaacgtctacgcccagatgcagaacgaaaaggagcaagagatgatttcccctgtgtcccattcagagagcaggcccaacgtgccgcagacagaactgaggagacccggacagctgatcgacgagaaagtggaaagtcagcttatcgggtctatttcaatcgtcgcagaaaaccagtctaccaaggagattcccacttatgtgaatgtgtag

SEQ ID NO: 335119 - DNA, 663 bp, Artificial Sequence
  derived and/or modified sequence
acctggatgactacaacccggacatccctgagtggaggagggacatcggtcgagtcatcaaaaaatccctggtggaagccacaggggttccaggccagcacatcctggtggcggtgctccctggcttacccaccactgctgaactctttgtcctaccctatcaggatccagctggagaaaacaaaaggtcaactgatgacctggagcagatatcagaattgctgatccacacgctcaaccaaaactcagtacacttcgagctgaagccaggagtccgagtccttgtccatgctgctcacttaacagcggcccccctggtggacctcactccaacccacagtggatctgccatgctgatgctgctctcagtggtgtttgtggggctggcagtgttcgtcatctacaagtttaaaaggaagatcccggggattaatgtttatgcccagatgcagaatgagaaagaacaagagatgatcagtccagtcagtcactctgaaagcaggcccaatgtccctcagactgaactaaggaggcctggccagcttatagatgagaaggtggaatcccagctcataggaagtatttccatagttgctgagaatcaaagcacaaaagaaatccctacctatgtaaatgtttgaatggaggacgccagtaaaaaaa

SEQ ID NO: 335120 - protein, 652 aa, Artificial Sequence
  derived and/or modified sequence
MISSIVISQMIDENKSRENRASLPLPCAIAQSRAHHAKQSLANRSGVNIHRAFALLPGRLGIPAPSDERGPEAELPPKEERPCGGPRRGFASITITARRVGPPARALVWGTAGDSLCPKCRAEDTLFQAPPALANGAHPGRHQRSFACTEFSRNSSVVRLKVPEAHTGLCERRKYWVTHADDKETSFSPDTPLSGKSPLVFSSCVHLRVSQQCPDSIYYVDKSLSVPIEPPQIASPKMHRSVLSLNLNCSSHRLTADGVDGLVNREPISEALKQELLEGDQDLVGQRWNPGLQESHLKETPSLRRVHLGTGACPWSGSFPLENTELANVGANQVTVRKGEKDHTTHCHASDHANQLSIHIPGWSYRAVHTKVFSGSSKRQQGEVCMTVSAPPVEQKPTRHFLPIGDSSPSDDCLSRDLSEPTERRHQSFLKPRILFPGFLCPLQDVCASLQEDNGVQIESKFPKGDYTCCDLVVKIKECKKSEDPTTPEPSPAAPSPAPRDGAGSPGLSEDCSESQQTPARSLTLQEALEVRKPQFISRSQERLKKLEHMVQQRKAQRKEDLRQKQSLLPIRTSKKQFTIPHPLSDNLFKPKERCISEKEMHMRSKRIYDNLPEVKKKKEEQRKRVILQSNRLRAEVFKKQLLDQLLQRNAV

SEQ ID NO: 335121 - protein, 383 aa, Artificial Sequence
  derived and/or modified sequence
MISSIVISQMIDENKSRENRASLPLPCAIAQSRAHHAKQSLANRSGVNIHRAFALLPGRLGIPAPSDERGPEAELPPKEERPCGGPRRGFASITITARRVGPPARALVWGTAGDSLCPKCRAEDTLFQAPPALANGAHPGRHQRSFACTEFSRNSSVVRLKVPEAHTGLCERRKYWVTHADDKETSFSPDTPLSGKSPLVFSSCVHLRVSQQCPDSIYYVDKSLSVPIEPPQIASPKMHRSVLSLNLNCSSHRLTADGVDGLVNREPISEALKQELLEGDQDLVGQRWNPGLQESHLKETPSLRRVHLGTGACPWSGSFPLENTELANVGANQVTVRKGEKDHTTHCHASDHANQLSIHIPGWSYRADLLQEGQHKQLSMFQR

SEQ ID NO: 335122 - protein, 796 aa, Artificial Sequence
  derived and/or modified sequence
MQHSGIPTKTHPQGYAARYTETAVHRTFQIKTFSTELKNHVMVMDFVKSNWFPSQRRAKVCIIHMCQGLKTAEQTASRYEIHSRLFSSPKDHSAWERNESLSNAGLRDSYHSRRDQIALKNLQSDVTEAKSDFTKETLASQNTKMISSIVISQMIDENKSRENRASLPLPCAIAQSRAHHAKQSLANRSGVNIHRAFALLPGRLGIPAPSDERGPEAELPPKEERPCGGPRRGFASITITARRVGPPARALVWGTAGDSLCPKCRAEDTLFQAPPALANGAHPGRHQRSFACTEFSRNSSVVRLKVPEAHTGLCERRKYWVTHADDKETSFSPDTPLSGKSPLVFSSCVHLRVSQQCPDSIYYVDKSLSVPIEPPQIASPKMHRSVLSLNLNCSSHRLTADGVDGLVNREPISEALKQELLEGDQDLVGQRWNPGLQESHLKETPSLRRVHLGTGACPWSGSFPLENTELANVGANQVTVRKGEKDHTTHCHASDHANQLSIHIPGWSYRAVHTKVFSGSSKRQQGEVCMTVSAPPVEQKPTRHFLPIGDSSPSDDCLSRDLSEPTERRHQSFLKPRILFPGFLCPLQDVCASLQEDNGVQIESKFPKGDYTCCDLVVKIKECKKSEDPTTPEPSPAAPSPAPRDGAGSPGLSEDCSESQQTPARSLTLQEALEVRKPQFISRSQERLKKLEHMVQQRKAQRKEDLRQKQSLLPIRTSKKQFTIPHPLSDNLFKPKERCISEKEMHMRSKRIYDNLPEVKKKKEEQRKRVILQSNRLRAEVFKKQLLDQLLQRNAV

SEQ ID NO: 335123 - DNA, 2391 bp, Artificial Sequence
  derived and/or modified sequence
atgcagcacagcggcatccccaccaagacccacccccagggctacgccgccagatacaccgagaccgccgtgcacagaaccttccagatcaagaccttcagcaccgagctgaagaaccacgtgatggtgatggacttcgtgaagagcaactggttccccagccagagaagagccaaggtgtgcatcatccacatgtgccagggcctgaagaccgccgagcagaccgccagcagatacgagatccacagcagactgttcagcagccccaaggaccacagcgcctgggagagaaacgagagcctgagcaacgccggcctgagagacagctaccacagcagaagagaccagatcgccctgaagaacctgcagagcgacgtgaccgaggccaagagcgacttcaccaaggagaccctggccagccagaacaccaagatgatcagcagcatcgtgatcagccagatgatcgacgagaacaagagcagagagaacagagccagcctgcccctgccctgcgccatcgcccagagcagagcccaccacgccaagcagagcctggccaacagaagcggcgtgaacatccacagagccttcgccctgctgcccggcagactgggcatccccgcccccagcgacgagagaggccccgaggccgagctgccccccaaggaggagagaccctgcggcggccccagaagaggcttcgccagcatcaccatcaccgccagaagagtgggcccccccgccagagccctggtgtggggcaccgccggcgacagcctgtgccccaagtgcagagccgaggacaccctgttccaggccccccccgccctggccaacggcgcccaccccggcagacaccagagaagcttcgcctgcaccgagttcagcagaaacagcagcgtggtgagactgaaggtgcccgaggcccacaccggcctgtgcgagagaagaaagtactgggtgacccacgccgacgacaaggagaccagcttcagccccgacacccccctgagcggcaagagccccctggtgttcagcagctgcgtgcacctgagagtgagccagcagtgccccgacagcatctactacgtggacaagagcctgagcgtgcccatcgagcccccccagatcgccagccccaagatgcacagaagcgtgctgagcctgaacctgaactgcagcagccacagactgaccgccgacggcgtggacggcctggtgaacagagagcccatcagcgaggccctgaagcaggagctgctggagggcgaccaggacctggtgggccagagatggaaccccggcctgcaggagagccacctgaaggagacccccagcctgagaagagtgcacctgggcaccggcgcctgcccctggagcggcagcttccccctggagaacaccgagctggccaacgtgggcgccaaccaggtgaccgtgagaaagggcgagaaggaccacaccacccactgccacgccagcgaccacgccaaccagctgagcatccacatccccggctggagctacagagccgtgcacaccaaggtgttcagcggcagcagcaagagacagcagggcgaggtgtgcatgaccgtgagcgccccccccgtggagcagaagcccaccagacacttcctgcccatcggcgacagcagccccagcgacgactgcctgagcagagacctgagcgagcccaccgagagaagacaccagagcttcctgaagcccagaatcctgttccccggcttcctgtgccccctgcaggacgtgtgcgccagcctgcaggaggacaacggcgtgcagatcgagagcaagttccccaagggcgactacacctgctgcgacctggtggtgaagatcaaggagtgcaagaagagcgaggaccccaccacccccgagcccagccccgccgcccccagccccgcccccagagacggcgccggcagccccggcctgagcgaggactgcagcgagagccagcagacccccgccagaagcctgaccctgcaggaggccctggaggtgagaaagccccagttcatcagcagaagccaggagagactgaagaagctggagcacatggtgcagcagagaaaggcccagagaaaggaggacctgagacagaagcagagcctgctgcccatcagaaccagcaagaagcagttcaccatcccccaccccctgagcgacaacctgttcaagcccaaggagagatgcatcagcgagaaggagatgcacatgagaagcaagagaatctacgacaacctgcccgaggtgaagaagaagaaggaggagcagagaaagagagtgatcctgcagagcaacagactgagagccgaggtgttcaagaagcagctgctggaccagctgctgcagagaaacgccgtgtag

SEQ ID NO: 335124 - DNA, 3678 bp, Artificial Sequence
  derived and/or modified sequence
gggaagatggccatgtgcaggtggaggcagagattagagaggggctgtcccaagccgagggacacagaggatgccagacaccacgggacactgagaagggcaaggaagggtcctcccctagggccttcagagggagcacggtcctgacacctggatttctggcctccagaactgggaaggagtaaatccctgttgtatccagctgctccctttgtagtcacttttcacagcagcgctgggaacgaacgcaggcaccaatccagcttgggggccatgtggggtagcagcggatcgggacttccttctaagagaagcgatcttgagccgtgtcacgggtgaggagttaggagttagctcagtggggaaaaggtgaaggcagcactcacggtcatcaagccagcccctgtgggaagcaggctgggtttaaggatttctaacctgggctccttgaactcccagggtccccctacatgtgtgcttcaattttgcaccttttcttggggagaaacgaatcccttgcatttgagttttggaggaccatgtggccttcacggtcacaaactggcaatgtcaagaaggtttggcaggaccggctgggagatgaggctggtggggtcaccagcttgattgtgaccttgctgacaccagcagggcagggaggtgaactgacgcaatggagcagagcctttgtctcaggagcaaaccagccttggctttcagttggatgttggaggattacgggacagctaccacagtagaagagatcaaattgcccttaaaaatctccagtctgatgtcacagaggcaaaatctgacttcaccaaggagaccctggcatcacaaaacacaaaaatgatttcatccatagtcatctcccagatgattgatgagaataagtcaagagaaaacagggcctccttgcccctaccgtgtgccattgctcagtctcgtgcacatcacgccaagcaatctctggctaaccgcagcggagtcaacattcacagagcatttgcgttacttccgggcagattaggaatcccggcaccgtcagatgagcgaggacctgaggcagagctgccgcccaaagaggagagaccctgtgggggcccccgcagagggtttgcatccatcaccatcacggccagacgcgtgggccccccagcccgcgccctggtgtgggggactgctggggactctctgtgccccaagtgcagggctgaggacacactgttccaggcgcccccggctctggccaatggcgcccatccaggtcggcatcagagatcttttgcctgcacagagttctccagaaacagctccgtggtgcggctgaaggttcccgaggcccacactgggttgtgtgagagacgcaagtactgggtcacccatgcagacgacaaagagaccagtttttctccagacaccccactgtcaggaaagagcccgctggtgttcagttcctgtgtccacctcagggtgtctcagcagtgtccagattcaatctattacgtagacaagtctctctccgtccccattgagccacctcaaattgccagccccaaaatgcacagatccgtcctgtcgctcaacctcaattgtagttcccacagattaacagcagatggagtagatggcctagtgaacagagagccaataagcgaagccctgaagcaggagctcctggagggagaccaggacctcgtaggccagcgctggaacccaggtttacaagaaagtcacttgaaggaaaccccatcgttgaggcgggtgcatttggggaccggcgcttgtccttggagtggttcttttccattggaaaacacagaattggcaaatgtgggagctaaccaagtcactgtaagaaaaggggaaaaggaccatacaactcattgtcacgccagcgatcatgccaaccaactgtccattcacattcctggctggagttacagggcagtacacacaaaagtattttctggaagcagcaagaggcaacaaggagaagtatgtatgactgtgtctgctcctccagtggaacagaagcccactagacatttccttcccattggggatagctctccaagcgatgactgtctgtctagagacctttctgagcccacagagagacgacatcaaagcttcctgaaacccagaatcctttttcctgggtttctttgccccttacaagatgtatgtgcatctctgcaggaagacaatggtgttcagatagaaagcaagttccccaaaggagattacacatgctgtgacttggttgtaaaaataaaggaatgtaagaagagtgaggaccccaccacacctgagccctccccagcagcaccctcgccagcaccccgcgatggagcagggagccctggcctgtccgaagactgttctgagtctcagcaaacgcctgcaagatctttgaccttgcaagaagcactggaagttcgtaagcctcagttcatttctcgctcacaagaacggctgaagaagcttgaacacatggtccagcagaggaaagcccagcggaaggaggacctgaggcagaagcagagcctccttcccatccgcaccagcaagaagcagttcacgattccccatcctctgagtgataacttgttcaaacccaaagaacggtgcatttcagagaaggagatgcatatgcgatctaagagaatctatgataacttgccggaagttaaaaagaaaaaagaagaacaaaggaaaagggtgatcttacaaagtaacagactccgtgccgaagtcttcaaaaagcaattactggaccagctccttcaaaggaatgcggtctaaccacaggctgccctgctgaccacactacctggacctgggaggacttcgaatgctggataagccattaaacttagcattatcttcatcatgggaaaacacttattttactttcgattttttttttccataaaggaaaacatcacttcctgaattactgacccaagccaaacagaaacaataaccctcgagaaaataggtcaacaatctgttgtggggaaaccacctccatgtaacccactggatacagtccccttaatgtttttgcttctaaattgtaccttttgcttctgatttcttctcccctgctgtttcctgcccatcagagaggcctgatacaagcaagtttgtttacatccctggggaatcttttacatcaaacttttgggatccaaatccatctccttttaaatttcaatctcagcacctgccagttatgcaaatgccaaaatgtgggtcatcatatagtatatttgaaacctttctgaacatgtacaccacccaatgctagaggctgacttggaaaccggtgggtgcaatgcccgaggctgtggaacaatcagcccatctctttgtgacctggagcagtcagagggccctcagtcaccccgccccattcctcaccagagaaaagaatccatttctatggaagctctgacgtaacttcagtgttttctacaatactcctcctgccccgccccattaaaacagttcttttgttaagaaatagcctaatggtccaactttgctgtctgttcttccaaatgtttataatacacattatttataaatatgtctgtttgggaagctaagaacaagctagtttttacaacacaaatggaaataaatgcaattattataaaaattcaa

SEQ ID NO: 335125 - DNA, 2720 bp, Artificial Sequence
  derived and/or modified sequence
actagctaaagtcacaagatactgagtctcatgcagcactctggaattcctacaaaaactcatccgcaggggtatgctgcccgctacacagaaacggccgtgcatcggactttccagataaaaacatttagtacagagttgaaaaaccatgtgatggtcatggattttgtgaagagtaactggtttccctcccagagaagagccaaagtttgtatcatccatatgtgtcaaggcttgaagacggctgagcagacagccagcagatatgagatccacagtcgactcttctcatcccccaaagatcattctgcctgggaaagaaatgaaagtctttccaatgcaggattacgggacagctaccacagtagaagagatcaaattgcccttaaaaatctccagtctgatgtcacagaggcaaaatctgacttcaccaaggagaccctggcatcacaaaacacaaaaatgatttcatccatagtcatctcccagatgattgatgagaataagtcaagagaaaacagggcctccttgcccctaccgtgtgccattgctcagtctcgtgcacatcacgccaagcaatctctggctaaccgcagcggagtcaacattcacagagcatttgcgttacttccgggcagattaggaatcccggcaccgtcagatgagcgaggacctgaggcagagctgccgcccaaagaggagagaccctgtgggggcccccgcagagggtttgcatccatcaccatcacggccagacgcgtgggccccccagcccgcgccctggtgtgggggactgctggggactctctgtgccccaagtgcagggctgaggacacactgttccaggcgcccccggctctggccaatggcgcccatccaggtcggcatcagagatcttttgcctgcacagagttctccagaaacagctccgtggtgcggctgaaggttcccgaggcccacactgggttgtgtgagagacgcaagtactgggtcacccatgcagacgacaaagagaccagtttttctccagacaccccactgtcaggaaagagcccgctggtgttcagttcctgtgtccacctcagggtgtctcagcagtgtccagattcaatctattacgtagacaagtctctctccgtccccattgagccacctcaaattgccagccccaaaatgcacagatccgtcctgtcgctcaacctcaattgtagttcccacagattaacagcagatggagtagatggcctagtgaacagagagccaataagcgaagccctgaagcaggagctcctggagggagaccaggacctcgtaggccagcgctggaacccaggtttacaagaaagtcacttgaaggaaaccccatcgttgaggcgggtgcatttggggaccggcgcttgtccttggagtggttcttttccattggaaaacacagaattggcaaatgtgggagctaaccaagtcactgtaagaaaaggggaaaaggaccatacaactcattgtcacgccagcgatcatgccaaccaactgtccattcacattcctggctggagttacagggcagtacacacaaaagtattttctggaagcagcaagaggcaacaaggagaagtatgtatgactgtgtctgctcctccagtggaacagaagcccactagacatttccttcccattggggatagctctccaagcgatgactgtctgtctagagacctttctgagcccacagagagacgacatcaaagcttcctgaaacccagaatcctttttcctgggtttctttgccccttacaagatgtatgtgcatctctgcaggaagacaatggtgttcagatagaaagcaagttccccaaaggagattacacatgctgtgacttggttgtaaaaataaaggaatgtaagaagagtgaggaccccaccacacctgagccctccccagcagcaccctcgccagcaccccgcgatggagcagggagccctggcctgtccgaagactgttctgagtctcagcaaacgcctgcaagatctttgaccttgcaagaagcactggaagttcgtaagcctcagttcatttctcgctcacaagaacggctgaagaagcttgaacacatggtccagcagaggaaagcccagcggaaggaggacctgaggcagaagcagagcctccttcccatccgcaccagcaagaagcagttcacgattccccatcctctgagtgataacttgttcaaacccaaagaacggtgcatttcagagaaggagatgcatatgcgatctaagagaatctatgataacttgccggaagttaaaaagaaaaaagaagaacaaaggaaaagggtgatcttacaaagtaacagactccgtgccgaagtcttcaaaaagcaattactggaccagctccttcaaaggaatgcggtctaaccacaggctgccctgctgaccacactacctggacctgggaggacttcgaatgctggataagccattaaacttagcattatcttcatcatgggaaaacacttattttactttcgattttttttttccataaaggaaaacatcacttcctgaattactgacccaagccaaacagaaacaataaccctcgagaaaataggtcaacaatctgttgtggggaaaccacctccatgtaacccactggatacagtccccttaatgtttttgcttctaaattgtaccttttgcttctgatttcttct

SEQ ID NO: 335126 - DNA, 2391 bp, Artificial Sequence
  derived and/or modified sequence
atgcagcacagcggcatccctaccaagacccacccccagggatatgctgcacggtatactgagaccgcagtgcatcggactttccagataaaaaccttttctaccgagttgaagaatcacgtgatggtgatggatttcgttaaaagcaactggttccctagccagagacgggccaaagtgtgtataattcatatgtgccagggacttaaaaccgcagaacagactgcctctcggtatgagattcactctcgtctctttagctccccaaaggaccactctgcctgggagagaaatgagtccctgagtaacgcaggcctgcgcgactcttaccactcccgccgagaccagatagcccttaagaaccttcagtctgacgtgacagaggccaagtcagattttactaaggagactctggcctcccagaacaccaaaatgatctcaagtatcgtcatttctcagatgatcgacgagaacaaatcccgggaaaatcgggcatcccttccccttccatgcgccattgcccagagtcgcgcacatcacgctaagcaatccctcgccaaccgctcaggcgtgaacatccacagggcatttgcccttctgccaggcagacttggcattcctgcaccctctgacgagcggggtcctgaagctgaattgccccccaaagaggaacgcccatgtggaggcccaagaaggggatttgcaagcattacaataactgcccgaagagtggggcctccagctcgagccctggtgtggggtaccgcaggtgactctctgtgtccaaaatgccgagctgaagacactctatttcaggcaccacctgcattggccaacggggcacacccaggtagacatcagagaagctttgcatgtacagaattttcccgcaatagctctgtcgtacgcctcaaagtgccagaggctcatactgggttgtgcgagcgtagaaagtattgggtaacccacgctgatgacaaggaaactagcttctcaccagatacccccctgtctggcaagagcccactcgtgttctctagctgtgtgcacctgcgggtgagtcagcagtgcccggactctatttactacgtcgacaagtcactgtcagtgccaatcgaacctcctcagatagcgtctcccaagatgcaccggtccgtcctctcccttaacttaaattgcagctcgcacaggctcacagctgatggagttgatggtctcgtcaatagagagccaatttcagaggcgctaaagcaggagctgttagagggcgatcaggatttagttggccaacggtggaacccaggactgcaagagagccatctgaaggaaacacctagtctaaggagagttcacctggggactggagcatgcccatggagtggttcgttccctcttgagaacaccgaacttgctaatgtaggggcgaatcaggtcaccgtgaggaaaggagaaaaagaccacacgacccattgccacgctagcgatcacgcaaatcagctctcaatacatataccaggctggtcctatcgggcagttcacaccaaggtgttttcgggcagcagcaagagacagcagggtgaggtgtgcatgaccgttagtgccccccccgtcgagcaaaaaccgactcgccattttctgcccattggcgatagtagtccaagcgatgattgtctcagcagggacctatccgagccaactgaacggcgccatcagagcttcttgaagccaaggatcctgttccccggattcctgtgcccactgcaagatgtgtgcgcgtccctgcaggaggataacggggtgcagattgagagcaaattccctaaaggtgattatacatgttgtgacttggttgttaaaataaaggagtgcaaaaaatctgaggatccgactaccccagagcctagcccggctgcgccttcccccgcaccccgggatggcgcagggtcacccgggctgagtgaagattgtagcgagagccagcagacaccagcaagatctctgacactccaggaggccctggaggtccgcaagccacagtttatctcccgatcccaggaaagactgaagaagctcgaacatatggtacaacagaggaaggcacagagaaaggaggatttaaggcaaaagcaaagcctcctgcctattaggacgtcaaagaaacagttcacaataccacatcctctgtcggacaacctgtttaagccgaaagagcgatgtatctccgaaaaggagatgcacatgagatctaagagaatctacgataatcttcccgaagtgaagaagaaaaaggaggaacagcgcaagcgtgtcattctgcagtctaacaggctcagagccgaggtttttaagaaacagctgcttgatcagctgttgcaaagaaacgccgtgtag

SEQ ID NO: 335127 - DNA, 2391 bp, Artificial Sequence
  derived and/or modified sequence
atgcagcacagcggcatccccaccaagacccacccccagggctacgccgcccgctacacagaaacagctgtgcacaggaccttccagatcaagaccttcagcacagagctgaagaaccacgtgatggtgatggactttgtgaagagcaactggttccccagccagaggcgggccaaggtgtgcatcatccacatgtgccagggcctgaagacagctgagcagacagccagccgctatgagatccacagccgcctcttcagcagccccaaggaccacagcgcctgggagagaaatgaaagcctgagcaatgccggcctgcgggacagctaccacagcagaagagaccagatcgccctgaagaacctgcagagtgatgtgacagaggccaagagtgacttcaccaaggagaccctggccagccagaacaccaagatgatcagcagcatcgtcatcagccagatgattgatgagaacaagagccgggagaacagagccagcctgcccctgccctgtgccatcgcccagagccgggcccaccacgccaagcagagcctggccaacagaagtggagtgaacatccaccgggcctttgccctgctgcccggccgcctgggcatcccagcccccagtgatgagcggggccctgaggccgagctgccccccaaggaggagcggccctgtggcggcccccggcggggctttgccagcatcaccatcacagcccggcgggtgggccccccagcccgggccctggtgtggggcacagctggggacagcctgtgccccaagtgcagagctgaggacaccctcttccaggcccccccagccctggccaatggagcccaccctggccgccaccagaggagctttgcctgcacagagttcagcaggaacagctctgtggtgcggctgaaggtgcctgaggcccacacaggcctgtgtgagaggaggaagtactgggtgacccatgctgatgacaaggagaccagcttctccccagacacccccctgagcggcaagagccccctggtgttcagcagctgtgtgcacctgcgggtgtcccagcagtgcccagacagcatctactacgtggacaagagcctgtctgtgcccatcgagcccccccagatcgccagccccaagatgcacaggtctgtgctgagcctgaacctgaactgcagcagccaccggctgacagcagatggagtggatggcctggtgaaccgggagcccatcagcgaggccctgaagcaggagctgctggagggggaccaggacctggtgggccagcgctggaaccctggcctgcaggagagccacctgaaggagacccccagcctgcggcgggtgcacctgggcaccggggcctgcccctggagcggcagcttccccctggagaacacagagctggccaacgtgggcgccaaccaggtgacagtgaggaagggggagaaggaccacaccacccactgccacgccagtgaccacgccaaccagctgagcatccacatccctggctggagctacagagctgtgcacaccaaggtgttcagcggcagcagcaagaggcagcagggcgaggtgtgcatgacagtgtctgcccctcctgtggagcagaagcccaccaggcacttcctgcccatcggggacagcagccccagtgatgactgcctgagccgggacctgtctgagcccacagagcggcggcaccagagcttcctgaagccccgcatcctcttccctggcttcctgtgccccctgcaggatgtgtgtgccagcctgcaggaggacaacggggtgcagatcgagagcaagttccccaagggggactacacctgctgtgacctggtggtgaagatcaaggagtgcaagaagtctgaggaccccaccaccccagagcccagccctgctgcccccagccctgcccccagagatggagctggcagccctggcctgtctgaggactgcagcgagagccagcagaccccagcccggagcctgaccctgcaggaggccctggaggtgaggaagccccagttcatcagccgcagccaggagcggctgaagaagctggagcacatggtgcagcagaggaaggcccagaggaaggaggacctgcggcagaagcagagcctgctgcccatccgcaccagcaagaagcagttcaccatcccccaccccctgagtgacaacctcttcaagcccaaggagcgctgcatcagcgagaaggagatgcacatgaggagcaagaggatctatgacaacctgcctgaggtgaagaagaagaaggaggagcagaggaagagggtcatcctgcagagcaaccggctgcgggcagaggtgttcaagaagcagctgctggaccagctgctgcagagaaatgctgtgtag

SEQ ID NO: 335128 - DNA, 2391 bp, Artificial Sequence
  derived and/or modified sequence
atgcagcacagcggcatccccaccaagacccacccccagggctacgcagcccggtatactgagaccgcagtccaccgtacctttcagattaagaccttttccacagaactgaagaaccacgttatggtgatggatttcgtcaaatccaactggttccccagccagagaagggccaaggtgtgcatcatccatatgtgccaggggctcaagaccgctgaacagaccgccagccgctatgagatccacagccggctattttcaagtcctaaggaccacagcgcctgggaaaggaacgaaagtttaagtaacgcggggctccgcgactcctaccatagcaggcgtgaccagatcgctcttaaaaatctgcaatccgacgtgaccgaagccaaatccgacttcaccaaggagaccttagccagccaaaacactaagatgatctcaagtattgtgatatctcagatgattgacgaaaacaaatccagggagaatagggctagcttacctctcccttgtgccatcgcgcagtcccgggcccatcacgctaaacaatcattggccaacagaagcggtgtgaatatccatcgggctttcgcgttgctgcccgggaggctcgggatcccagctccttctgatgaacgcggtcccgaggcagaactgcctccgaaagaagaacggccttgcggcggaccgaggcgcggctttgcctcaataactattaccgcccgccgcgtgggcccaccagcaagggctctcgtttggggcaccgcaggcgactccctctgtccgaaatgtagggcagaagacaccctgtttcaggcgcctcctgccctggccaatggcgcccaccctggacgtcatcaaagaagctttgcctgcacggaattttcccggaacagctcagtagtgcgccttaaagtgccagaagcccatacagggttgtgtgagagacggaagtattgggtcacacatgccgacgacaaggaaacctcgttctctccagacactccgctgtcggggaaatctcccctcgtgttttctagttgcgtgcatctgcgggtttctcagcaatgccccgattctatctactacgtggataagtccctctctgtgcctattgaacctccccagattgcttccccgaagatgcaccggtcagtgctgagcctcaacctaaattgctcctcgcacagacttacggcagatggcgtcgacggcctggtgaatagggaacccatcagcgaggccctcaaacaggagttactagaaggagaccaggacctcgttggccaacgttggaatcctgggctacaggaatcgcacctcaaggaaactccatctttaaggagggtgcatctggggactggcgcttgcccatggagcggatctttcccccttgagaatactgaactggctaacgtgggcgccaaccaggtcaccgtacggaagggtgagaaggatcacaccacacattgtcacgcgtctgaccacgccaaccagctgagcatacatatccctggctggagctatcgggccgtccacacaaaagtattctctggcagctccaagagacagcagggagaagtgtgcatgactgtgtctgctcccccagtggaacaaaagccaactagacacttcctgccgattggcgattcatcacctagcgatgactgcctgtccagggatctctctgagcccaccgaaaggcgacatcagtcatttctcaaacccagaattttgttccctggatttctgtgtcctctgcaggatgtatgtgcgagcctgcaagaggataatggagtccagatcgaatcaaagttcccaaaaggagactacacatgttgcgacttggtggttaagattaaggagtgtaaaaagagcgaggatcctactacacccgaaccgagccccgctgccccgagtccggcaccccgtgacggggccggtagccccggcctgagtgaggactgttcagaatctcagcagacgcctgcacgctcgctgaccctgcaggaggctctggaagtacgcaagccacagttcattagtcggtcccaggagcgcctgaaaaaactggagcacatggtgcaacaaagaaaggctcagcgcaaggaggatctaagacagaagcagtccttactccctatacgtacctccaagaaacagtttacaatccctcacccactgtcagataacctcttcaagccaaaggaaaggtgcatttcagagaaagagatgcacatgcgctcaaagagaatttacgataatctccccgaggtcaaaaagaaaaaagaagaacagaggaagcgcgtgatactacagagcaacaggctgcgcgctgaagtattcaagaaacagctcctggaccagttactgcagcgaaatgcggtgtag

SEQ ID NO: 335129 - DNA, 2391 bp, Artificial Sequence
  derived and/or modified sequence
atgcagcacagtggaattcctactaagacgcatccgcagggttacgcggcaaggtacaccgagaccgccgtccaccggaccttccagattaagactttttccactgagctgaaaaaccacgttatggtgatggatttcgtcaagtccaactggttccctagccaacgaagggccaaagtttgtattattcacatgtgccagggactaaagaccgctgagcagacggccagccggtacgaaattcactcaaggctcttctcgtcacctaaggaccatagcgcttgggagcggaatgagagtctgagtaatgctggcttgagagattcctatcattctcggagagaccagatcgcacttaagaatctgcaaagcgatgtcacagaagcgaagagcgatttcaccaaagagactctcgcctctcagaacaccaaaatgatctcaagcatcgtgataagccaaatgatcgacgagaataagagccgtgaaaatcgggcttctttgcctttaccctgtgcgatcgctcagtccagagctcaccacgccaaacagagtctggctaaccgaagtggcgtcaacatccacagagcctttgcactgctgccaggtaggctcggtattccggcaccctctgacgaacggggaccggaggcagaactgcctcctaaagaggaacgtccttgtggcggacctaggagggggtttgctagcatcacaatcacagccaggcgggtcggccctccagcacgcgctttggtttggggcacagcaggggatagtctgtgtccaaagtgtcgggctgaagacacgctttttcaggcaccaccagccctagccaatggagctcacccaggccgacaccagagaagcttcgcctgcacggaattctcacggaacagctctgtggtgcgtttgaaagtgcccgaggcccacaccggcctatgtgagagaaggaagtactgggtgacccatgcagacgacaaggaaacctccttttctccagatacccccctatctgggaaaagtcctctggtgttttctagctgcgtccacttgagagtgagccaacagtgtccagatagcatctactacgttgataaatcacttagcgtgcccattgagcccccacagatagcctctccaaagatgcatcgatcagtgcttagcctcaacctcaattgttcttctcaccgactaacagcggacggcgtggacgggctcgtaaatcgcgaacccattagcgaagccctcaagcaagagctattggaaggggatcaagaccttgtcggtcagagatggaaccctggtctgcaggaatcccatctgaaagagaccccctctctgcgcagagtccaccttggcaccggggcatgcccatggagcggttccttccctctggaaaacacagagctcgctaatgtcggcgcaaaccaagtgaccgtgcggaaaggtgagaaggaccatacaacgcattgccatgcctcagatcatgcgaatcaattgtctattcacatacccggatggtcttaccgggctgtgcacaccaaagtattctcaggctcgagcaagagacagcagggcgaagtgtgcatgacagtgtctgccccacctgttgagcaaaagccaactcggcactttctgccaattggcgattcatctccatctgacgattgtctcagcagagatcttagcgagcctaccgaaagacgacaccaatccttccttaaacccaggatcctgtttcccggtttcctgtgccccctgcaggacgtgtgcgcatccctgcaggaagacaacggtgtccagatcgagtcaaaatttcctaaaggtgactacacctgctgcgatttggtggtaaagataaaggaatgcaagaaatccgaggatcctaccacccctgaaccgtccccagcagctcctagtccagcccctcgcgacggagccggaagtcccggtttgtctgaggactgtagcgaatcacaacagacgcctgcgcgaagcctgacattacaggaagctctcgaagtgcggaagcctcaattcatttcaaggtcccaggaaagactgaagaaactcgagcacatggttcagcaacgcaaggcacagcgtaaagaagacctcagacagaagcagagtctgttgcccatccggacaagcaagaagcaatttaccatccctcaccccctgtctgacaatctgtttaaaccaaaggagcggtgtataagtgaaaaggaaatgcatatgcgttctaaacgcatttatgataacttacccgaggtgaaaaaaaaaaaggaggaacagaggaagagagtgatcctgcagagtaaccgactgcgcgctgaggtgtttaagaagcagctactggatcagctgctgcagagaaatgctgtctag

SEQ ID NO: 335130 - DNA, 1152 bp, Artificial Sequence
  derived and/or modified sequence
atgatcagcagcatcgtgatcagccagatgatcgacgagaacaagagcagagagaacagagccagcctgcccctgccctgcgccatcgcccagagcagagcccaccacgccaagcagagcctggccaacagaagcggcgtgaacatccacagagccttcgccctgctgcccggcagactgggcatccccgcccccagcgacgagagaggccccgaggccgagctgccccccaaggaggagagaccctgcggcggccccagaagaggcttcgccagcatcaccatcaccgccagaagagtgggcccccccgccagagccctggtgtggggcaccgccggcgacagcctgtgccccaagtgcagagccgaggacaccctgttccaggccccccccgccctggccaacggcgcccaccccggcagacaccagagaagcttcgcctgcaccgagttcagcagaaacagcagcgtggtgagactgaaggtgcccgaggcccacaccggcctgtgcgagagaagaaagtactgggtgacccacgccgacgacaaggagaccagcttcagccccgacacccccctgagcggcaagagccccctggtgttcagcagctgcgtgcacctgagagtgagccagcagtgccccgacagcatctactacgtggacaagagcctgagcgtgcccatcgagcccccccagatcgccagccccaagatgcacagaagcgtgctgagcctgaacctgaactgcagcagccacagactgaccgccgacggcgtggacggcctggtgaacagagagcccatcagcgaggccctgaagcaggagctgctggagggcgaccaggacctggtgggccagagatggaaccccggcctgcaggagagccacctgaaggagacccccagcctgagaagagtgcacctgggcaccggcgcctgcccctggagcggcagcttccccctggagaacaccgagctggccaacgtgggcgccaaccaggtgaccgtgagaaagggcgagaaggaccacaccacccactgccacgccagcgaccacgccaaccagctgagcatccacatccccggctggagctacagagccgacctgctgcaggagggccagcacaagcagctgagcatgttccagagatag

SEQ ID NO: 335131 - DNA, 1152 bp, Artificial Sequence
  derived and/or modified sequence
atgattagttccattgtcatctcccagatgatcgacgaaaacaaaagccgagagaacagggcatccctgccactgccttgtgctattgctcagtcccgtgctcaccacgccaagcaaagccttgccaataggtcgggggtcaatatccaccgagcattcgctctgctgcccggtcgcttaggcatccccgcgcctagcgacgagcgaggaccagaggcagagctgcctccaaaggaggaacgcccatgtggcgggcctagacgaggatttgcaagcattacgatcacagctagacgcgtcggacctcccgctcgcgcccttgtgtggggaaccgcaggcgactctctatgccctaaatgccgggctgaggatactctgttccaggctcctcctgcattggccaatggtgctcatcctggaaggcaccagcgtagcttcgcatgcacagagttctctagaaactcttccgttgttaggctcaaagtgccagaagctcatactggtctgtgcgaacggaggaagtactgggtgactcacgcagatgataaggaaaccagcttcagccctgacactccattaagcggtaagagtcctctggtcttttccagttgtgtgcacctcagagtgagtcagcaatgtcccgatagtatatattatgtggacaagtctttatctgtccctattgaacccccgcagatcgcaagccctaagatgcacaggtccgtccttagcctcaacctgaattgttcaagtcatcgccttacagctgacggggtagatggtcttgttaatagagaaccaatctccgaggccctgaagcaggaactgttggagggggatcaagatctggtggggcagagatggaatcctggacttcaggagagtcacctcaaggagactccgagtttgagacgcgttcacctggggaccggagcatgtccatggtccgggagtttccccctcgagaataccgaactggccaatgtcggggccaatcaggttactgtcaggaagggagagaaggatcatacaactcactgccacgccagtgatcacgcaaaccagctgagcatccacatacccgggtggtcttaccgggctgacctactccaggagggccagcataaacagctgtccatgtttcagcgatag

SEQ ID NO: 335132 - DNA, 1152 bp, Artificial Sequence
  derived and/or modified sequence
atgatatcatcaatcgttatctcacagatgattgacgagaacaaatcacgcgaaaatagggccagcttgcctcttccctgcgctatcgcccagtcaagagcacaccatgccaagcagtcactggccaataggagcggtgttaatattcatcgagcctttgcgcttttgcccggaagactgggcattcccgccccttccgacgagcggggcccagaggctgaattgcccccaaaggaggaaaggccatgcggaggccctcggcggggcttcgcctccattacaattacggcgcgccgagttgggcctccagcaagagccctcgtctggggaacagccggcgactccctatgtcccaaatgcagggcagaggacaccctcttccaggccccacccgcgctggcaaatggtgcccaccccgggcgtcaccagaggtcttttgcctgtacagagttctcaaggaactcttccgtagtccgactgaaagtcccagaggcacacaccggcctttgcgaacggaggaagtactgggtgactcacgctgatgataaagaaaccagtttctcacctgatactccattgagtggcaagagtccacttgtattctctagttgtgtgcatctcagagttagccagcagtgccccgactctatatattacgtcgacaaaagcctcagcgtgcccatcgaacctccgcagattgcatctccaaagatgcacaggagtgttctgtctctgaatctgaattgctcttctcatcgactgaccgccgatggggtcgacgggcttgtgaatagagagcccatctcagaggcactgaaacaggaactgctcgagggagatcaagatctggtagggcagcggtggaaccctggcctccaggagtcccacctaaaagagacacccagtctccggagggtccatctagggaccggggcctgtccatggagcggatccttcccactcgagaacaccgagttagctaacgtcggggccaaccaggtgaccgtaaggaaaggcgaaaaggaccacactacgcactgccacgcctctgatcacgctaaccagctctcaattcatatccctgggtggtcctatagggccgaccttctgcaggagggccagcataaacagctgtcaatgttccagcggtag

SEQ ID NO: 335133 - DNA, 1152 bp, Artificial Sequence
  derived and/or modified sequence
atgatcagcagcatcgtcatcagccagatgattgatgagaacaagagccgggagaacagagccagcctgcccctgccctgtgccatcgcccagagccgggcccaccacgccaagcagagcctggccaacagaagtggagtgaacatccaccgggcctttgccctgctgcccggccgcctgggcatcccagcccccagtgatgagcggggccctgaggccgagctgccccccaaggaggagcggccctgtggcggcccccggcggggctttgccagcatcaccatcacagcccggcgggtgggccccccagcccgggccctggtgtggggcacagctggggacagcctgtgccccaagtgcagagctgaggacaccctcttccaggcccccccagccctggccaatggagcccaccctggccgccaccagaggagctttgcctgcacagagttcagcaggaacagctctgtggtgcggctgaaggtgcctgaggcccacacaggcctgtgtgagaggaggaagtactgggtgacccatgctgatgacaaggagaccagcttctccccagacacccccctgagcggcaagagccccctggtgttcagcagctgtgtgcacctgcgggtgtcccagcagtgcccagacagcatctactacgtggacaagagcctgtctgtgcccatcgagcccccccagatcgccagccccaagatgcacaggtctgtgctgagcctgaacctgaactgcagcagccaccggctgacagcagatggagtggatggcctggtgaaccgggagcccatcagcgaggccctgaagcaggagctgctggagggggaccaggacctggtgggccagcgctggaaccctggcctgcaggagagccacctgaaggagacccccagcctgcggcgggtgcacctgggcaccggggcctgcccctggagcggcagcttccccctggagaacacagagctggccaacgtgggcgccaaccaggtgacagtgaggaagggggagaaggaccacaccacccactgccacgccagtgaccacgccaaccagctgagcatccacatccctggctggagctacagagctgacctgctgcaggagggccagcacaagcagctgtccatgttccagaggtag

SEQ ID NO: 335134 - DNA, 1152 bp, Artificial Sequence
  derived and/or modified sequence
atgatcagcagcatcgtgatcagccagatgatcgacgagaacaagtccagggaaaatcgcgctagcctgcccctcccctgcgcaattgcccagagccgcgcccatcacgccaaacagtccctagcaaacagatctggggttaatatccaccgcgcatttgccctgctgcctggccgattgggcatacccgccccttccgacgaaagaggcccagaggccgaactcccccctaaagaggagagaccctgcggcggtcctcgacggggatttgcatctataactatcactgcccgaagagtcggcccccccgccagagcactcgtttgggggaccgcgggcgacagtctgtgtcctaagtgtcgagcagaagacactctatttcaagctcccccagcactggccaacggggcccaccccgggcgccatcagaggagctttgcctgcactgagttcagccggaattccagcgtagtgcgtcttaaagtacctgaggcccacacgggcctttgcgagcgacggaagtattgggtgacacacgccgatgataaggaaacctcattctcaccagacacccccctgtccggcaaaagcccactggtcttcagctcatgcgttcacttgagagtatcccaacagtgtccagatagcatctactatgtagacaaatctctgtcagtgcccatcgagcccccgcaaatcgccagtccaaaaatgcaccggagcgtcctctcactgaacctcaactgcagctctcataggttgacagccgatggcgtcgatggtctcgttaaccgcgagccgatctccgaagctctcaagcaggagctgttagagggggatcaagatctggtgggacagcgttggaaccctggcctgcaagagtcccatttaaaagagaccccgagcctgagaagagtgcatctggggacaggggcctgtccttggagcggttccttcccgctggagaatacagagctagccaatgtcggcgcaaaccaagttacagtccgaaaaggagaaaaggatcacacgacccattgtcacgcctccgaccacgcaaatcaactgtcgatccacatcccgggatggtcttatcgagccgatctgctgcaggaaggtcagcacaaacagctgtcaatgttccaaagatag

SEQ ID NO: 335135 - DNA, 1152 bp, Artificial Sequence
  derived and/or modified sequence
atgatcagcagcatcgtgatcagccagatgatcgacgagaacaagagcagagagaacagagccagcttgccgcttccgtgcgccatcgctcagagccgggcccaccatgctaaacagtctcttgcgaacaggtcgggcgtgaatatccatcgggcttttgctctgttgcccggaaggttgggcatcccagcaccttctgacgaacgagggccagaggcagaacttcctccaaaggaggaaaggccatgcgggggaccgagacgcgggtttgcttctatcactatcacagctaggcgggtgggacctcccgctcgggctttggtttggggaacagcaggagacagtctctgtcctaaatgccgtgccgaggatacactcttccaagcccctcccgcgctagcaaacggagcccaccccggccggcatcagaggagcttcgcatgcaccgaattctcaagaaacagcagtgtggtccggctcaaagtccccgaagcccatacaggcctttgcgaacgaagaaaatattgggtcactcacgcggacgacaaggagacctctttcagccccgatacaccacttagcggaaaaagccccctggtgttttcaagctgcgtgcacttgagagtttcccaacagtgtcctgactctatctactacgtcgacaaatcactcagcgttcctattgagccaccgcagattgccagcccaaaaatgcacaggtcagtgctgtcgctcaatcttaactgttcctctcacaggttaacggctgatggagtggatggcctggtgaacagggagcccatttctgaggccctaaagcaggaactcttggagggcgaccaggatctggtcgggcaaagatggaaccccggtctccaggaaagccaccttaaagagactcctagcttgcgccgggtgcacttggggaccggcgcttgtccgtggtcaggttccttccctctggaaaatactgagctcgctaacgtaggagccaatcaagtaaccgtgcggaagggcgagaaggaccacactactcactgccatgcaagcgatcacgctaaccagctgagtatccatatccccggctggtcttacagagccgatctgctgcaggaaggccagcataaacagttaagcatgttccagaggtag

SEQ ID NO: 335136 - DNA, 1152 bp, Artificial Sequence
  derived and/or modified sequence
atgatttcatccattgtgatctctcagatgatcgatgagaataaatcccgggagaacagggctagcttgcccctcccttgtgccatcgctcagagtagagcacaccacgctaaacagagccttgccaacagatctggagttaacatccacagagcatttgccttgcttcctggcagactgggcattccagcacctagtgatgagcgtggcccagaagcggagctacccccaaaagaggagcgcccttgcggaggccctcgaagaggcttcgccagtataactatcacagccaggagagtgggaccgcctgcacgcgcattggtgtggggaacagctggagactctctttgccctaagtgccgcgcagaagacacccttttccaagctcctcctgccctagcgaatggagctcaccccggaagacatcagaggtcctttgcctgcacagagttctctagaaacagcagcgtggtaagactgaaggtgccagaagcccataccggcctgtgtgagaggcgcaaatactgggtgactcatgcagatgacaaggagaccagcttttctccagatacacccctatcaggtaaatcccctcttgtgttttcctcttgcgtccacttgcgggtgtcacaacagtgtcctgatagtatctactacgtcgataagagcctgtcagtacctattgaacctccacagatcgccagcccaaaaatgcaccgctccgtgctctcgctgaatttgaactgcagcagccacaggctgactgccgacggcgtagacggactggttaatcgggaacctattagcgaggccctaaaacaggagttgctcgaaggggaccaggacttggtgggacagaggtggaaccctgggctccaggagagtcatctgaaggagacgccatctctaaggcgagtccacttaggcactggggcttgtccatggagcggcagttttcctctggagaacaccgagctcgccaacgttggcgcaaatcaggtgaccgtccggaaaggcgagaaggaccacactactcattgtcacgcctcggatcacgctaaccagctctcgatccacattcctggctggagttatagagctgatctgctgcaagagggccaacacaagcaactatctatgttccagcgctag

SEQ ID NO: 335137 - DNA, 1152 bp, Artificial Sequence
  derived and/or modified sequence
atgatctcttccattgtcataagccaaatgatcgacgagaataagtccagggaaaatcgcgctagcctccccctaccgtgtgcaatcgcgcaatcacgggctcaccacgctaaacaatcactggccaatcggtccggagtgaacatccaccgcgctttcgctctgctgccaggacgcttaggaatccccgctccatcggatgagcgcggtccagaagcagaactgcctccaaaggaggaaagaccctgcggtggccctagaagaggatttgcctccatcacaatcaccgctcggcgtgtggggcctcctgcaagggcactggtgtgggggacggccggtgatagtttgtgccccaagtgtcgggctgaggacacactattccaagctcctccagccttggcaaacggtgcccaccccggaaggcaccaaaggagctttgcctgcacggagttctcccgcaacagctcggtggtgaggctaaaagtccccgaggcacatactggactgtgcgagaggcgcaagtattgggtcacccacgccgacgacaaggagacatctttttcaccagatactcccttgtccggtaagagcccgctggttttcagctcatgtgtgcacctgcgtgttagccagcaatgcccagacagcatctattacgtggacaaatccttatcggtgcccatcgaaccaccccaaatcgcaagcccgaagatgcatcgatcagtcctcagcctgaacctgaactgcagcagccatcggttgaccgccgacggcgtcgacggtctcgtgaacagggagcctatctccgaggccttgaagcaggagctactggaaggtgaccaggacctcgtggggcagaggtggaacccgggactccaggagtcccacctgaaggagactccctcacttagaagagtgcatcttgggactggggcatgcccctggagtgggtccttccctcttgaaaatacagagctggctaatgttggcgctaatcaagtgaccgtgcgaaaaggagagaaggaccacacgacacactgtcatgctagtgaccacgccaatcagttgagtatccatattcctgggtggtcatacagagcagatctgctacaggagggccagcataagcaactgagcatgttccaacgttag

SEQ ID NO: 335138 - protein, 242 aa, Artificial Sequence
  derived and/or modified sequence
  misc_feature (1)..(1): Xaa can be any naturally occurring amino acid
XWSGSFPLENTELANVGANQVTVRKGEKDHTTHCHASDHANQLSIHIPGWSYRAGDYTCCDLVVKIKECKKSEDPTTPEPSPAAPSPAPRDGAGSPGLSEDCSESQQTPARSLTLQEALEVRKPQFISRSQERLKKLEHMVQQRKAQRKEDLRQKQSLLPIRTSKKQFTIPHPLSDNLFKPKERCISEKEMHMRSKRIYDNLPEVKKKKEEQRKRVILQSNRLRAEVFKKQLLDQLLQRNAV

SEQ ID NO: 335139 - DNA, 729 bp, Artificial Sequence
  derived and/or modified sequence
tgatggagcggcagcttccccctggagaacaccgagctggccaacgtgggcgccaaccaggtgaccgtgagaaagggcgagaaggaccacaccacccactgccacgccagcgaccacgccaaccagctgagcatccacatccccggctggagctacagagccggcgactacacctgctgcgacctggtggtgaagatcaaggagtgcaagaagagcgaggaccccaccacccccgagcccagccccgccgcccccagccccgcccccagagacggcgccggcagccccggcctgagcgaggactgcagcgagagccagcagacccccgccagaagcctgaccctgcaggaggccctggaggtgagaaagccccagttcatcagcagaagccaggagagactgaagaagctggagcacatggtgcagcagagaaaggcccagagaaaggaggacctgagacagaagcagagcctgctgcccatcagaaccagcaagaagcagttcaccatcccccaccccctgagcgacaacctgttcaagcccaaggagagatgcatcagcgagaaggagatgcacatgagaagcaagagaatctacgacaacctgcccgaggtgaagaagaagaaggaggagcagagaaagagagtgatcctgcagagcaacagactgagagccgaggtgttcaagaagcagctgctggaccagctgctgcagagaaacgccgtgtag

SEQ ID NO: 335140 - DNA, 1595 bp, Artificial Sequence
  derived and/or modified sequence
cttggagtggttcttttccattggaaaacacagaattggcaaatgtgggagctaaccaagtcactgtaagaaaaggggaaaaggaccatacaactcattgtcacgccagcgatcatgccaaccaactgtccattcacattcctggctggagttacagggcaggagattacacatgctgtgacttggttgtaaaaataaaggaatgtaagaagagtgaggaccccaccacacctgagccctccccagcagcaccctcgccagcaccccgcgatggagcagggagccctggcctgtccgaagactgttctgagtctcagcaaacgcctgcaagatctttgaccttgcaagaagcactggaagttcgtaagcctcagttcatttctcgctcacaagaacggctgaagaagcttgaacacatggtccagcagaggaaagcccagcggaaggaggacctgaggcagaagcagagcctccttcccatccgcaccagcaagaagcagttcacgattccccatcctctgagtgataacttgttcaaacccaaagaacggtgcatttcagagaaggagatgcatatgcgatctaagagaatctatgataacttgccggaagttaaaaagaaaaaagaagaacaaaggaaaagggtgatcttacaaagtaacagactccgtgccgaagtcttcaaaaagcaattactggaccagctccttcaaaggaatgcggtctaaccacaggctgccctgctgaccacactacctggacctgggaggacttcgaatgctggataagccattaaacttagcattatcttcatcatgggaaaacacttattttactttcgattttttttttccataaaggaaaacatcacttcctgaattactgacccaagccaaacagaaacaataaccctcgagaaaataggtcaacaatctgttgtggggaaaccacctccatgtaacccactggatacagtccccttaatgtttttgcttctaaattgtaccttttgcttctgatttcttctcccctgctgtttcctgcccatcagagaggcctgatacaagcaagtttgtttacatccctggggaatcttttacatcaaacttttgggatccaaatccatctccttttaaatttcaatctcagcacctgccagttatgcaaatgccaaaatgtgggtcatcatatagtatatttgaaacctttctgaacatgtacaccacccaatgctagaggctgacttggaaaccggtgggtgcaatgcccgaggctgtggaacaatcagcccatctctttgtgacctggagcagtcagagggccctcagtcaccccgccccattcctcaccagagaaaagaatccatttctatggaagctctgacgtaacttcagtgttttctacaatactcctcctgccccgccccattaaaacagttcttttgttaagaaatagcctaatggtccaactttgctgtctgttcttccaaatgtttataatacacattatttataaatatgtctgtttgggaagctaagaacaagctagtttttacaacacaaatggaaataaatgcaattattataaaaattcaa

SEQ ID NO: 335141 - DNA, 729 bp, Artificial Sequence
  derived and/or modified sequence
taatggagcggctcgttcccactggaaaacactgaactggccaacgtcggagccaatcaagtgactgttaggaaaggagaaaaagaccacacaactcactgtcatgcttctgatcacgctaaccagctgtcaatccacatccccggatggagctacagagccggagattacacctgctgcgacctagttgtgaaaatcaaggagtgcaagaagtcagaggacccaacaacgccagaaccatctcccgcggctccaagccctgcaccccgagatggagccggatctcctggactttcagaggactgcagtgagtcacaacagacacctgctagaagcctgactctgcaggaggccctagaagtgcgaaaaccccagttcatcagcaggtcacaagagaggcttaagaagttggaacacatggtgcagcaaaggaaggctcagcggaaggaggatcttaggcagaaacagtcactgctccctatacgcaccagcaagaaacaatttacgatccctcatccactgagcgataatttgttcaaacctaaggaacgttgtatctcggagaaagaaatgcatatgcgcagtaagcggatatatgataacttgccagaagtgaaaaagaagaaggaggagcaacgtaagagagtgatcctgcagagtaaccgattaagggcagaggtattcaagaagcagctgctggaccagcttctgcagaggaacgctgtgtag

SEQ ID NO: 335142 - DNA, 729 bp, Artificial Sequence
  derived and/or modified sequence
tgatggagcggcagcttccccctggagaacacagagctggccaacgtgggcgccaaccaggtgacagtgaggaaaggagagaaggaccacaccacccactgccacgccagtgaccacgccaaccagctgagcatccacatccctggctggagctaccgggccggggactacacctgctgtgacctggtggtgaagatcaaggagtgcaagaagtctgaggaccccaccaccccagagcccagccctgctgcccccagccctgcccccagagatggagctggcagccctggcctgtctgaggactgcagcgagagccagcagaccccagcccggagcctgaccctgcaggaggccctggaggtgaggaagccccagttcatcagccgcagccaggagcggctgaagaagctggagcacatggtgcagcagaggaaggcccagaggaaggaggacctgcggcagaagcagagcctgctgcccatccgcaccagcaagaagcagttcaccatcccccaccccctgagtgacaacctcttcaagcccaaggagcgctgcatcagcgagaaggagatgcacatgaggagcaagaggatctatgacaacctgcctgaggtgaagaagaagaaggaggagcagaggaagagggtcatcctgcagagcaaccggctgcgggcagaggtgttcaagaagcagctgctggaccagctgctgcagagaaatgctgtgtag

SEQ ID NO: 335143 - DNA, 729 bp, Artificial Sequence
  derived and/or modified sequence
tgatggagcggcagcttccccctggagaacaccgagctggccaacgtgggcgcaaatcaggtgacagtacgaaagggcgagaaagatcataccactcattgtcacgcgtcagaccacgcgaaccaacttagcattcatatacccggatggtcctacagagccggcgattatacgtgctgtgatcttgtggttaagattaaggaatgcaagaagagcgaggacccaaccacacccgaacctagcccggcagctccctctccggctccacgtgacggggcggggtcccctggccttagtgaggactgcagcgagtcccagcaaacacctgcaagatcactgacactgcaagaggctctggaggtgcgcaaaccccagttcatttctcggagccaggaaagactgaaaaaattggagcacatggtacagcaaagaaaggctcaacggaaggaagatctgcgccagaagcagtctttgctacccattcgaacgagcaaaaaacagtttaccataccccatccactgagtgacaatctgttcaaaccaaaagagcgctgcattagtgaaaaggaaatgcacatgaggtccaagcgtatttacgataatttgccagaagtcaaaaaaaagaaagaggagcaacgaaaaagggttattctgcagagtaacagactccgagccgaggtgtttaagaaacaactgctagatcagttgttgcagcgaaatgctgtgtag

SEQ ID NO: 335144 - DNA, 729 bp, Artificial Sequence
  derived and/or modified sequence
tagtggtccgggtccttcccactggagaacacggagctggctaacgtaggggctaaccaggtcactgttcggaaaggcgaaaaggaccacactacacactgtcatgccagtgatcacgctaatcagctaagtatacatattcctggctggagttaccgggcaggagattacacctgctgcgacttggtggttaagataaaagagtgcaaaaagagtgaggatccaactactcccgagcccagtccagcggcacctagcccagccccacgggacggggcaggatcacctggactatccgaggactgcagcgagagccagcagaccccggctagatcactgaccctccaggaggctttggaagtgcggaaaccacagttcatcagccgaagccaggaacggctgaagaagttggaacatatggtccaacagcggaaggctcagagaaaagaggatctccgccaaaaacagagcctgctgccaataagaacatccaagaaacagttcaccattccacatcctctgtctgataacctgttcaagccaaaagaaagatgcatcagtgagaaagaaatgcacatgcggagcaaacgcatctatgataacctgccagaagtgaaaaaaaaaaaggaggagcagaggaagcgggtcatcctgcagtccaataggctgcgggcagaagttttcaaaaagcaacttctcgaccagctgctgcagagaaatgcagtgtag

SEQ ID NO: 335145 - protein, 569 aa, Artificial Sequence
  derived and/or modified sequence
MLAASIFRPTLLLCWLAAPWPTQPESLFHSRDRSDLEPSPLRQAKPIADLHAAQRFLSRYGWSGVWAAWGPSPEGPPETPKGAALAEAVRRFQRANALPASGELDAATLAAMNRPRCGVPDMRPPPPSAPPSPPGPPPRARSRRSPRAPLSLSRRGWQPRGYPDGGAAQAFSKRTLSWRLLGEALSSQLSVADQRRIVALAFRMWSEVTPLDFREDLAAPGAAVDIKLGFGRGRHLGCPRAFDGSGQEFAHAWRLGDIHFDDDEHFTPPTSDTGISLLKVAVHEIGHVLGLPHTYRTGSIMQPNYIPQEPAFELDWSDRKAIQKLYGSCEGSFDTAFDWIRKERNQYGEVMVRFSTYFFRNSWYWLYENRNNRTRYGDPIQILTGWPGIPTHNIDAFVHIWTWKRDERYFFQGNQYWRYDSDKDQALTEDEQGKSYPKLISEGFPGIPSPLDTAFYDRRQKLIYFFKESLVFAFDVNRNRVLNSYPKRITEVFPAVIPQNHPFRNIDSAYYSYAYNSIFFFKGNAYWKVVNDKDKQQNSWLPANGLFPKKFISEKWFDVCDVHISTLNM

SEQ ID NO: 335146 - DNA, 1710 bp, Artificial Sequence
  derived and/or modified sequence
atgctggccgccagcatcttcagacccaccctgctgctgtgctggctggccgccccctggcccacccagcccgagagcctgttccacagcagagacagaagcgacctggagcccagccccctgagacaggccaagcccatcgccgacctgcacgccgcccagagattcctgagcagatacggctggagcggcgtgtgggccgcctggggccccagccccgagggcccccccgagacccccaagggcgccgccctggccgaggccgtgagaagattccagagagccaacgccctgcccgccagcggcgagctggacgccgccaccctggccgccatgaacagacccagatgcggcgtgcccgacatgagaccccccccccccagcgccccccccagcccccccggccccccccccagagccagaagcagaagaagccccagagcccccctgagcctgagcagaagaggctggcagcccagaggctaccccgacggcggcgccgcccaggccttcagcaagagaaccctgagctggagactgctgggcgaggccctgagcagccagctgagcgtggccgaccagagaagaatcgtggccctggccttcagaatgtggagcgaggtgacccccctggacttcagagaggacctggccgcccccggcgccgccgtggacatcaagctgggcttcggcagaggcagacacctgggctgccccagagccttcgacggcagcggccaggagttcgcccacgcctggagactgggcgacatccacttcgacgacgacgagcacttcaccccccccaccagcgacaccggcatcagcctgctgaaggtggccgtgcacgagatcggccacgtgctgggcctgccccacacctacagaaccggcagcatcatgcagcccaactacatcccccaggagcccgccttcgagctggactggagcgacagaaaggccatccagaagctgtacggcagctgcgagggcagcttcgacaccgccttcgactggatcagaaaggagagaaaccagtacggcgaggtgatggtgagattcagcacctacttcttcagaaacagctggtactggctgtacgagaacagaaacaacagaaccagatacggcgaccccatccagatcctgaccggctggcccggcatccccacccacaacatcgacgccttcgtgcacatctggacctggaagagagacgagagatacttcttccagggcaaccagtactggagatacgacagcgacaaggaccaggccctgaccgaggacgagcagggcaagagctaccccaagctgatcagcgagggcttccccggcatccccagccccctggacaccgccttctacgacagaagacagaagctgatctacttcttcaaggagagcctggtgttcgccttcgacgtgaacagaaacagagtgctgaacagctaccccaagagaatcaccgaggtgttccccgccgtgatcccccagaaccaccccttcagaaacatcgacagcgcctactacagctacgcctacaacagcatcttcttcttcaagggcaacgcctactggaaggtggtgaacgacaaggacaagcagcagaacagctggctgcccgccaacggcctgttccccaagaagttcatcagcgagaagtggttcgacgtgtgcgacgtgcacatcagcaccctgaacatgtag

SEQ ID NO: 335147 - DNA, 1710 bp, Artificial Sequence
  derived and/or modified sequence
atgctggccgcaagtatcttccggcccacactcctcctctgttggctggcggctccatggcccacacaaccggagtccctgtttcacagtcgggatcggtccgacctggaaccgagtccactgcggcaggccaaacctatcgcagatctgcacgctgcacagcgtttcctgagcaggtatggctggagtggagtatgggccgcctggggaccaagcccggagggaccccccgaaacaccaaagggagctgccctcgccgaagctgttaggaggtttcagagggctaatgcgcttcccgcgagcggcgagctcgatgctgccaccctggccgccatgaacaggccaagatgtggcgttcccgatatgcgaccacccccaccatcagctcctccttcaccacccggccctccccccagggcacggagccggcggtctccacgcgccccccttagcttgtctagacgcggatggcaacccaggggttatcctgatgggggtgctgctcaggccttctctaagagaaccttgtcttggagacttctgggcgaggcattgagctcccagctatctgtggcggatcaacggcgcatcgtggcactcgctttccgaatgtggagcgaggtaactcctctggacttccgcgaggatctggccgctccgggtgctgccgttgacatcaaattagggtttggccgcggcagacacctcggttgccctagagccttcgacggctctggccaggagtttgcacatgcttggagactcggggatattcacttcgatgatgacgagcatttcactccaccaactagcgacacagggatttctttgctgaaagtcgcagtgcacgagattggtcacgttttgggtctaccgcacacctaccgaacaggctctattatgcagccaaactacattccacaggagcccgccttcgagctagattggtctgaccgaaaagcaatccaaaagttatacgggagctgcgaaggatcattcgacacagcctttgactggataagaaaagagaggaaccagtatggggaggtgatggtcagattttcaacttactttttcaggaattcatggtattggctgtatgaaaatcggaacaaccgcaccagatatggggatcccatccagatcctgaccggctggcctggaatacccacacataacattgacgcattcgttcacatttggacctggaaacgggatgagcgctactttttccagggtaaccagtattggaggtatgactctgataaagaccaggcgctgacagaggatgagcagggtaagagctacccaaaattgatctccgagggctttcctggaatccccagtccactcgataccgctttttatgacagaagacagaagctaatatatttcttcaaggaatctctggtttttgcattcgacgtaaaccggaatcgagtcttaaactcatatccgaagcgcatcactgaagtattccccgccgtcatccctcagaaccatcctttccgcaatattgattcggcttactacagctatgcatacaattcaatcttctttttcaaaggtaacgcttattggaaggttgtcaacgacaaggacaagcagcaaaactcctggctcccagcaaacgggctgtttccgaagaagtttatttccgagaaatggtttgacgtgtgtgatgttcatatctccaccctgaacatgtag

SEQ ID NO: 335148 - DNA, 1710 bp, Artificial Sequence
  derived and/or modified sequence
atgctggccgccagcatcttccggcccaccctgctgctgtgctggctggccgccccctggcccacccagcctgagagcctcttccacagccgggacagaagtgacctggagcccagccccctgcggcaggccaagcccatcgctgacctgcacgccgcccagcgcttcctgagccgctatggctggagcggcgtgtgggccgcctggggccccagccctgagggccccccagagacccccaagggagctgccctggccgaggccgtgcggcgcttccagagggccaatgccctgcctgccagcggggagctggatgctgccaccctggccgccatgaaccggccccgctgtggggtgcctgacatgaggcctcctccacccagcgccccacccagccccccaggccccccaccccgggcccggagcagaagaagcccccgggcccccctgagcctgagccggcggggctggcagccccggggctacccagatggaggagctgcccaggccttcagcaagaggaccctgtcctggaggctgctgggggaggccctgagcagccagctgtctgtggccgaccagaggagaattgtggccctggccttcaggatgtggagcgaggtgacccccctggacttccgggaggacctggccgcccctggagctgctgtggacatcaagctgggcttcggccggggccgccacctgggctgcccccgggcctttgatggcagcggccaggagtttgcccacgcctggaggctgggggacatccactttgatgatgatgagcacttcaccccacccaccagtgacaccggcatcagcctgctgaaggtggccgtgcatgaaattggacatgtgctgggcctgccccacacctacagaacaggcagcatcatgcagcccaactacatcccccaggagcccgcctttgagctggactggagcgacaggaaggccatccagaagctgtatggcagctgtgagggcagctttgacacagcctttgactggatcaggaaggagaggaaccagtatggagaggtgatggtgcgcttcagcacctacttcttcaggaacagctggtactggctgtatgagaacagaaacaacagaacccgctacggggaccccatccagatcctgaccggctggccaggcatccccacccacaacattgatgcctttgtgcacatctggacctggaagagagatgagcgctacttcttccagggcaaccagtactggaggtatgacagcgacaaggaccaggccctgacagaagatgagcagggcaagagctaccccaagctgatcagcgagggcttccctggcatccccagccccctggacacagccttctatgaccggcggcagaagctgatctacttcttcaaggagagcctggtgtttgcctttgatgtgaacagaaacagagtgctgaacagctaccccaagaggatcacagaggtgtttcctgctgtgatcccccagaaccaccccttcaggaacatcgacagcgcctactacagctatgcctacaacagcatcttcttcttcaagggaaatgcctactggaaggtggtgaatgacaaggacaagcagcagaacagctggctgcctgccaacggcctcttccccaagaagttcatcagcgagaagtggtttgatgtgtgtgatgtgcacatcagcaccctgaacatgtag

SEQ ID NO: 335149 - DNA, 1710 bp, Artificial Sequence
  derived and/or modified sequence
atgctggccgccagcatcttccggcccaccctgctgctgtgctggctggcggccccctggcctactcagcccgagtctctgtttcacagtagagatcgttccgatctggagccatctcccttgcgccaagctaaaccgatagctgacctgcacgccgcccagaggtttttgagcagatacggctggtccggtgtgtgggccgcatggggtcctagcccagagggccctccagagacacccaagggcgcagcccttgctgaggcggtaaggaggttccagcgcgctaacgctctgcctgctagtggtgaactggatgccgccacactggctgctatgaatcggccacgctgtggcgtcccagacatgaggcctccaccaccatctgctccaccctcacctccaggcccgcctccgcgtgctcgctcccggcgctccccaagagcccccctgagtctgtctcggcgggggtggcaaccccgcggatatcctgatggtggtgcggcacaagcattcagcaagcgaaccctctcatggcgtctgctgggggaggccctctctagccagcttagtgttgctgatcagagaagaatcgttgcgctggctttccgtatgtggtcagaagtgactcccctggatttcagggaggatctggctgcaccaggcgccgccgtcgacattaaattgggatttgggagagggcggcacttgggttgcccgagggcgttcgatggatcgggacaggagttcgcgcatgcctggagactgggggacattcactttgacgacgacgagcacttcacaccccccacctcagacactggcattagtcttcttaaagtggcagtgcacgaaatcggccatgtcctgggcctacctcatacctaccgcaccggaagcattatgcagcctaactatattcctcaggagcctgccttcgagctggattggtctgaccgaaaggccatccagaaattgtacggcagttgcgagggatcttttgacacggcattcgactggattaggaaagaacgcaaccagtatggggaggtaatggttcgcttcagcacttacttttttagaaacagctggtattggctgtacgaaaataggaacaaccgcacgagatatggtgatcccattcagatcctcaccggttggccaggtattcctacacacaatattgacgcttttgtgcatatttggacctggaagcgggacgagaggtattttttccaaggcaatcagtattggcgttatgactccgataaggaccaagcgctcacagaggacgagcagggcaaatcatacccaaagttgatctctgaggggtttcccggaatcccttctccactcgacactgccttttacgatagaaggcagaaactcatatacttttttaaggagtctctggtattcgcattcgacgtgaataggaaccgggtactcaactcctatcctaagaggataactgaggtatttcccgccgtgatccctcaaaatcaccctttcaggaatatcgattcagcctactactcttacgcgtacaacagcatttttttttttaaaggcaacgcctactggaaagtggtcaatgacaaggataaacaacaaaatagttggctgccggccaatggcctcttcccaaagaagtttattagtgaaaaatggtttgatgtgtgtgatgtccacatttccacccttaacatgtag

SEQ ID NO: 335150 - DNA, 1710 bp, Artificial Sequence
  derived and/or modified sequence
atgctcgcagctagcatttttagacctacgcttctgttgtgctggcttgcagccccttggcccacccagccagaatcattgttccattctcgagacagatctgacttagagccatctccgttgaggcaggctaagccaattgccgaccttcacgctgcccaaagattcttgagccgctacggttggtctggggtgtgggccgcttggggtccctctccagagggcccaccagaaactccaaaaggcgcagccctggctgaggccgtccgcagattccagcgggctaacgcgcttcccgcaagcggcgagttagacgccgctactttagccgcaatgaatcgaccacggtgtggggttcctgacatgaggccacccccaccctccgccccacccagccctccaggcccaccaccacgtgccaggtcacggaggagtccccgagcgcctttgagtttgtctcgtagaggctggcagccacgcggttatcctgacgggggagctgcccaagccttttccaagaggaccctgagctggaggctactaggtgaagcactgagttcccagttgagcgtggcagatcagcgcaggatagttgcgctggcctttcgtatgtggtcagaggtgacacctctggacttccgtgaggatttagcggcacctggggctgctgtggatataaaattgggctttggcagaggacgccacctcggttgtcccagggcatttgatggttctggccaggaatttgcgcatgcgtggcgtctgggcgatatccattttgatgacgacgagcatttcactccccctacctccgatactggcatttcactcctgaaggtggccgtgcacgaaattgggcacgtcctcggtttgccccatacctacaggaccggttctataatgcagccaaattacatccctcaggagcccgctttcgagctcgactggtcagaccgtaaagccattcaaaaactgtacggcagctgcgaagggtctttcgatacagccttcgactggatccgcaaggagaggaatcagtacggagaggtgatggttcgcttctcaacttattttttccgcaattcttggtattggctctatgagaatcggaacaacaggacccgttacggggatcctattcaaatcctgacaggatggccaggaattcccactcataatatcgatgctttcgtgcacatttggacgtggaagagggacgaacggtacttttttcagggtaaccaatattggagatatgatagtgacaaggatcaggcccttactgaagacgagcaagggaaatcctaccccaagctaataagtgagggattccccggtattcctagcccgctagatacagctttttatgacaggcgacagaagctcatctacttttttaaggaaagcttggtctttgcatttgatgtcaacaggaacagggtgctgaactcctacccaaaaaggataacagaggtattccccgctgtgattccccagaatcatcccttccgcaacatcgactcagcctattattcctacgcttataatagcattttcttcttcaagggaaacgcatactggaaagttgtaaacgataaagataaacagcagaacagctggctgccggctaatggattgttccccaagaaattcatatctgagaagtggtttgatgtttgtgacgtacatatatctaccctgaatatgtag

SEQ ID NO: 335151 - DNA, 1919 bp, Artificial Sequence
  derived and/or modified sequence
atgctcgccgcctccatcttccgtccgacactgctgctctgctggctggctgctccctggcccacccagcccgagagtctcttccacagccgggaccgctcggacctggagccgtccccactgcgccaggccaagcccattgccgacctccacgctgctcagcggttcctgtccagatacggctggtcaggggtgtgggcggcctgggggcccagtcccgaggggccgccggagacccccaagggcgccgccctggccgaggcggtgcgcaggttccagcgggcgaacgcgctgccggccagcggggagctggacgcggccaccctagcggccatgaaccggccgcgctgcggggtcccggacatgcgcccaccgcccccctccgccccgccttcgcccccgggcccgccccccagagcccgctccaggcgctccccgcgggcgccgctgtccttgtcccggcggggttggcagccccggggctaccccgacggcggagctgcccaggccttctccaagaggacgctgagctggcggctgctgggcgaggccctgagcagccaactgtccgtggccgaccagcggcgcattgtggcgctggccttcaggatgtggagcgaggtgacgccgctggacttccgcgaggacctggccgcccccggggccgcggtcgacatcaagctgggctttgggagaggccggcacctgggctgtccgcgggccttcgatgggagcgggcaggagtttgcacacgcctggcgcctaggtgacattcactttgacgacgacgagcacttcacacctcccaccagtgacacgggcatcagccttctcaaggtggccgtccatgaaattggccatgtcctgggcttgcctcacacctacaggacgggatccataatgcaaccaaattacattccccaggagcctgcctttgagttggactggtcagacaggaaagcaattcaaaagctgtatggctcctgtgagggatcatttgatactgcgtttgactggattcgcaaagagagaaaccaatatggagaggtgatggtgagatttagcacatatttcttccgtaacagctggtactggctttatgaaaatcgaaacaataggacacgctatggggaccctatccaaatcctcactggctggcctggaatcccaacacacaacatagatgcctttgttcacatctggacatggaaaagagatgaacgttatttttttcaaggaaatcaatactggagatatgacagtgacaaggatcaggccctcacagaagatgaacaaggaaaaagctatcccaaattgatttcagaaggatttcctggcatcccaagtcccctagacacggcgttttatgaccgaagacagaagttaatttacttcttcaaggagtcccttgtatttgcatttgatgtcaacagaaatcgagtacttaattcttatccaaagaggattactgaagtttttccagcagtaataccacaaaatcatcctttcagaaatatagattccgcttattactcctatgcatacaactccattttctttttcaaaggcaatgcatactggaaggtagttaatgacaaggacaaacaacagaattcctggcttcctgctaatggcttatttccaaaaaagtttatttcagagaagtggtttgatgtttgtgacgtccatatctccacactgaacatgtaataagaaaaagtaggaaatggagggtcataggacttcgctaaaattctgatactgtttacaaagaaaaccggattttcagtagctgaagaaaatatggcactgtaagttaaaacccaatgggaaaagccttagttgaacttttaaaatacttgatttaaaaacaattgctcaggcaaaacataattcataaactaaaaggtttaaaaaaa

SEQ ID NO: 335152 - protein, 322 aa, Artificial Sequence
  derived and/or modified sequence
MEADLSGFNIDAPRWDQRTFLGRVKHFLNITDPRTVFVSERELDWAKVMVEKSRMGVVPPGTQVEQLLYAKKLYDSAFHPDTGEKMNVIGRMSFQLPGGMIITGFMLQFYRTMPAVIFWQWVNQSFNALVNYTNRNAASPTSVRQMALSYFTATTTAVATAVGMNMLTKKAPPLVGRWVPFAAVAAANCVNIPMMRQQELIKGICVKDRNENEIGHSRRAAAIGITQVVISRITMSAPGMILLPVIMERLEKLHFMQKVKVLHAPLQVMLSGCFLIFMVPVACGLFPQKCELPVSYLEPKLQDTIKAKYGELEPYVYFNKGL

SEQ ID NO: 335153 - DNA, 2568 bp, Artificial Sequence
  derived and/or modified sequence
ggcgggagcctcccggcctgggattggtcgaaaaggaggggcgtggggcgggcgtgggggcagttccccagcccaggtcctcctctcacccgggccagttttcaaggcgggctgtaactggtggcatttgtcccgggaccaggtccacagttttatgtgtgagcaagatggaggctgacctgtctggctttaacatcgatgccccccgttgggaccagcgcaccttcctggggagagtgaagcacttcctaaacatcacggacccccgcactgtctttgtatctgagcgggagctggactgggccaaggtgatggtggagaagagcaggatgggggttgtgcccccaggcacccaagtggagcagctgctgtatgccaagaagctgtatgactcggccttccaccccgacactggggagaagatgaatgtcatcgggcgcatgtctttccagcttcctggcggcatgatcatcacgggcttcatgctccagttctacaggacgatgccggcggtgatcttctggcagtgggtgaaccagtccttcaatgccttagtcaactacaccaacaggaatgcggcttcccccacatcagtcaggcagatggccctttcctacttcacagccacaaccactgctgtggccacggctgtgggcatgaacatgttgacaaagaaagcgccgcccttggtgggccgctgggtgccctttgccgctgtggctgcggctaactgtgtcaatatccccatgatgcgacagcaggagctcataaagggaatctgcgtgaaggacaggaatgaaaatgagattggtcattcccggagagctgcggccataggcatcacccaagtagttatttctcggatcaccatgtcagctcctgggatgatcttgctgccagtcatcatggaaaggcttgagaaattgcacttcatgcagaaagtcaaggtcctgcacgccccattgcaggtcatgctgagcgggtgcttcctcatcttcatggtgccagtggcgtgtgggcttttcccacagaaatgtgaattgccagtttcctatctggaaccgaagctccaagacactatcaaggccaagtatggagaacttgagccttatgtctacttcaataagggtctctaaatgccccacttcagcaaggaccagtctattcccatattcaccagctcctccttagctacgtgcacacttgtgtcctccttcccctttgccaacaaggcctgaaggccagggtagattggggggtgggacaatgaatgcctcatacttacaccctggtactggttgattggacctcaggggaaaaaagtgaaaaagggtagcaaaggccaatgtcttctagctgcttcctcaacccctgtcccctggagaccagaagctgaggccctctcagggaggagacatccaagcaaatcatttggaaaagttaggaaacctttaggattctggttccagccagggttgaggaaaagaccttggatcaaaaggaagcttctatacctctttcttcttcgcttcctcctctcccaagcaatggaaacttttacccatgtaattctagctgaactcaggaaaaagaagggggaaaggactctgtccccttggggctcatcacccttccacatcctcctcctcgttgccccctggtcaggcagcttcttttttttttttttcaagatggagtcttgctctgtcgcccaggctggaatgcagtggcgcgatctcggctcactgcaaactctgcctcctggattcaagcgattctcctgcctcagcctctcaagtagctgggattacagggcacctgccaccacgcctggctaatttttgtattttagtggagacggggtttcaccatgctggccagactggtctcgaactcctgacctcaggtgatccgcccgcctcagcctctgaaattgctgggattacaggcatgagccaccacacccagcccggacagcttctttgggagtgctgctaaccttgaaattatcagacacttaggagttattagtgctaaaaaggggaccgtgcaaggcagcagagttacatggttcttcaaatcatgtctgaacctattcttggaatcttctctataataagggaagttctcttaccccactgccacatacctctgttttaaaagataagtccactaactgtgagtaaaaatgatatatataggcattaaccacacactttaatgggtataatttcctggctgcctcccttcctcagcccattaggttaaacaccaaagaaagactggtgtgtactgaataggaaagggaagttttatttggaaccttctaagaggaaatcaaccaggaccaaagagccttaaaggacacacagcaatgcacagccacttcccttccccagcttggctgccctaggtgatttctcaagctccttgggggactgttgtttctcatctggaatcaatgtgtgtatgagttttgtctggtaggattgctgactctgtccaacagatatcactgtgaattgaataaatttgttgaaagagcacacaggcacacatacacacaaa

SEQ ID NO: 335154 - DNA, 1320 bp, Artificial Sequence
  derived and/or modified sequence
atgagatggagcaacctgttcaccagcgagaagggcagcgaccccgacaaggagagaaaggcccccgagaaccacgccgacaccatcggcagcggcagagccatccccatcaagcagggcatgctgctgaagagaagcggcaagtggctgaagacctggaagaagaagtacgtgaccctgtgcagcaacggcgtgctgacctactacagcagcctgggcgactacatgaagaacatccacaagaaggagatcgacctgcagaccagcaccatcaaggtgcccggcaagtggcccagcctggccaccagcgcctgcacccccatcagcaccagcaagagcaacggcctgagcaaggacatggacaccggcctgggcgacagcatctgcttcagccccagcatcagcagcaccaccagccccaagctgaaccccccccccagcccccacgccaacaagaagaagcacctgaagaagaagagcaccaacaacttcatgatcgtgagcgccaccggccagacctggcacttcgaggccaccacctacgaggagagagacgcctgggtgcaggccatccagagccagatcctggccagcctgcagagctgcgagagcagcaagagcaagagccagctgaccagccagagcaaggccatggccctgcagagcatccagaacatgagaggcaacgcccactgcgtggactgcgagacccagaaccccaagtgggccagcctgaacctgggcgtgctgatgtgcatcgagtgcagcggcatccacagaagcctgggcaccagactgagcagagtgagaagcctggagctggacgactggcccgtggagctgagaaaggtgatgagcagcatcggcaacgacctggccaacagcatctgggagggcagcagccagggccagaccaagcccagcgagaagagcaccagagaggagaaggagagatggatcagaagcaagtacgaggagaagctgttcctggcccccctgccctgcaccgagctgagcctgggccagcagctgctgagagccaccgccgacgaggacctgcagaccgccatcctgctgctggcccacggcagcagagaggaggtgaacgagacctgcggcgagggcgacggctgcaccgccctgcacctggcctgcagaaagggcaacgtggtgctggcccagctgctgatctggtacggcgtggacgtgatggccagagacgcccacggcaacaccgccctgacctacgccagacaggccagcagccaggagtgcatcaacgtgctgctgcagtacggctgccccgacaagtgcgtgtag

SEQ ID NO: 335155 - DNA, 1320 bp, Artificial Sequence
  derived and/or modified sequence
atgcgatggagtaatctgtttaccagtgagaagggatcagatcctgacaaggaaagaaaggctccagagaaccatgcggatacaattgggagtggtcgggccattccaatcaagcaaggtatgctgctgaagaggtctggtaagtggctgaagacttggaagaaaaaatacgtcaccctatgttctaacggggtgttgacctactatagctcgttgggagactacatgaagaacatccataagaaggagatcgacctacagacctcaacaattaaagttcctggaaaatggccgtccctggccacgtccgcctgtacccctataagtactagcaagtctaatggactctcaaaggacatggacaccggcctcggcgatagtatttgtttctccccctcaatttcctccactacttcgcccaagttaaaccccccaccgtccccccacgctaacaagaagaagcatctgaaaaaaaaaagcactaacaattttatgatcgtcagcgcaacaggtcagacctggcatttcgaggctactacctatgaggaaagggacgcatgggtgcaggccattcagtcgcagatactcgcctccctgcaatcctgtgagtctagcaaatcaaaatcgcagctgacatcccagagcaaagccatggctctccaaagcatccagaacatgagaggcaatgcccactgtgtcgactgtgaaacccagaacccaaagtgggcatccctgaatctgggtgtgcttatgtgtatagaatgctctgggatccaccggtctctgggcacgcgcttgtccagagtgagatctctcgagctcgatgattggccagttgagctgcgcaaggttatgtctagtatcggaaatgaccttgccaattccatctgggaaggcagcagccaggggcagactaaacctagcgaaaagagtacccgcgaggaaaaagagagatggatccgaagcaaatacgaggagaagttgtttctcgctccactgccctgcacagaactctcgctgggacagcaattgctgcgcgcgaccgcagacgaagatctgcagacggccattctcctgctggcgcacggatccagggaagaagttaatgagacctgcggtgagggggatgggtgcacagccttacatctggcatgcagaaagggtaatgtcgtcttggcgcagctgctaatctggtatggagtcgatgtgatggcccgcgatgcacacggcaacacagccctcacttatgccaggcaggcaagttctcaggaatgcatcaatgtcttgcttcagtatggatgtccggataagtgcgtgtag

SEQ ID NO: 335156 - DNA, 1320 bp, Artificial Sequence
  derived and/or modified sequence
atgcgctggagcaacctcttcaccagcgagaagggcagtgaccctgacaaggagaggaaggccccagaaaatcatgctgacaccatcggcagcggccgggccatccccatcaagcagggcatgctgctgaagaggtctgggaagtggctgaagacctggaagaagaagtatgtgaccctgtgcagcaatggagtgctgacctactacagcagcctgggggactacatgaagaacatccacaagaaggagattgacctgcagaccagcaccatcaaggtgcctgggaagtggcccagcctggccaccagcgcctgcacccccatcagcaccagcaagagcaatggcctgagcaaggacatggacaccggcctgggggacagcatctgcttcagccccagcatcagcagcaccaccagccccaagctgaaccccccacccagcccccacgccaacaagaagaagcacctgaagaagaagagcaccaacaacttcatgattgtgtctgccaccggccagacctggcactttgaggccaccacctatgaggagagagatgcctgggtgcaggccatccagagccagatcctggccagcctgcagagctgtgagagcagcaagagcaagagccagctgaccagccagagcaaggccatggccctgcagagcatccagaacatgagaggaaatgcccactgtgtggactgtgagacccagaaccccaagtgggccagcctgaacctgggcgtgctgatgtgcatcgagtgcagcggcatccacaggagcctgggcacccggctgagccgggtgcgcagcctggagctggatgactggcctgtggagctgaggaaggtgatgagcagcattggaaatgacctggccaacagcatctgggagggcagcagccagggccagaccaagcccagcgagaagagcacccgggaggagaaggagcgctggatccgcagcaaatatgaggagaagctgttcctggcccccctgccctgcacagagctgagcctgggccagcagctgctgcgggccacagcagatgaggacctgcagacagccatcctgctgctggcccacggcagccgggaggaggtgaatgagacctgtggggagggagatggctgcacagccctgcacctggcctgcaggaaaggaaatgtggtgctggcccagctgctgatctggtatggagtggatgtgatggccagagatgcccacggcaacacagccctgacctacgcccggcaggccagcagccaggagtgcatcaacgtgctgctgcagtatggctgcccagacaagtgtgtgtag

SEQ ID NO: 335157 - DNA, 1320 bp, Artificial Sequence
  derived and/or modified sequence
atgcggtggagcaacctgttcaccagcgagaagggcagcgaccccgataaagaacggaaggcccccgaaaaccacgcagacaccattggcagtgggagggccattcctataaaacagggaatgttgctgaagcgcagcggcaagtggctgaagacttggaagaagaagtacgtgacactttgcagcaatggggttctcacctactattccagtctgggagattatatgaaaaacatccataaaaaggaaattgaccttcaaacctcgaccattaaagttccaggtaagtggccctccctagcaaccagtgcttgtacgcccatctccacttccaagagcaacggactgtctaaagacatggacacaggtctcggagattctatttgctttagtccttcaatcagctccaccacttcaccaaaattgaaccctcctccgagcccgcacgccaataagaaaaagcatctcaagaagaagtctacaaataattttatgattgtctccgctactggccagacttggcacttcgaagcaactacctatgaggagagggacgcctgggttcaagccatccaaagccagatactagcatcgctccagagttgcgagagcagcaagagtaagtcacagctcacatcgcagtctaaggccatggccctgcagagcattcagaacatgagaggcaatgctcactgcgtcgattgcgaaacacagaaccccaagtgggccagtctgaatctcggggtgcttatgtgcatagagtgcagcggcatccatcgctccctcgggactaggctgtcccgggttagaagcctggagttggacgattggccggtcgaactaaggaaagtgatgtccagcattggaaatgacctggcaaacagcatatgggagggtagctctcagggtcaaacaaagccttctgagaaaagcacccgcgaggaaaaggagaggtggatacgcagtaagtatgaagaaaaactctttctggcccccctcccgtgtaccgaattgtcgcttggccagcaacttcttcgggctacggcggatgaggatttacaaacggcaattctgctgctagcccatggatcccgagaggaggttaacgagacatgtggagagggagacggctgcactgcgctgcatctcgcttgtcgcaagggaaatgtcgtattggctcaattattgatatggtatggcgtggatgtaatggcccgcgacgcccacggcaatacagcactcacctacgcaaggcaggcttcctcacaggaatgcataaacgtgctgctacaatacggctgccccgataagtgtgtgtag

SEQ ID NO: 335158 - DNA, 1320 bp, Artificial Sequence
  derived and/or modified sequence
atgcggtggtctaacctgtttacttctgagaaaggcagcgaccctgacaaggagagaaaggcacccgaaaatcacgcagacaccatcggtagcggtagggccattcccattaaacaagggatgctgctgaaacggtccggcaagtggctgaaaacctggaaaaagaaatatgtgacactttgctccaatggagtgctgacatattactcctccctgggtgattatatgaaaaacatccacaaaaaagagatagaccttcagaccagtacaattaaagtgccaggcaagtggccctccctggcgaccagcgcatgtaccccaattagtacatcgaaatcaaacgggttatccaaggatatggatacaggcctaggggattcaatctgttttagtccatccatatcaagcacaacgagccctaaacttaatccaccaccctcgccccatgctaataaaaaaaagcatttgaagaagaaaagcactaacaactttatgatcgtatcagcaacgggccaaacctggcattttgaggcaaccacatacgaggaacgagacgcgtgggttcaggccattcagtctcagatcctggcatcactgcaaagttgcgagtcctcgaaatcaaagagccagctgaccagccaatcaaaagcaatggccttgcaaagcatccagaatatgcgcggaaatgcacattgtgtagattgtgagacccagaaccctaagtgggcctccctgaatctaggcgtcctcatgtgcatagagtgctccggtatccacaggtccctggggactagactgtctcgggtaaggagccttgaacttgacgactggcccgttgagctcaggaaggtgatgagctctatcggaaatgacctagccaattccatctgggagggatcctcacaggggcagacaaaacccagcgagaaatcaactcgcgaagagaaggaacgttggatccggagtaagtacgaggagaagcttttcctagcgcctctcccgtgtactgagctgtcactaggccagcagctgctgcgcgcaacagctgacgaggacctgcagaccgcaatcctcctactggcgcacggctccagggaggaagtgaatgaaacctgcggcgagggcgacggttgtaccgcccttcacttagcctgtcgtaagggaaacgtagtcctggcccaactgctgatctggtacggtgtggacgtcatggcccgagacgcccacgggaacactgcactgacatacgccagacaggcgtccagccaggaatgtattaatgttctgctgcagtatggatgcccggacaaatgtgtatag

SEQ ID NO: 335159 - protein, 243 aa, Artificial Sequence
  derived and/or modified sequence
MSGDATRTLGKGSQPPGPVPEGLIRIYSMRFCPYSHRTRLVLKAKDIRHEVVNINLRNKPEWYYTKHPFGHIPVLETSQCQLIYESVIACEYLDDAYPGRKLFPYDPYERARQKMLLELFCKVPHLTKECLVALRCGRECTNLKAALRQEFSNLEEILEYQNTTFFGGTCISMIDYLLWPWFERLDVYGILDCVSHTPALRLWISAMKWDPTVCALLMDKSIFQGFLNLYFQNNPNAFDFGLC

SEQ ID NO: 335160 - protein, 215 aa, Artificial Sequence
  derived and/or modified sequence
MRFCPYSHRTRLVLKAKDIRHEVVNINLRNKPEWYYTKHPFGHIPVLETSQCQLIYESVIACEYLDDAYPGRKLFPYDPYERARQKMLLELFCKVPHLTKECLVALRCGRECTNLKAALRQEFSNLEEILEYQNTTFFGGTCISMIDYLLWPWFERLDVYGILDCVSHTPALRLWISAMKWDPTVCALLMDKSIFQGFLNLYFQNNPNAFDFGLC

SEQ ID NO: 335161 - DNA, 732 bp, Artificial Sequence
  derived and/or modified sequence
atgagtggcgacgctacaaggacccttggcaaaggtagccaacctcctggtcccgtacccgaaggcctgattagaatttattcgatgaggttttgtccttatagtcacagaaccagacttgttctgaaagctaaagatatcagacatgaagtagttaacattaatctgagaaacaaaccagagtggtattatacgaagcacccatttggccacattccagtcctggaaacttcccagtgccagctcatctatgagtccgtgatagcatgcgaatatctagacgatgcctatccgggtcgaaagctttttccttatgacccttatgagcgggcacgccagaaaatgctgcttgagctgttttgcaaggtgccacacctcacaaaagaatgtctggtagctttgcgatgtggaagagagtgtacaaacctgaaagccgcattacggcaagagttttcgaaccttgaggaaatcctcgaataccaaaatactactttcttcggaggaacatgcatctccatgatcgattatttgctatggccatggtttgagcggctcgacgtttatggcattttggactgtgtgagccatacgcctgccctgcggctgtggatttctgcaatgaagtgggatccaaccgtttgtgcactgttgatggacaaaagcatcttccaaggttttttaaatctttacttccagaacaaccccaacgcatttgactttggactgtgttag

SEQ ID NO: 335162 - DNA, 732 bp, Artificial Sequence
  derived and/or modified sequence
atgagcggcgatgctaccaggacactgggaaagggtagccagcctcccggaccggtgcccgagggccttatccgaatctatagtatgagattttgcccctactcccacaggacccgcctggtccttaaagctaaggacattcgtcacgaggtcgtgaatatcaatcttcgaaataagcctgagtggtactacaccaaacatccatttggacacattcctgtgcttgagacaagtcaatgtcaactgatctacgagtctgtcatcgcttgcgaatatttggacgacgcataccctggcagaaaactatttccgtacgacccatatgaaagggctcggcaaaaaatgctcttggagctattttgtaaagtcccacacctgaccaaagaatgtctggttgccttgagatgcggccgggagtgtacgaaccttaaagccgccctacgccaggagttctcgaaccttgaagaaatcttggagtatcagaacactaccttttttggggggacttgcatttctatgatcgactacctgttgtggccctggtttgagcgcctggatgtttacggaattcttgattgtgtgtctcacactccggccctgcgtctctggatcagcgcgatgaagtgggaccccactgtttgcgctctcctgatggataagtccatcttccagggctttctcaacctgtacttccaaaacaacccaaatgcgttcgattttggcctctgctag

SEQ ID NO: 335163 - DNA, 1493 bp, Artificial Sequence
  derived and/or modified sequence
accacctctgctgccgcgcgcctaccggagccgcttggccctagtgctttccagcggatttcccctcaggtgcggagccgggtgccggggtcccacagccaaccactaccggttcctctttcgtcagccaccggcgccggcaggacccgcgaatcccgatctccaggagcctgtaaggaggccgcccattggctcagccgcactgctgggcaggtacttccaaagctttgaggattggctgatgctctgggcgccggggctagttggcgggtaggatcacgtgcgaggggcaggccccgtctaggccccgcctccttgctgctgctgccgccgccaatcctggtccggttgcccgagttcccggaggtctctcgcgggacctctctcaccgccaccgctcctactctcgggcttccaaatctggggcgatgtctccccaggttaaattaccctagctcctgctccagatcgcttccccgtgccccgccagagcccagtagttcaaaaattaaatttggggcaaggggtgcgcgccagagcgcagctgtttctggagcctgcggcagcggtggcgagccacagggcggcgaccgtgagctccgggagctgcgcaaaccacctggagaccatgtctggggatgcgaccaggaccctggggaaaggaagccagcccccagggccagtcccggaggggctgatccgcatctacagcatgaggttctgcccctattctcacaggacccgcctcgtcctcaaggccaaagacatcagacatgaagtggtcaacattaacctgagaaacaagcctgaatggtactatacaaagcacccttttggccacattcctgtcctggagaccagccaatgtcaactgatctatgaatctgttattgcttgtgagtacctggatgatgcttatccaggaaggaagctgtttccatatgacccttatgaacgagctcgccaaaagatgttattggagctattttgtaaggtcccacatttgaccaaggagtgcctggtagcgttgagatgtgggagagaatgcactaatctgaaggcagccctgcgtcaggaattcagcaacctggaagagattcttgagtatcagaacaccaccttctttggtggaacctgtatatccatgattgattacctcctctggccctggtttgagcggctggatgtgtatgggatactggactgtgtgagccacacgccagccctgcggctctggatatcagccatgaagtgggaccccacagtctgtgctcttctcatggataagagcattttccagggcttcttgaatctctattttcagaacaaccctaatgcctttgactttgggctgtgctgagtctcactgtccaccccttcgctgtccagaattccccagcttgttgggagtctacgtcacggcttgtcttgggaaccaatccgtctctctttcttttctttgaagttcccaataaaatgaaaacaggaaatgt

SEQ ID NO: 335164 - DNA, 896 bp, Artificial Sequence
  derived and/or modified sequence
gctccttcctcaccgggctgactagcctctcctttccctgtccccctccatcgctgctctgcaggaagccagcccccagggccagtcccggaggggctgatccgcatctacagcatgaggttctgcccctattctcacaggacccgcctcgtcctcaaggccaaagacatcagacatgaagtggtcaacattaacctgagaaacaagcctgaatggtactatacaaagcacccttttggccacattcctgtcctggagaccagccaatgtcaactgatctatgaatctgttattgcttgtgagtacctggatgatgcttatccaggaaggaagctgtttccatatgacccttatgaacgagctcgccaaaagatgttattggagctattttgtaaggtcccacatttgaccaaggagtgcctggtagcgttgagatgtgggagagaatgcactaatctgaaggcagccctgcgtcaggaattcagcaacctggaagagattcttgagtatcagaacaccaccttctttggtggaacctgtatatccatgattgattacctcctctggccctggtttgagcggctggatgtgtatgggatactggactgtgtgagccacacgccagccctgcggctctggatatcagccatgaagtgggaccccacagtctgtgctcttctcatggataagagcattttccagggcttcttgaatctctattttcagaacaaccctaatgcctttgactttgggctgtgctgagtctcactgtccaccccttcgctgtccagaattccccagcttgttgggagtctacgtcacggcttgtcttgggaaccaatccgtctctctttcttttctttgaagttcccaataaaatgaaaacaggaaatgta

SEQ ID NO: 335165 - DNA, 1495 bp, Artificial Sequence
  derived and/or modified sequence
accacctctgctgccgcgcgcctaccggagccgcttggccctagtgctttccagcggatttcccctcaggtgcggagccgggtgccggggtcccacagccaaccactaccggttcctctttcgtcagccaccggcgccggcaggacccgcgaatcccgatctccaggagcctgtaaggaggccgcccattggctcagccgcactgctgggcaggtacttccaaagctttgaggattggctgatgctctgggcgccggggctagttggcgggtaggatcacgtgcgaggggcaggccccgtctaggccccgcctccttgctgctgctgccgccgccaatcctggtccggttgcccgagttcccggaggtctctcgcgggacctctctcaccgccaccggctcctactctcgggcttccaaatctggggcgatgtctccccaggttaaattaccctagctcctgctccagatcgcttccccgtgccccgccagagcccagtagttcaaaaattaaatttggggcaaggggtgcgcgccagagcgcagctgtttctggagcctgcggcagcggtggcgagccacagggcggcgaccgtgagctccgggagctgcgcaaaccacctggagaccatgtctggggatgcgaccaggaccctggggaaaggaagccagcccccagggccagtcccggaggggctgatccgcatctacagcatgaggttctgcccctattctcacaggacccgcctcgtcctcaaggccaaagacatcagacatgaagtggtcaacattaacctgagaaacaagcctgaatggtactatacaaagcacccttttggccacattcctgtcctggagaccagccaatgtcaactgatctatgaatctgttattgcttgtgagtacctggatgatgcttatccaggaaggaagctgtttccatatgacccttatgaacgagctcgccaaaagatgttattggagctattttgtaaggtcccacatttgaccaaggagtgcctggtagcgttgagatgtgggagagaatgcactaatctgaaggcagccctgcgtcaggaattcagcaacctggaagagattcttgagtatcagaacaccaccttctttggtggaacctgtatatccatgattgattacctcctctggccctggtttgagcggctggatgtgtatgggatactggactgtgtgagccacacgccagccctgcggctctggatatcagccatgaagtgggaccccacagtctgtgctcttctcatggataagagcattttccagggcttcttgaatctctattttcagaacaaccctaatgcctttgactttgggctgtgctgagtctcactgtccaccccttcgctgtccagaattccccagcttgttgggagtctacgtcacggcttgtcttgggaaccaatccgtctctctttcttttctttgaagttcccaataaaatgaaaacaggaaatgta

SEQ ID NO: 335166 - DNA, 732 bp, Artificial Sequence
  derived and/or modified sequence
atgtctggagatgccaccaggaccctgggcaagggcagccagcccccaggccctgtgcctgagggcctcatccgcatctacagcatgaggttctgcccctacagccacaggacccggctggtgctgaaggccaaggacatcagacatgaggtggtgaacatcaacctgaggaacaagccagagtggtactacaccaagcaccccttcggccacatccctgtgctggagaccagccagtgccagctgatctatgagagcgtcatcgcctgtgagtacctggatgatgcctacccaggcaggaagctgttcccctatgacccctatgaaagagcccggcagaagatgctgctggagctgttctgcaaggtgccccacctgaccaaggaatgtctggtggccctgcgctgtggcagagaatgtaccaacctgaaggccgccctgcggcaggagttcagcaacctggaggagatcctggagtaccagaacaccaccttcttcggcggcacctgcatctccatgattgactacctgctgtggccctggtttgagcggctggatgtgtatggcatcctggactgtgtgagccacaccccagccctgcggctgtggatcagcgccatgaagtgggaccccaccgtgtgtgccctgctgatggacaagagcatcttccagggcttcctgaacctgtacttccagaacaaccccaatgcctttgattttggcctgtgctag

SEQ ID NO: 335167 - DNA, 732 bp, Artificial Sequence
  derived and/or modified sequence
atgagcggcgacgccacccggaccctgggcaagggcagccagccccccgggccagtgcccgaaggactgattcggatatactccatgcgattctgtccttatagccatcgtacacggctggtgctgaaggcaaaggatattcggcacgaggtggtcaatatcaaccttagaaataaacctgagtggtattatacaaagcacccatttggtcatatcccagtcttagaaactagtcaatgtcaactcatctacgagagcgtgattgcctgcgaatacctggatgacgcctaccccgggagaaagctctttccgtacgacccctacgagcgcgcaagacagaaaatgctgctggagttgttttgtaaggtaccacatctcacgaaggaatgtttagtggccctgaggtgtggaagagagtgtaccaacctaaaagctgccctgagacaagagtttagcaatttggaggagatactcgagtaccaaaacaccaccttttttggaggaacttgcatctctatgatcgactacttgctttggccatggttcgagagactagacgtctacggcatcctggactgcgtgtcacacacccctgcactgagactgtggatctccgctatgaagtgggatcctactgtgtgcgctctgttgatggacaaaagcatcttccagggcttcctgaatctatatttccagaataatcctaacgcctttgacttcgggctgtgttag

SEQ ID NO: 335168 - DNA, 732 bp, Artificial Sequence
  derived and/or modified sequence
atgagcggcgacgccacccggaccctgggcaagggcagccagcccccgggcccagtgcccgaaggactcattagaatttactcgatgcgcttctgcccctattcacaccgtaccaggctcgtgctgaaggctaaagacattcgtcacgaagttgtcaatatcaacctaagaaataaacctgagtggtattacactaagcatccattcggtcacatccctgtcctagagaccagtcagtgccaactgatctacgagtccgttattgcttgcgaatacctggatgatgcatatcccggtagaaaactcttcccctacgatccttacgagcgggcaagacagaagatgctacttgaacttttctgtaaagtcccacacctgacgaaggagtgtttagtggccttacgatgcggtagagagtgcaccaaccttaaggctgcgctcaggcaggagttttctaacctggaggaaatactggagtaccagaacaccacattctttggcggaacatgtatctccatgatcgattacctgctgtggccatggttcgagcgtctggacgtgtacggcatcctcgattgcgtgtcacacacgcccgctctccggctgtggatcagcgccatgaagtgggatcccacagtgtgtgcgctcctaatggataaatccatttttcagggctttttgaacttatacttccagaacaatcccaatgctttcgacttcgggctctgctag

SEQ ID NO: 335169 - DNA, 732 bp, Artificial Sequence
  derived and/or modified sequence
atgtccggcgatgccacccgcacattgggaaaggggagccaacctcccggtcccgtccctgaaggcctgatcaggatctactcaatgcgcttttgtccgtacagccatcggactcggctcgttctgaaagctaaggacatccggcacgaggtcgttaacattaatctcaggaacaaacccgagtggtattacaccaagcacccgtttggacacattcccgtcctggagacatctcagtgtcagttgatctacgaaagcgtgatcgcgtgtgagtatctcgacgatgcttacccgggtcggaagttatttccatacgatccatatgaacgcgctcgtcagaagatgctcttggagctgttctgcaaggtgccacatctcacaaaggagtgtctggtggcccttcgatgtgggagagaatgcacaaatcttaaagctgccctgcgccaggaattctccaatctggaagaaatactcgagtatcagaacactaccttcttcggcggaacatgcattagcatgatcgattatcttttgtggccctggtttgagaggctggatgtgtatggcattttggattgcgtgagccatactcctgcgttgaggctgtggatcagcgctatgaagtgggatccaaccgtgtgtgcgctgctcatggacaagtccatttttcaagggtttctcaatctgtactttcagaacaatccaaacgcgtttgacttcgggctgtgttag

SEQ ID NO: 335170 - DNA, 732 bp, Artificial Sequence
  derived and/or modified sequence
atgagtggcgatgccactcgcactctcggtaagggaagccaaccaccgggacctgttccagaagggttaattcggatctatagcatgaggttttgtccttacagccaccggaccaggctcgttcttaaagctaaggatattaggcatgaagttgtcaatatcaacctgcgaaataagcctgaatggtactacactaagcatccctttgggcatattcccgtgcttgaaacatcacagtgtcagctcatttatgagagtgttatcgcctgtgaatatctcgacgatgcttacccaggcagaaagttattcccctacgatccgtatgagcgcgcaaggcagaagatgctcctggagctgttttgcaaagttccacacttaacaaaggagtgcctggttgccctccgctgcggccgagagtgcacgaatctgaaagccgctctgagacaagaattctctaatctggaggaaatattagaataccagaatactacattctttggcggaacttgtatctctatgatcgactaccttctgtggccatggttcgagcgactggacgtgtacgggatcctggattgcgttagccacacacccgcactgcgtctgtggatctcggcaatgaagtgggacccaaccgtgtgtgcactactgatggacaagtcaatttttcagggcttcttaaacctgtatttccagaataaccccaatgcgttcgattttgggctgtgctag

SEQ ID NO: 335171 - DNA, 732 bp, Artificial Sequence
  derived and/or modified sequence
atgagcggcgacgccaccagaaccctgggcaagggcagccagccccccggccccgtgcccgagggcctgatcagaatctacagcatgagattctgcccctacagccacagaaccagactggtgctgaaggccaaggacatcagacacgaggtggtgaacatcaacctgagaaacaagcccgagtggtactacaccaagcaccccttcggccacatccccgtgctggagaccagccagtgccagctgatctacgagagcgtgatcgcctgcgagtacctggacgacgcctaccccggcagaaagctgttcccctacgacccctacgagagagccagacagaagatgctgctggagctgttctgcaaggtgccccacctgaccaaggagtgcctggtggccctgagatgcggcagagagtgcaccaacctgaaggccgccctgagacaggagttcagcaacctggaggagatcctggagtaccagaacaccaccttcttcggcggcacctgcatcagcatgatcgactacctgctgtggccctggttcgagagactggacgtgtacggcatcctggactgcgtgagccacacccccgccctgagactgtggatcagcgccatgaagtgggaccccaccgtgtgcgccctgctgatggacaagagcatcttccagggcttcctgaacctgtacttccagaacaaccccaacgccttcgacttcggcctgtgctag

SEQ ID NO: 335172 - protein, 166 aa, Artificial Sequence
  derived and/or modified sequence
MSGDATRTLGKGSQPPGPVPEGLIRIYSMRFCPYSHRTRLVLKAKDIRHEVVNINLRNKPEWYYTKHPFGHIPVLETSQCQLIYESVIACEYLDDAYPGRKLFPYDPYERARQKMLLELFCKVPHLTKECLVALRCGRECTNLKAALRQEFSNLEEDRKKRKFIPG

SEQ ID NO: 335173 - DNA, 501 bp, Artificial Sequence
  derived and/or modified sequence
atgagtggcgacgctactaggaccctgggcaagggcagtcaaccacccggcccagtgcctgagggcttgatccggatctattcgatgcgattctgcccctattcacataggacacgcttggtcctcaaagccaaggacatacgtcacgaagttgtgaacataaacctcaggaataagccagagtggtactatactaagcacccatttggacatatacccgtgctggagaccagtcaatgccagctcatttatgagagtgttattgcctgtgaatatcttgacgacgcgtaccctggaaggaagctattcccatatgacccctatgaacgcgcccgtcagaaaatgctgctggaactgttctgcaaggttccacacctaacaaaggaatgtttggtcgcgcttcgatgcgggagagaatgtaccaatctgaaggctgcactccggcaggaattctccaatctagaggaagataggaagaagagaaagttcatacccggatag

SEQ ID NO: 335174 - DNA, 972 bp, Artificial Sequence
  derived and/or modified sequence
gagctgcgcaaaccacctggagaccatgtctggggatgcgaccaggaccctggggaaaggaagccagcccccagggccagtcccggaggggctgatccgcatctacagcatgaggttctgcccctattctcacaggacccgcctcgtcctcaaggccaaagacatcagacatgaagtggtcaacattaacctgagaaacaagcctgaatggtactatacaaagcacccttttggccacattcctgtcctggagaccagccaatgtcaactgatctatgaatctgttattgcttgtgagtacctggatgatgcttatccaggaaggaagctgtttccatatgacccttatgaacgagctcgccaaaagatgttattggagctattttgtaaggtcccacatttgaccaaggagtgcctggtagcgttgagatgtgggagagaatgcactaatctgaaggcagccctgcgtcaggaattcagcaacctggaagaggataggaagaaaagaaagtttatacctggttaattcgtcactgaaaacaattttctggaagtggaaggttttcccggaagtatgtcatcccttgctcctggtcttgcaaaatttgtctgttcagttcaggggctttgcctatctggccatcagagtcttactaattttctttgttgatttgtaaaagttccttttaaagcgttccttgtatagaaaagatatttgactggttttaaaacacatttttgttttcttttgacttttaatttggcttatatatttttgcatatggaagtacagcatttgaaagtattgtgctataaggctttccttatatgtgctatgatttcctccactgttttatgtgtaggaagtcctctccccacttcagagacttgataaatattcatttatattttcatctaccaccaatcactttacagacatttgactggtcaagcattaccctcctagctttt

SEQ ID NO: 335175 - DNA, 501 bp, Artificial Sequence
  derived and/or modified sequence
atgtctggagatgccaccaggaccctgggcaagggcagccagcccccaggccctgtgcctgagggcctcatccgcatctacagcatgaggttctgcccctacagccacaggacccggctggtgctgaaggccaaggacatcagacatgaggtggtgaacatcaacctgaggaacaagccagagtggtactacaccaagcaccccttcggccacatccctgtgctggagaccagccagtgccagctgatctatgagagcgtcatcgcctgtgagtacctggatgatgcctacccaggcaggaagctgttcccctatgacccctatgaaagagcccggcagaagatgctgctggagctgttctgcaaggtgccccacctgaccaaggaatgtctggtggccctgcgctgtggcagagaatgtaccaacctgaaggccgccctgcggcaggagttcagcaacctggaggaggacaggaagaagaggaagttcatccctggatag

SEQ ID NO: 335176 - DNA, 501 bp, Artificial Sequence
  derived and/or modified sequence
atgagcggcgacgccacccggaccctgggcaagggcagccagcccccaggccccgttcctgagggattgattaggatctactccatgcgcttttgcccttatagccaccggacacggctcgtacttaaggcaaaagatatccgccacgaggtggtgaacatcaatctaagaaacaagccagaatggtactacacaaagcacccttttgggcacatcccggtcctggagactagtcaatgtcagctgatctatgaatctgtgattgcatgtgaatatttggacgacgcataccccggacggaaattattcccctacgacccttatgaaagagcacgccagaagatgctccttgaactcttttgtaaagtgccccatctgacaaaggagtgtctcgtcgccctcagatgtggcagggagtgcacaaacttaaaggccgccctgcggcaagagttcagcaaccttgaagaagataggaagaagcggaaattcattcctggctag

SEQ ID NO: 335177 - DNA, 501 bp, Artificial Sequence
  derived and/or modified sequence
atgtctggcgacgccacacgcacactcggtaaggggtcccagccgccaggccctgtcccagaggggctgatacggatttacagtatgaggttctgtccgtattctcacagaactcgtctggtgttaaaggctaaagacatcaggcacgaggtggttaacattaacctgagaaacaagcctgagtggtattataccaaacatccatttgggcatatcccagtcttagaaacctctcaatgccaactcatttacgaaagcgtgatcgcttgcgagtacctggacgatgcctaccctggcagaaagctgttcccctacgacccctacgaacgggcaagacagaagatgctcctggagctcttctgtaaagtcccacatctcaccaaagagtgcctcgttgccttgcgctgcggcagagagtgcaccaatctcaaggctgccttacgtcaggagttttctaacctcgaggaggatcggaagaaaagaaaatttattcctggctag

SEQ ID NO: 335178 - DNA, 501 bp, Artificial Sequence
  derived and/or modified sequence
atgagcggcgacgccaccagaaccctgggcaagggcagccagccccccggccccgtgcccgagggcctgatcagaatctacagcatgagattctgcccctacagccacagaaccagactggtgctgaaggccaaggacatcagacacgaggtggtgaacatcaacctgagaaacaagcccgagtggtactacaccaagcaccccttcggccacatccccgtgctggagaccagccagtgccagctgatctacgagagcgtgatcgcctgcgagtacctggacgacgcctaccccggcagaaagctgttcccctacgacccctacgagagagccagacagaagatgctgctggagctgttctgcaaggtgccccacctgaccaaggagtgcctggtggccctgagatgcggcagagagtgcaccaacctgaaggccgccctgagacaggagttcagcaacctggaggaggacagaaagaagagaaagttcatccccggctag

SEQ ID NO: 335179 - protein, 121 aa, Artificial Sequence
  derived and/or modified sequence
MRFCPYSHRTRLVLKAKDIRHEVVNINLRNKPEWYYTKHPFGHIPVLETSQCQLIYESVIACEYLDDAYPGRKLFPYDPYERARQKMLLELFCKLCEPHASPAALDISHEVGPHSLCSSHG

SEQ ID NO: 335180 - DNA, 366 bp, Artificial Sequence
  derived and/or modified sequence
atgcggttttgtccatactcccatagaacccgccttgtacttaaggccaaagatatccggcatgaggttgtgaatattaacctgcgtaacaaaccagagtggtactatactaagcatccatttggtcacatcccagttcttgaaacctctcagtgtcaactcatttatgagagcgtgatcgcctgtgagtatctagacgatgcttaccctggtaggaagctgtttccttacgatccctacgaaagagcccggcaaaagatgctgctggaactgttttgcaaattgtgcgaaccacacgcgagccctgccgctctggatattagccacgaagttgggccccacagtctctgcagctcacatggctag

SEQ ID NO: 335181 - DNA, 1123 bp, Artificial Sequence
  derived and/or modified sequence
cttcctcaccgggctgactagcctctcctttccctgtccccctccatcgctgctctgcaggaagccagcccccagggccagtcccggaggggctgatccgcatctacagcatgaggttctgcccctattctcacaggacccgcctcgtcctcaaggccaaagacatcagacatgaagtggtcaacattaacctgagaaacaagcctgaatggtactatacaaagcacccttttggccacattcctgtcctggagaccagccaatgtcaactgatctatgaatctgttattgcttgtgagtacctggatgatgcttatccaggaaggaagctgtttccatatgacccttatgaacgagctcgccaaaagatgttattggagctattttgtaagctgtgtgagccacacgccagccctgcggctctggatatcagccatgaagtgggaccccacagtctgtgctcttctcatggataagagcattttccagggcttcttgaatctctattttcagaacaaccctaatgcctttgactttgggctgtgctgagtctcactgtccaccccttcgctgtccagaattccccagcttgttgggagtctacgtcacggcttgtcttgggaaccaatccgtctctctttcttttctttgaagttcccaataaaatgaaaacaggaaatgtattcttctgataatcatttgtctgactcctctagcctgtagctgctgctactgctgcttttttttcctttttttttttgaggcaagatcttgcttcgttactcaggctggagtgcagtgggacagtcggctcactgcagccttgaactcctgggctcagttgattctcccgcctcagcctcctgagaagctaggactacaggtatgtgtcaccacgcccagctaatttttaaaaaaatgttgttgagacagggtctcactatgttgctcaggctggtctccatctcctggccgcaagccatccacccaacttggtctccaaagtgttgagattacaggcatgagccacctggcctgcctagcctgtagcttctaactattttctagaaagtgcctggtgctaatgtcagagcacattttgggagcctgtgtgcctcctaac

SEQ ID NO: 335182 - DNA, 366 bp, Artificial Sequence
  derived and/or modified sequence
atgaggttctgcccctacagccacaggacccggctggtgctgaaggccaaggacatcagacatgaggtggtgaacatcaacctgaggaacaagccagagtggtactacaccaagcaccccttcggccacatccctgtgctggagaccagccagtgccagctgatctatgagagcgtcatcgcctgtgagtacctggatgatgcctacccaggcaggaagctgttcccctatgacccctatgaaagagcccggcagaagatgctgctggagctgttctgcaagctgtgtgagccccacgccagccctgctgccctggacatcagccatgaggtgggcccccacagcctgtgcagcagccacggctag

SEQ ID NO: 335183 - DNA, 366 bp, Artificial Sequence
  derived and/or modified sequence
atgcggttctgcccctacagccaccggacccggctggtgctgaaggccaaagatatccgtcacgaggtcgttaacatcaacctgaggaataaacccgaatggtactatacgaaacaccccttcggccacatccccgtgttagaaacttcacagtgccagctgatctatgaatctgtgatagcctgtgagtatttagacgatgcttaccccgggcgaaagctgtttccttacgatccctacgagagggccagacaaaagatgttgctggagctgttctgcaagctgtgtgagccacatgcttccccagccgcactggacatttcccatgaggtcggtccccactccctgtgttcgtcccacggatag

SEQ ID NO: 335184 - DNA, 366 bp, Artificial Sequence
  derived and/or modified sequence
atgcgcttttgcccctactctcatcgtactcgtctcgtgttgaaggctaaggacatcaggcacgaggttgttaacatcaacctaaggaacaaaccggaatggtattacacgaaacaccccttcggtcacatccctgtgctagaaacgtcgcagtgccagttgatctacgaatctgttatcgcctgtgaatacctggatgatgcataccccggaagaaaactgttcccatatgacccttatgaacgggctcgccagaaaatgctgctcgagctcttctgcaaactatgtgagcctcacgcgtctccagctgccctagacattagtcatgaggtgggtcctcactctctctgtagcagccatggctag

SEQ ID NO: 335185 - DNA, 366 bp, Artificial Sequence
  derived and/or modified sequence
atgagattctgcccctacagccacagaaccagactggtgctgaaggccaaggacatcagacacgaggtggtgaacatcaacctgagaaacaagcccgagtggtactacaccaagcaccccttcggccacatccccgtgctggagaccagccagtgccagctgatctacgagagcgtgatcgcctgcgagtacctggacgacgcctaccccggcagaaagctgttcccctacgacccctacgagagagccagacagaagatgctgctggagctgttctgcaagctgtgcgagccccacgccagccccgccgccctggacatcagccacgaggtgggcccccacagcctgtgcagcagccacggctag

SEQ ID NO: 335186 - protein, 293 aa, Artificial Sequence
  derived and/or modified sequence
MLEKFCNSTFWNSSFLDSPEADLPLCFEQTVLVWIPLGYLWLLAPWQLLHVYKSRTKRSSTTKLYLAKQVFVGFLLILAAIELALVLTEDSGQATVPAVRYTNPSLYLGTWLLVLLIQYSRQWCVQKNSWFLSLFWILSILCGTFQFQTLIRTLLQGDNSNLAYSCLFFISYGFQILILIFSAFSENNESSNNPSSIASFLSSITYSWYDSIILKGYKRPLTLEDVWEVDEEMKTKTLVSKFETHMKRELQKARRALQRRQEKSSQQNSGARLPGLNKNQSQSQDALVLVTFP

SEQ ID NO: 335187 - protein, 204 aa, Artificial Sequence
  derived and/or modified sequence
MHSFNFVLSANLHGGAVVANYPYDKSFEHRVRGVRRTASTPTPDDKLFQKLAKVYSYAHGWMFQGWNCGDYFPDGITNGASWYSLSKGMQDFNYLHTNCFEITLELSCDKFPPEEELQREWLGNREALIQFLEQVHQGIKGMVLDENYNNLANAVISVSGINHDVTSGDHGDYFRLLLPGIYTVSATAPGYDPETVTVTVGPAE

SEQ ID NO: 335188 - DNA, 669 bp, Artificial Sequence
  derived and/or modified sequence
cgccaacctctcgcctcctcccaggtggaacccgagacccgggcggtgatccggtggatgcactccttcaactttgttctttcagccaatctccacggaggggcggtggtggccaattacccgtatgacaagtcctttgagcaccgggtccgaggggtccgccgcaccgccagcacccccacgcctgacgacaagctcttccagaagctggccaaggtctactcctatgcacatggatggatgttccaaggttggaactgcggagattacttcccagatggcatcaccaatggggcttcctggtattctctcagcaagggaatgcaagactttaattatctccataccaactgctttgagatcacgctggaactgagttgcgacaagtttccccccgaagaggagttacagcgggagtggctgggtaatcgggaagccctaatccagttcctggaacaggttcaccagggcatcaagggaatggtgcttgatgagaattacaataatctcgccaatgctgtcatttctgtcagtgggattaaccatgatgtcacttcaggtgaccatggtgattacttccggctgctgcttccaggtatctacactgttagtgccacagcacctgggtatgacccagagacagtaactgtgaccgtgggtcctgcggaa

SEQ ID NO: 335189 - DNA, 303 bp, Artificial Sequence
  derived and/or modified sequence
atgcggcccaagcacctgcagggcatcgcccccgaggtgttccggactcccaccggatctcacggacaaatgcctggccaacctctccaaagagggcacgctttggatattaggcctccactccgccctcatcctctgatctcagggcacgcccttagaggtgacagatggcaaacaccagccctcgctctagggccagcgctatgcggctttgtgcctgctcactgggtgctgactgtgcctccgccacaaagacccagtattccgtcaaggagtgctgatacctgtcccgcttcccgttag

SEQ ID NO: 335190 - DNA, 1281 bp, Artificial Sequence
  derived and/or modified sequence
atggaggagtaccacacctggcagaacttcggcaacagccacagattcagcttctgccagtaccccttcgtgatcagcgtggccgccaagaagatcatcatccagagagacagcgagcagcagatgatcaacatcgccagacagagcctggtggacaaggtgagcagaagacagagacccgacatgaacatcctgttcctgaacatgaaggtgagaagaacccacctggtgagcgacagcctggacgagctgaccagaaagagagccgacctgaagaagaagctgaaggtgaccttcgtgggcgaggccggcctggacatgggcggcctgaccaaggagtggttcctgctgctgatcagacagatcttccaccccgactacggcatgttcacctaccacaaggacagccactgccactggttcagcagcttcaagtgcgacaactacagcgagttcagactggtgggcatcctgatgggcctggccgtgtacaacagcatcaccctggacatcagattccccccctgctgctacaagaagctgctgagcccccccatcatccccagcgaccagaacatccccgtgggcatctgcaacgtgaccgtggacgacctgtgccagatcatgcccgagctggcccacggcctgagcgagctgctgagccacgagggcaacgtggaggaggacttctacagcaccttccaggtgttccaggaggagttcggcatcatcaagagctacaacctgaagcccggcggcgacaagatcagcgtgaccaaccagaacagaaaggagtacgtgcagctgtacaccgacttcctgctgaacaagagcatctacaagcagttcgccgccttctactacggcttccacagcgtgtgcgccagcaacgccctgatgctgctgagacccgaggaggtggagatcctggtgtgcggcagccccgacctggacatgcacgccctgcagagaagcacccagtacgacggctacgccaagaccgacctgaccatcaagtacttctgggacgtggtgctgggcttccccctggacctgcagaagaagctgctgcacttcaccaccggcagcgacagagtgcccgtgggcggcatggccgacctgaacttcaagatcagcaagaacgagaccagcaccaactgcctgcccgtggcccacacctgcttcaaccagctgtgcctgcccccctacaagagcaagaaggacctgaagcagaagctgatcatcggcatcagcaacagcgagggcttcggcctggagtag

SEQ ID NO: 335191 - DNA, 1098 bp, Artificial Sequence
  derived and/or modified sequence
atgaacatcctgttcctgaacatgaaggtgagaagaacccacctggtgagcgacagcctggacgagctgaccagaaagagagccgacctgaagaagaagctgaaggtgaccttcgtgggcgaggccggcctggacatgggcggcctgaccaaggagtggttcctgctgctgatcagacagatcttccaccccgactacggcatgttcacctaccacaaggacagccactgccactggttcagcagcttcaagtgcgacaactacagcgagttcagactggtgggcatcctgatgggcctggccgtgtacaacagcatcaccctggacatcagattccccccctgctgctacaagaagctgctgagcccccccatcatccccagcgaccagaacatccccgtgggcatctgcaacgtgaccgtggacgacctgtgccagatcatgcccgagctggcccacggcctgagcgagctgctgagccacgagggcaacgtggaggaggacttctacagcaccttccaggtgttccaggaggagttcggcatcatcaagagctacaacctgaagcccggcggcgacaagatcagcgtgaccaaccagaacagaaaggagtacgtgcagctgtacaccgacttcctgctgaacaagagcatctacaagcagttcgccgccttctactacggcttccacagcgtgtgcgccagcaacgccctgatgctgctgagacccgaggaggtggagatcctggtgtgcggcagccccgacctggacatgcacgccctgcagagaagcacccagtacgacggctacgccaagaccgacctgaccatcaagtacttctgggacgtggtgctgggcttccccctggacctgcagaagaagctgctgcacttcaccaccggcagcgacagagtgcccgtgggcggcatggccgacctgaacttcaagatcagcaagaacgagaccagcaccaactgcctgcccgtggcccacacctgcttcaaccagctgtgcctgcccccctacaagagcaagaaggacctgaagcagaagctgatcatcggcatcagcaacagcgagggcttcggcctggagtag

SEQ ID NO: 335192 - DNA, 1281 bp, Artificial Sequence
  derived and/or modified sequence
atggaggagtaccatacatggcagaattttgggaatagtcaccgatttagtttctgccagtacccattcgtgatcagtgtggccgctaaaaagatcattatccagcgcgatagcgagcagcagatgatcaacatagcaaggcagtcactggtcgataaggtgtccaggagacagaggcccgatatgaacatattatttcttaatatgaaagtgaggcgtacccacctcgtctcagactcattagacgagctgactcggaagagggctgatctgaaaaagaagctgaaggttacattcgttggggaagccggtctggacatgggcggtcttaccaaggagtggttcttgcttctcatacgccagatattccatcctgactatggtatgttcacttaccacaaggattcacattgccactggttctcatcgtttaagtgcgacaactatagcgagtttagattggttggaattcttatgggactggccgtttacaacagtatcactctggacatcagatttccaccttgctgttacaaaaagctgctctcacccccaattatccctagcgaccagaatatacccgttggaatctgcaacgttaccgtggatgatctttgtcagattatgcccgagctcgcccatggcttgagcgagttgctgagtcatgagggcaatgtagaagaggatttctattctacatttcaggtatttcaggaagaattcggaataattaagagctataatctaaagccaggtggcgataaaatctcagtgacaaatcaaaaccgtaaggagtacgttcagctctacactgatttccttttgaataagagcatctataagcagtttgcagccttctactatgggtttcacagtgtctgcgccagcaacgccctcatgctcctgcggccagaagaggtggaaatcctggtctgcggtagcccggatctggatatgcacgcattgcagcggagcacacagtatgatggctatgccaagacggacttgaccatcaagtacttctgggatgtcgtgctgggatttcctctcgacttgcaaaagaaactgctgcacttcaccactggttctgatcgagtccctgtcggaggtatggccgatctaaatttcaaaatcagcaaaaacgaaaccagcaccaactgcctgcctgtcgcccacacctgttttaatcagctttgtcttccaccatataagtctaagaaagacctcaaacaaaaacttattattggtatatcaaattccgagggttttggcctggagtag

SEQ ID NO: 335193 - DNA, 1098 bp, Artificial Sequence
  derived and/or modified sequence
atgaatattttgttcttaaatatgaaagtcaggcgcacacacctggtatctgattctctcgatgagcttacgagaaagcgcgctgacctgaaaaaaaaactgaaggtcactttcgttggagaggcaggcctagatatggggggcctgaccaaggaatggtttctgttactgatccgccagatctttcaccccgattatggaatgttcacgtaccacaaggattctcattgtcattggtttagctccttcaagtgcgacaactatagtgagtttcgtttggtgggcattttaatgggcttagccgtgtataactcaatcacgctggacatcaggtttccgccttgttgctataagaagctgttatcccccccaatcattccatcggaccagaatattccggttggcatatgtaacgtgacagtggacgacctatgccaaattatgccagagctggcccacggcctgagcgaactcctctcacatgaaggcaacgttgaagaggacttttattcaacttttcaggtttttcaggaggagttcggaattattaaatcatataatctgaaaccagggggtgacaaaatcagcgtgaccaaccagaataggaaagaatacgtgcagctctacacagacttcctgctcaataagagtatctacaagcagtttgcagcattttactacggctttcacagtgtatgtgcaagtaatgctctcatgttgctgaggcctgaggaagtcgagattcttgtgtgtggtagcccggatcttgatatgcatgccctgcagcggtcaactcagtatgacggctatgcaaaaacagacctaaccatcaagtacttctgggatgtggtgctgggctttcctctagatctgcaaaaaaagttgctgcactttaccactggcagcgaccgagtgccagtgggcggcatggctgatcttaatttcaagatcagtaagaacgaaacctcaaccaattgtctcccggtggcccacacttgcttcaaccagctctgtctgccgccttacaagagcaagaaggatcttaagcaaaaactgatcattggcatctcaaacagcgaaggattcggcctcgagtag

SEQ ID NO: 335194 - DNA, 1281 bp, Artificial Sequence
  derived and/or modified sequence
atggaggagtaccacacctggcagaactttggaaacagccaccgcttctccttctgccagtacccctttgtgatctctgtggccgccaagaagatcatcatccagagggacagcgagcagcagatgatcaacatcgcccggcagagcctggtggacaaggtgtcccggcggcagaggccagacatgaacatcctcttcctgaacatgaaggtgcggaggacccacctggtgtctgacagcctggatgagctgaccaggaagagagctgacctgaagaagaagctgaaggtgacctttgtgggggaggccggcctggacatgggcggcctgaccaaggagtggttcctgctgctgatccggcagatcttccacccagactatggcatgttcacctaccacaaggacagccactgccactggttcagcagcttcaagtgtgacaactacagcgagttccggctggtgggcatcctgatgggcctggccgtgtacaacagcatcaccctggacatccgcttccccccctgctgctacaagaagctgctgagcccccccatcatccccagcgaccagaacatccctgtgggcatctgcaatgtgacagtggatgacctgtgccagatcatgcctgagctggcccacggcctgtctgagctgctgagccatgagggcaatgtggaggaggacttctacagcaccttccaggtgttccaggaggagtttggcatcatcaagagctacaacctgaagccaggaggagacaagatctctgtgaccaaccagaacaggaaggagtatgtgcagctgtacacagacttcctgctgaacaagagcatctacaagcagtttgctgccttctactacggcttccacagcgtgtgtgccagcaatgccctgatgctgctgcggcctgaggaggtggagatcctggtgtgtggcagcccagacctggacatgcacgccctgcagaggagcacccagtatgatggctacgccaagacagacctgaccatcaagtacttctgggatgtggtgctgggcttccccctggacctgcagaagaagctgctgcacttcaccactggaagtgacagagtgcctgtgggcggcatggctgacctgaacttcaagatcagcaagaatgagaccagcaccaactgcctgcctgtggcccacacctgcttcaaccagctgtgcctgcccccctacaagagcaagaaggacctgaagcagaagctgatcatcggcatcagcaacagcgagggcttcggcctggagtag

SEQ ID NO: 335195 - DNA, 1098 bp, Artificial Sequence
  derived and/or modified sequence
atgaacatcctcttcctgaacatgaaggtgcggaggacccacctggtgtctgacagcctggatgagctgaccaggaagagagctgacctgaagaagaagctgaaggtgacctttgtgggggaggccggcctggacatgggcggcctgaccaaggagtggttcctgctgctgatccggcagatcttccacccagactatggcatgttcacctaccacaaggacagccactgccactggttcagcagcttcaagtgtgacaactacagcgagttccggctggtgggcatcctgatgggcctggccgtgtacaacagcatcaccctggacatccgcttccccccctgctgctacaagaagctgctgagcccccccatcatccccagcgaccagaacatccctgtgggcatctgcaatgtgacagtggatgacctgtgccagatcatgcctgagctggcccacggcctgtctgagctgctgagccatgagggcaatgtggaggaggacttctacagcaccttccaggtgttccaggaggagtttggcatcatcaagagctacaacctgaagccaggaggagacaagatctctgtgaccaaccagaacaggaaggagtatgtgcagctgtacacagacttcctgctgaacaagagcatctacaagcagtttgctgccttctactacggcttccacagcgtgtgtgccagcaatgccctgatgctgctgcggcctgaggaggtggagatcctggtgtgtggcagcccagacctggacatgcacgccctgcagaggagcacccagtatgatggctacgccaagacagacctgaccatcaagtacttctgggatgtggtgctgggcttccccctggacctgcagaagaagctgctgcacttcaccaccggcagtgacagagtgcctgtgggcggcatggctgacctgaacttcaagatcagcaagaatgagaccagcaccaactgcctgcctgtggcccacacctgcttcaaccagctgtgcctgcccccctacaagagcaagaaggacctgaagcagaagctgatcatcggcatcagcaacagcgagggcttcggcctggagtag

SEQ ID NO: 335196 - DNA, 1281 bp, Artificial Sequence
  derived and/or modified sequence
atggaggagtaccacacctggcagaacttcggcaacagccaccggtttagcttttgccagtacccatttgtcataagcgttgccgcaaagaagataataatccagcgcgatagcgaacagcagatgataaatattgcacggcagtctctggtggacaaagtgtctcgacggcagagacctgacatgaacatcctgtttttgaacatgaaagtgagacgtacgcacttagtaagtgactctctggacgagttgactcggaagcgcgccgacctgaaaaaaaaactgaaggttactttcgtcggcgaggctgggctcgacatgggtgggctgactaaggagtggttccttttgctgatcagacagatatttcatcctgattacgggatgttcacctaccataaggactcacactgccactggttctctagtttcaagtgtgataattactcagaatttagacttgtgggaatcctcatgggcctggcagtgtataactctattacgctggatattcggtttcccccgtgctgctataaaaagcttctgagcccccccattatacctagcgaccagaatatccctgtcggaatctgcaacgtaacggtcgacgacctctgtcagattatgcccgaactggctcatggcctttccgaattgctcagccacgagggaaacgtcgaagaagacttctatagtacgtttcaggtctttcaggaggagtttggaataattaagtcatacaatttaaagcctggtggcgacaagatttcagtgacaaaccagaatcgcaaggaatatgtgcaactgtacaccgacttcctgctcaacaagtcgatctacaagcagttcgctgctttttattacggtttccattccgtatgtgcgtccaatgcactaatgctgctcaggccagaggaggtcgaaatcctggtttgtggatctccagacttagatatgcatgccctgcaaagaagtacccagtacgatgggtacgctaaaacagatctgactattaagtacttctgggacgtggtactgggattcccgttagacttacaaaaaaaactgctgcactttaccaccggaagcgaccgcgtgccggtgggaggaatggctgacctcaacttcaagatcagtaaaaatgaaacatcaactaattgtctcccggtagcgcatacttgtttcaaccaactgtgtctgcccccttataaatccaagaaggacctgaaacagaagctcattataggcatctccaactccgagggctttgggctcgagtag

SEQ ID NO: 335197 - DNA, 1098 bp, Artificial Sequence
  derived and/or modified sequence
atgaacatcctgttcctgaacatgaaggtgcggcggacccacctggtgtccgattctctggatgaactgactaggaagcgcgccgatctcaaaaaaaagctgaaagttacctttgtgggcgaggctgggctggatatgggaggcctgacaaaggaatggttcctcctgctgatcaggcaaattttccaccctgattacggcatgtttacctaccataaggactcacattgtcattggttctcatcgttcaaatgtgataattattccgaattccggctcgtcggaattctcatgggcctagccgtgtacaactccattacgcttgacatacggttccccccttgttgttataaaaaattactctcccctcctattatcccatcagatcaaaatatacccgtgggcatttgcaatgtgaccgtcgatgacttgtgccagattatgccagaactggctcatggcttgagtgaactcctcagccatgagggcaacgtggaagaggatttttattctacgttccaggtcttccaggaggagtttggaatcatcaagtcatacaatctgaagcccggcggagataagatttccgtgacgaatcagaaccggaaagagtatgtacagttatatactgacttcctgctgaataagtcaatatacaagcagtttgcggcattctattacggattccatagtgtctgcgcctctaatgctctgatgctactgaggcctgaagaagtcgagatccttgtttgcggctcacctgatctcgatatgcatgctctgcaacggagtacgcagtacgacgggtacgctaagacggacctgacaattaagtatttctgggatgtggtgttaggctttcctttagaccttcagaagaaactcttacattttaccaccgggtcggacagagtgccagttggcggaatggccgatcttaatttcaagataagcaaaaacgagacctccacaaactgcttacccgtggcacacacgtgttttaaccaactgtgtctccccccgtacaaatctaaaaaggatcttaaacagaagctcataatagggatttcgaatagtgaaggctttggcctggaatag

SEQ ID NO: 335198 - DNA, 1281 bp, Artificial Sequence
  derived and/or modified sequence
atggaggaatatcatacctggcaaaattttggcaatagccacaggtttagcttttgccagtacccattcgtaatatccgtggccgcaaaaaagatcataattcaacgcgactccgagcagcagatgatcaatatcgccaggcagtcgttagtagataaggtgtcaagaaggcagagaccagacatgaacatcttgtttctcaacatgaaggttcgcagaacccacctcgttagcgattctctggacgagttgactcgcaagcgcgctgacttgaaaaagaagctgaaagttacctttgtgggcgaagctgggctggatatgggagggctgacaaaagaatggtttctactactaattcgccagattttccacccagattacgggatgttcacgtatcacaaggacagccactgtcactggttttcctccttcaagtgtgataattatagcgagtttagactagttggcattttgatgggactcgccgtttacaattcgatcaccctcgacattcgatttccgccatgctgttataagaagctcctttccccccctatcattccatccgatcagaacataccagttgggatttgtaatgtgacggttgacgacctttgccagatcatgcctgaactcgcccacgggttgtctgagctgctcagtcacgaaggtaacgtggaggaagatttctactccacttttcaggttttccaggaggaattcgggataatcaagtcttacaacttaaaacccggaggcgacaaaatcagtgtgactaaccaaaatcgcaaggagtacgtccaactgtatacagacttcctgttgaataaatcaatctacaagcagttcgcggcattctattatggctttcattcagtgtgcgcctctaatgctctcatgctgctgaggccagaggaagttgagattttggtgtgtggtagccccgatcttgatatgcacgcactgcagcggtcaacccagtatgacgggtacgcaaagacagacttgaccatcaaatacttctgggacgttgtactgggtttcccactcgacctgcagaaaaagttattgcacttcactacaggttccgatcgcgtccccgtgggcggtatggctgatctcaattttaaaatatctaaaaatgagacaagtaccaattgtctcccagttgcgcatacttgtttcaatcagctgtgcctccctccctacaagtcaaagaaagatttaaaacaaaagctcattataggcataagtaatagcgaagggttcggtttggaatag

SEQ ID NO: 335199 - DNA, 1098 bp, Artificial Sequence
  derived and/or modified sequence
atgaatattctgttcctcaatatgaaagtccgacgtacacatctggtgtctgatagtctagacgagctcaccaggaagagggccgacctcaagaagaagttgaaggtgacgttcgttggggaggctggtttggacatgggagggctcacaaaggaatggttcctactgctgatacggcaaatctttcatccggactacggcatgttcacataccacaaggactcccactgccattggttctctagctttaaatgcgacaattattccgagtttcgcctagtcggtatactaatggggctagccgtttacaactccattactctagacatcagatttcctccctgctgctacaagaagctgctgtctccacctatcattccaagcgatcagaatatccctgtcggcatctgcaatgtgacggtagatgacctctgccagattatgcctgagctggctcacggcctgagcgagctgctttcacacgagggaaacgtcgaggaggacttctatagcacattccaggtgtttcaggaagaattcggtatcatcaagagctataatctgaagcctggaggagataagattagcgttaccaaccagaatagaaaggagtatgtacaactgtatacagactttttacttaacaagagcatctacaagcagttcgcagcattctattatggatttcacagtgtgtgtgcaagtaatgccttgatgcttcttcgtccggaggaagtggagattctcgtatgcggcagtccggatctggatatgcatgccctgcagagaagcacacaatatgatggttacgccaaaacagatctgaccattaaatatttctgggacgttgttcttggattccccctggacttgcaaaagaaactcctccattttaccaccggatccgatagggtacctgtgggaggaatggcagacctaaacttcaagattagtaagaacgaaaccagcaccaactgtctacctgtagctcatacctgcttcaatcagctttgtcttccaccatacaagagcaaaaaggatttgaaacaaaaacttataatcggaatctcaaacagcgaggggtttggcctggagtag

SEQ ID NO: 335200 - protein, 154 aa, Artificial Sequence
  derived and/or modified sequence
MEPSKTFMRNLPITPGYSGFVPFLSCQGMSKEDDMNHCVKTFQEKTQRYKEQLRELCCAVATAPKLKPVNSEETVLQALHQYNLQYHPLILECKYVKKPLQEPPIPGWAGYLPRAKVTEFGCGTRYTVMAKNCYKDFLEITERAKKAHLKPYEE

SEQ ID NO: 335201 - protein, 230 aa, Artificial Sequence
  derived and/or modified sequence
MEPSKTFMRNLPITPGYSGFVPFLSCQGMSKEDDMNHCVKTFQEKTQRYKEQLRELCCAVATAPKLKPVNSEETVLQALHQYNLQYHPLILECKYVKKPLQEPPIPGWAGYLPRAKVTEFGCGTRYTVMAKNCYKDFLEITERAKKAHLKPYEEIYGVSSTKTSAPSPKVLQHEELLPKYPDFSIPDGSCPALGRPLREDPKTPLTCGCAQRPSIPCSGKMYLEPLSSAK

SEQ ID NO: 335202 - DNA, 994 bp, Artificial Sequence
  derived and/or modified sequence
gggcagaggccaagtgggcaccggatagcgccagccccgcccagagagcgaaatcatggagccttccaagaccttcatgagaaacctgccaatcacaccaggctatagcggctttgtgccattcctcagctgccaaggaatgtccaaggaggatgacatgaaccactgtgtgaaaaccttccaggagaaaacacagcgctataaagaacagctgcgggaattgtgctgcgcagtggccactgccccgaaactgaaacctgtcaactccgaggagacggtcctgcaggccctgcaccagtacaatctgcagtaccaccccctgatcctggaatgcaaatatgtaaagaaacctctccaggagcccccgatccctggctgggcaggctacctgccgagagccaaggtcactgaatttggctgtggcacgagatacactgtcatggccaaaaactgctacaaggacttcctggagatcacggagagggccaagaaggcacatctgaaaccatatgaagagtgaggagaaatgtctctttccttcctactaccgttttaaaaaggggatgaaatgtttgcagtggcctttctgcttagctgggccagctccctgcaactcacacggacggttcctctcctagatggaagctgccctgcccttggaaggcccctgagagaggaccccaaaactccgctgacatgtggctgtgctcagaggccaagtataccatgcagtgggaagatgtatctagagccactgtcctccgcaaagtatgcagaaggctagaagcgcagagtctcccaaggaggtgaactttaagtggggcttccaaaacctgccattctcatgttggaatcacgcccagtgagcaataaagaaatttagtaacaagaattttttaactgccgcctgcatcctgagtggttgacggttgcatgtcattaatgataaagaccgttttttgtcatgtgggaataaagaggctgcttctccgca

SEQ ID NO: 335203 - DNA, 745 bp, Artificial Sequence
  derived and/or modified sequence
gggcagaggccaagtgggcaccggatagcgccagccccgcccagagagcgaaatcatggagccttccaagaccttcatgagaaacctgccaatcacaccaggctatagcggctttgtgccattcctcagctgccaaggaatgtccaaggaggatgacatgaaccactgtgtgaaaaccttccaggagaaaacacagcgctataaagaacagctgcgggaattgtgctgcgcagtggccactgccccgaaactgaaacctgtcaactccgaggagacggtcctgcaggccctgcaccagtacaatctgcagtaccaccccctgatcctggaatgcaaatatgtaaagaaacctctccaggagcccccgatccctggctgggcaggctacctgccgagagccaaggtcactgaatttggctgtggcacgagatacactgtcatggccaaaaactgctacaaggacttcctggagatcacggagagggccaagaaggcacatctgaaaccatatgaagaaatatatggagttagctccacaaaaacttctgctccgtctccaaaagttttgcagcatgaagagctgctgccaaaatatcccgatttttctattccagatggaagctgccctgcccttggaaggcccctgagagaggaccccaaaactccgctgacatgtggctgtgctcagaggccaagtataccatgcagtgggaagatgtatctagagccactgtcctccgcaaag

SEQ ID NO: 335204 - DNA, 693 bp, Artificial Sequence
  derived and/or modified sequence
atggagcccagcaagaccttcatgagaaacctgcccatcacccccggctacagcggcttcgtgcccttcctgagctgccagggcatgagcaaggaggacgacatgaaccactgcgtgaagaccttccaggagaagacccagagatacaaggagcagctgagagagctgtgctgcgccgtggccaccgcccccaagctgaagcccgtgaacagcgaggagaccgtgctgcaggccctgcaccagtacaacctgcagtaccaccccctgatcctggagtgcaagtacgtgaagaagcccctgcaggagccccccatccccggctgggccggctacctgcccagagccaaggtgaccgagttcggctgcggcaccagatacaccgtgatggccaagaactgctacaaggacttcctggagatcaccgagagagccaagaaggcccacctgaagccctacgaggagatctacggcgtgagcagcaccaagaccagcgcccccagccccaaggtgctgcagcacgaggagctgctgcccaagtaccccgacttcagcatccccgacggcagctgccccgccctgggcagacccctgagagaggaccccaagacccccctgacctgcggctgcgcccagagacccagcatcccctgcagcggcaagatgtacctggagcccctgagcagcgccaagtag

SEQ ID NO: 335205 - DNA, 693 bp, Artificial Sequence
  derived and/or modified sequence
atggagccttccaaaacattcatgagaaatctgcctataacaccaggttactcaggtttcgtcccgttcctctcatgtcaaggcatgtccaaggaggacgatatgaaccattgtgtgaaaacgttccaagagaagacccagcgctacaaggagcaactccgggagctctgctgtgcggtggccactgcacccaagctgaagccagtaaactcggaggagactgtactccaagcacttcaccagtacaatctgcagtatcacccgttgattctagaatgtaagtatgttaagaagcccttgcaggaaccacccattcccggatgggctggctatctgccaagagccaaggtgacagaattcggttgtggcactcgctacactgtcatggcaaaaaattgctacaaagattttctggaaatcaccgaaagggccaaaaaggcgcacttaaagccttacgaagagatctatggtgtgagcagcactaagacgagtgccccgtcccctaaagtgctccagcatgaggaactgttgccaaaatacccggactttagcatccccgatggcagttgtcccgccctgggtcgacccctccgggaggaccccaagacccccctcacctgcggttgtgcgcaacggccctctattccttgtagcggaaagatgtatcttgagcccctgagcagtgcaaagtag

SEQ ID NO: 335206 - DNA, 693 bp, Artificial Sequence
  derived and/or modified sequence
atggagcccagcaagaccttcatgaggaacctgcccatcaccccaggctacagcggctttgtgcccttcctgagctgccagggcatgagcaaggaggatgacatgaaccactgtgtgaagaccttccaggagaagacccagcgctacaaggagcagctgcgggagctgtgctgtgctgtggccacagcccccaagctgaagcctgtgaacagcgaggagaccgtgctgcaggccctgcaccagtacaacctgcagtaccaccccctcatcctggagtgcaagtatgtgaagaagcccctgcaggagccccccatccctggctgggccggctacctgccccgggccaaggtgacagaatttggctgcggcacccgctacacagtgatggccaagaactgctacaaggacttcctggagatcacagagcgggccaagaaggcccacctgaagccctatgaggagatctacggcgtgagcagcaccaagaccagcgcccccagccccaaggtgctgcagcacgaggagctgctgcccaagtacccagacttcagcatcccagatggcagctgcccagccctgggccggcccctgcgggaggaccccaagacccccctgacctgtggctgtgcccagaggcccagcatcccctgcagcggcaagatgtacctggagcccctgagcagcgccaagtag

SEQ ID NO: 335207 - DNA, 693 bp, Artificial Sequence
  derived and/or modified sequence
atggagcccagcaagaccttcatgcggaacctgcccatcacccccgggtacagcgggtttgttcccttcttatcttgccagggaatgagcaaagaagacgatatgaatcactgtgtcaaaacatttcaggagaaaactcaaagatacaaggagcagctgagggagctgtgctgcgccgtggccacagctcccaaactgaagccagtcaacagcgaggagactgtgctgcaagcgctccaccagtacaaccttcagtatcatccactcatcctcgaatgtaaatacgtgaagaagccactccaagaaccacccatacccggctgggccggctatcttcctagagccaaggtaacggaatttggttgcggcactcgttatactgtcatggcaaagaattgttacaaggatttcctcgagatcactgaaagagccaagaaggcacacctgaagccatacgaggagatctacggtgtgagctctacgaagaccagtgccccatctccaaaagtgcttcagcatgaggagctgctgcccaagtaccccgacttttccatacctgacggtagttgtccagcgctcggacgtccacttagggaggaccctaagacaccccttacctgcggttgtgctcagagaccctcgattccctgttctggcaagatgtatctggagccacttagcagtgccaagtag

SEQ ID NO: 335208 - DNA, 693 bp, Artificial Sequence
  derived and/or modified sequence
atggaaccgtccaaaacctttatgcggaaccttccaatcactcctggttattctgggttcgtccctttcctgtcttgtcaggggatgagcaaggaggacgatatgaatcactgtgtaaagacgttccaagaaaagactcagcgctacaaagagcagctgcgggagctctgctgcgccgtagcaactgcccctaagctgaagccagttaactccgaggagacagtcctgcaggcccttcaccagtataatctccagtatcatcccctgatattagaatgtaaatatgtgaagaaacctctgcaggagccccctattccgggatgggctggatatttgccgcgagctaaggtgacggaatttggttgtggaacgaggtacactgtcatggctaagaattgttacaaggacttccttgagattaccgagcgtgccaagaaagcacatctgaaaccctacgaagagatatatggcgtctcaagcaccaagacatcggccccttctcccaaggtgctgcaacatgaggagctgctgcccaagtaccccgatttttctattcctgacggtagctgcccagcactgggccgacccttgcgcgaggaccctaagactccgctaacctgcggatgcgcccagcgaccatcaatcccttgtagcgggaagatgtatctcgagcccttaagttccgccaagtag

SEQ ID NO: 335209 - protein, 303 aa, Artificial Sequence
  derived and/or modified sequence
MEESMEEEEGGSYEAMMDDQNHNNWEAAVDGFRQPLPPPPPPSSIPAPAREPPGGQLLAVPAVSVDRKGPKEGLPMGPQPPPEANGVIMMLKSCDAAAAVAKAAPAPTASSTININTSTSKFLMNVITIEDYKSTYWPKLDGAIDQLLTQSPGDYIPISYEQIYSCVYKCVCQQHSEQMYSDLIKKITNHLERVSKELQASPPDLYIERFNIALGQYMGALQSIVPLFIYMNKFYIETKLNRDLKDDLIKLFTEHVAEKHIYSLMPLLLEAQSTPFQVTPSTMANIVKGLYTLRPVSQNFTAV

SEQ ID NO: 335210 - DNA, 1396 bp, Artificial Sequence
  derived and/or modified sequence
gaggccgggcagggggcggggccggcgaatgcccgtcccgacccgtcgcgcctcccctgttagctccctgccagccgaggcggggcgaacctctgccctgttgcgtgggagtgactcacagctcccgccccttttggctccgctttctcgcggccagtccctcgcaccacgtgccctcctggccgcgcccccagctgccctttccaactgcctgttggaagccgctgtaaaacgtcgtgaggagcgccgctgctttacggctgcctctcccagactagagccccggagcgcccaccgccgtcagccgcgtcttcaagctagtcggccccgcggagagcgagagaccctgcgcaccgcagccctctccgctgcgcccattcctgccgccggcgatgtaactcggggaggcagcggtgcccgctggcccggggttgagacaggcggcaggtgcctgtgaggcgggcgggtgccgggggccagcaggatggaggaaagcatggaagaggaggaggggggcagctacgaggcgatgatggacgaccagaaccacaacaactgggaggctgcggtggacggcttccggcagcccctgccacctccgccgcccccctcgtcgatcccggcccctgcccgagagcctccgggggggcagctgctggcggtgcccgcggtctccgtggacaggaaaggccccaaggaggggctcccgatggggccgcagccaccgccggaggctaatggggtgatcatgatgttgaagagctgcgacgcggccgccgccgtggccaaggcggcccccgcccccaccgccagctccaccatcaacatcaacacctccacctccaagttcttaatgaatgttataactattgaagattataagagcacatactggccaaaattggatggtgccatagatcaacttttaactcagagtcctggtgactatatccccatatcctatgaacagatatacagttgtgtgtataaatgtgtatgccagcagcactcggaacagatgtatagtgatctgattaaaaagataactaatcacttagagagagtctcaaaggagctgcaggccagccctccagatctctatattgaaagatttaatatagctcttggacaatatatgggagcattgcagagcattgtgcctcttttcatatatatgaataagttttacatcgaaaccaagcttaacagagacttaaaagatgaccttataaagctgtttacggaacatgttgcagaaaagcacatttacagcctaatgcctttacttttagaagcccagtcaacaccatttcaggtcacaccttcaactatggcaaatattgtgaaaggcctgtataccctcagaccagtttctcagaattttacagcagtgtga

SEQ ID NO: 335211 - DNA, 912 bp, Artificial Sequence
  derived and/or modified sequence
atggaggagagcatggaggaggaggagggcggcagctacgaggccatgatggacgaccagaaccacaacaactgggaggccgccgtggacggcttcagacagcccctgccccccccccccccccccagcagcatccccgcccccgccagagagccccccggcggccagctgctggccgtgcccgccgtgagcgtggacagaaagggccccaaggagggcctgcccatgggcccccagcccccccccgaggccaacggcgtgatcatgatgctgaagagctgcgacgccgccgccgccgtggccaaggccgcccccgcccccaccgccagcagcaccatcaacatcaacaccagcaccagcaagttcctgatgaacgtgatcaccatcgaggactacaagagcacctactggcccaagctggacggcgccatcgaccagctgctgacccagagccccggcgactacatccccatcagctacgagcagatctacagctgcgtgtacaagtgcgtgtgccagcagcacagcgagcagatgtacagcgacctgatcaagaagatcaccaaccacctggagagagtgagcaaggagctgcaggccagcccccccgacctgtacatcgagagattcaacatcgccctgggccagtacatgggcgccctgcagagcatcgtgcccctgttcatctacatgaacaagttctacatcgagaccaagctgaacagagacctgaaggacgacctgatcaagctgttcaccgagcacgtggccgagaagcacatctacagcctgatgcccctgctgctggaggcccagagcacccccttccaggtgacccccagcaccatggccaacatcgtgaagggcctgtacaccctgagacccgtgagccagaacttcaccgccgtgtag

SEQ ID NO: 335212 - DNA, 912 bp, Artificial Sequence
  derived and/or modified sequence
atggaggagagtatggaggaagaggagggcggcagttacgaagcaatgatggacgatcagaaccataacaactgggaagccgcagtagatgggttccggcagccactccccccccccccacctccatctagtattcccgccccggcccgagagccacccggcgggcagctgcttgccgtacccgcagtgtctgtggacagaaagggacctaaggaaggtttaccaatggggcctcagccacctccggaggcaaacggagtgatcatgatgctgaagtcatgtgatgcagcagcggccgtagcaaaggcagcccccgcccccacggctagctctacgattaacatcaatactagcacctccaaattcctgatgaacgttataacaattgaagattacaagtcaacgtactggccaaaactggatggcgctatcgatcagcttctcacccagagccctggggactacattcctatttcgtacgagcagatatactcatgtgtgtataagtgcgtgtgccaacagcactcagagcagatgtattcggatctgatcaaaaaaattacaaatcatcttgaacgcgtgtcaaaagagctacaggcctctccgccggacctttacatagagagattcaatattgctctgggccagtatatgggcgctctgcaaagcatcgtccccttgttcatttatatgaataaattctatatagaaactaaattgaaccgggatctaaaagatgacctgattaagttgtttactgagcatgttgccgagaaacatatctacagtctgatgccacttctcctggaggcccagagtactccattccaggtcactccctccactatggccaatattgtgaaagggctgtatactctccgccccgttagtcagaatttcacagccgtttag

SEQ ID NO: 335213 - DNA, 912 bp, Artificial Sequence
  derived and/or modified sequence
atggaggagagcatggaggaggaggagggcggcagctatgaggccatgatggatgaccagaaccacaacaactgggaggccgctgtggatggcttccggcagcccctgcccccacctcctccacccagcagcatcccagccccagcccgggagcccccaggcggccagctgctggccgtgcctgctgtgtctgtggacaggaagggccccaaggagggcctgcccatgggcccccagcccccacctgaggccaatggagtcatcatgatgctgaagagctgtgatgctgctgctgctgtggccaaggccgccccagcccccacagccagcagcaccatcaacatcaacaccagcaccagcaagttcctgatgaatgtcatcaccatcgaggactacaagagcacctactggcccaagctggatggagccatcgaccagctgctgacccagagccctggggactacatccccatctcctatgagcagatctacagctgtgtgtacaagtgtgtgtgccagcagcacagcgagcagatgtacagcgacctgatcaagaagatcaccaaccacctggagcgggtgtccaaggagctgcaggccagccccccagacctgtacatcgagcgcttcaacatcgccctgggccagtacatgggcgccctgcagagcatcgtgcccctcttcatctacatgaacaagttctacatcgagaccaagctgaacagagacctgaaggatgacctgatcaagctgttcacagaacatgtggccgagaagcacatctacagcctgatgcccctgctgctggaggcccagagcacccccttccaggtgacccccagcaccatggccaacatcgtgaagggcctgtacaccctgcggcctgtgtcccagaacttcaccgctgtgtag

SEQ ID NO: 335214 - DNA, 912 bp, Artificial Sequence
  derived and/or modified sequence
atggaggagagcatggaggaggaggagggcggcagctacgaggccatgatggacgaccagaatcacaacaactgggaggccgccgtggacggctttcgacagcccctcccacctccccccccccctagctctatcccagcccccgcccgcgagccacctggggggcagctgctggccgttcccgctgtgtcagtagatagaaagggacccaaggaggggctgcccatgggcccacagcctcctcccgaggctaatggggtcattatgatgctcaagtcttgcgatgcagcggcagccgtggctaaggccgcccccgcccccacggcctcgagcacaatcaatattaacacatcaacctccaaattcctgatgaacgtcatcacgatagaagactacaagtcgacatattggccaaagcttgacggggcgattgatcagctcctgacacagtcccccggtgactacatccctatctcttacgagcagatctacagctgtgtttacaaatgtgtgtgtcagcaacactcagaacagatgtactccgacctgatcaagaaaattaccaatcacctggagagagtatcaaaggaacttcaggcttcccccccagatctgtatatcgaacggtttaacattgccctggggcagtacatgggagcccttcagagcatagtgccgctttttatatacatgaataagttctatattgaaaccaagttgaaccgggatctaaaagatgacctgattaagctatttacggaacacgtggctgagaaacacatttacagccttatgccacttttgctggaagctcagagcactccattccaggttaccccatctaccatggcgaacattgtcaaggggctatataccctgagacccgtctctcagaactttacagcagtgtag

SEQ ID NO: 335215 - DNA, 912 bp, Artificial Sequence
  derived and/or modified sequence
atggaagagtcgatggaagaagaagaaggtgggagttacgaagctatgatggatgatcaaaaccataacaattgggaggccgcagtcgatggatttagacagcctctccctcctccgcctcccccaagctccatcccagcaccagctcgtgaaccccctggcggacagctcctggccgtcccagctgtgagcgtggaccgaaaggggccaaaggagggcctacccatgggccctcagcctcccccagaagctaacggagtgattatgatgctgaaatcctgtgacgccgctgccgctgtggcaaaggctgccccagcgccaacagccagttcaactattaacatcaacacttctacgagcaagttcttgatgaatgtgattactatcgaggactacaagtccacgtactggcctaagctggacggggctatcgatcagttattaacccaaagccccggtgactacatacctatttcatatgagcagatctattcctgtgtgtataagtgcgtttgtcagcagcattcggaacaaatgtactctgacctgatcaagaagattaccaaccatctcgagcgtgtgagtaaggagctgcaagcaagtccccctgacttatacattgagcgctttaatatagcattggggcagtacatgggcgcactgcagagtatagtccctctctttatatatatgaataagttttatattgaaaccaaactgaaccgtgacctcaaggatgacctgataaagctctttaccgagcacgtggccgaaaagcatatttacagcctaatgcctctgctcctagaagctcagtcaaccccgtttcaggtgactccttccacaatggcgaatatcgtgaagggattgtatacactgaggcccgtcagtcagaactttaccgcagtgtag

SEQ ID NO: 335216 - DNA, 1917 bp, Artificial Sequence
  derived and/or modified sequence
tttccctaaagaatggcccttgtggataagcgctaagtcaagagacagtgattggacagaatttgtgaggaattcgcccccagatcatgaaagtcaccctgaaccccgcctcgtggtggctctgctggatggacgggactgcactgtggacatgcccatcctgaaggacctggccacctggccttctgtgaggctcagtccatgcaggagatccacgagaaagttctaaacgaagtcgtgggcgccatgatgtaccacaccttctccctcaccagggaagacctggaaaatttcaaggccctgagagtgatcgtgcaggtgggcagtggctacgacaacgtggccatcaaggctgctggcgagctcgaaattgctgtgtgcagcatcccgtccgcagccgtggaagagacagccgactccaccaccggccacatcctcaatctgtactgggggaacaggtcgctgtaccaggcactgagggaaggcacgcgagttcagagcgtggagcagattggcgaggtggcctcagtaaaggctcgcattcgtggggagatattgggcctcatcggcttcggtcgcacgcagcaggaggttgcagttcgagccaaggcctttgcaggatgggatcgagcggtccctgggtgtgcatagggtctacacccagcaggatttgctgtatcagaacgactgcgtcttcttgcattgcaatctcaacgaacaaaactaccaccttatccatgactttactataaagcagatgaggcagggagcattccttgtgaacgcagcccgtggtggcctggtggacgagaaagcctgagcacacatcctcaaggagggcagaatacgaggggcagccctcgacgtgaatgagtcggagccctttagttttgctcggggtctgttgaaagatgcctggaatctcatctgcactcctctcactgcctgctacagccagcaggtgtcactggagatgagcgaggcagttgccactgagatccgccaagccatcataagtcgcatcccgggaagcttaagaaactgtgtgaacaaggaattctttgtcacatcagcgctttggtccgtaataaaccagcaagaaattcatcctgagctcagtggtgctacctacagatatctgccaggcatggtgggcgtggctccaggaggacttctgcagccagggaagacatcatccctggagacatcccagtgactgacaacctcccaacagtggtacatccttcccaagggccctctcccaacagcccacaaaacacggggacagtcgagagcatcccaacgagcaatagcagagaatgccggaaggtaattattcagatatacttgggaacagtgaaaaatagataatctaagagaaaaagaatctgacggcctttttagctgattccggacatatgcatcattgttgttgcagtgttaaaacaagagctagaaaactgacaatgtcgtctgcttacggaagctctgaaagactagggtgtgatttattaacgcccaacttctattattgtgtgttaagtttttcatctgtgcatcaaatcacaaagaataaatagaacttttccctttatcagtcccttaggcacagcaggtcctgaacaccctgcttatatgttgcatcagcagttcaaatatgaaaataaaaaccatgaagaggaaatccgcatcctgtgactggagtcccttcagtctacagggactggttaccgctttttgctaataggaagattacattactagaaaatgtggagtaaactgtttgcctgtggtaaacacctgcatgcaaaggattgaagacagtaccggctcctgtacagagacgcgtctctcacatctgagctgcatattgagcggcaagttggttgtaagttcagtaaaagccgctgatgatgc

SEQ ID NO: 335217 - DNA, 450 bp, Artificial Sequence
  derived and/or modified sequence
atgcaggagatccacgagaaggtgctgaacgaggtggtgggcgccatgatgtaccacaccttcagcctgaccagagaggacctggagaacttcaaggccctgagagtgatcgtgcaggtgggcagcggctacgacaacgtggccatcaaggccgccggcgagctggagatcgccgtgtgcagcatccccagcgccgccgtggaggagaccgccgacagcaccaccggccacatcctgaacctgtactggggcaacagaagcctgtaccaggccctgagagagggcaccagagtgcagagcgtggagcagatcggcgaggtggccagcgtgaaggccagaatcagaggcgagatcctgggcctgatcggcttcggcagaacccagcaggaggtggccgtgagagccaaggccttcgccggctgggacagagccgtgcccggctgcgcctag

SEQ ID NO: 335218 - DNA, 450 bp, Artificial Sequence
  derived and/or modified sequence
atgcaggaaatacacgaaaaagtgttgaatgaggtcgtaggcgccatgatgtatcatacattttctcttaccagggaggatcttgagaacttcaaggctctgcgcgtgatcgtccaggttggatccggttacgataacgttgcgataaaagcagccggcgaactggagatcgctgtttgcagcattccgagcgccgcggtggaagagactgccgactccacaactggccacatcctgaatctgtactggggaaataggagtctgtatcaggccctccgggagggcacaagggtgcaatcggtcgagcagatcggagaagtggcaagtgtaaaggcaaggatccgcggtgagatacttggcctaatcggctttgggcgaacacaacaggaagtggccgtacgtgccaaagccttcgccggctgggaccgggcagtgcccggatgcgcgtag

SEQ ID NO: 335219 - DNA, 450 bp, Artificial Sequence
  derived and/or modified sequence
atgcaggagatccacgagaaggtgctgaatgaggtggtgggcgccatgatgtaccacaccttcagcctgacccgggaggacctggagaacttcaaggccctgcgggtgattgtgcaggtgggcagcggctatgacaacgtggccatcaaggccgccggggagctggagattgctgtgtgcagcatccccagcgctgctgtggaggagacagctgacagcaccaccggccacatcctgaacctgtactggggcaacagaagcctgtaccaggccctgcgggagggcaccagggtgcagagcgtggagcagatcggggaggtggcctctgtgaaggcccgcatccggggggagatcctgggcctcatcggcttcggccgcacccagcaggaggtggccgtgcgggccaaggcctttgctggctgggacagagctgtgcccggctgtgcctag

SEQ ID NO: 335220 - DNA, 450 bp, Artificial Sequence
  derived and/or modified sequence
atgcaggagatccacgagaaggtgctgaacgaggtggtgggcgccatgatgtaccacaccttctccctgacaagagaggatctggagaacttcaaagcacttcgggtgattgtccaggtcgggagtgggtacgacaacgtcgctattaaagcagccggggagctggagattgccgtgtgttctatcccttctgcagccgttgaagagaccgcagacagtaccactggacacattttgaatttgtattggggcaaccgctccctgtatcaggctcttcgggaaggaactagggtgcagtcggtcgagcagattggagaggtggcctcagttaaggcaaggattcgcggggaaatcttgggactgatcggatttggacgtacccagcaggaggtggctgtcagggctaaagccttcgccggttgggatagagccgtacccggctgtgcttag

SEQ ID NO: 335221 - DNA, 450 bp, Artificial Sequence
  derived and/or modified sequence
atgcaggagattcatgagaaggtcctgaatgaggtagtcggggcaatgatgtatcatacctttagccttacgcgagaagatctcgagaactttaaggctttgcgtgtcatcgtccaggtgggatctggttatgacaatgttgctattaaggctgccggagaactggaaatagctgtctgctctatcccatctgcagctgtcgaagagacagccgattccacaaccggacatatattaaatctatactggggtaaccgcagcctgtatcaggctctacgggagggtaccagagtacagtcagtggaacagatcggggaagtcgcttccgtcaaggcaagaattagaggagaaatcttggggctgatcgggtttggacggacacagcaggaagtggccgtgagggctaaggcctttgcgggttgggatagagcggtccctggatgcgcatag

SEQ ID NO: 335222 - DNA, 279 bp, Artificial Sequence
  derived and/or modified sequence
atggacgagctgctgagagagagagacatcctgaacaagaacatgctgaaggccgtgaacgccacccagaagcagaccgacctggtgaagctgcacgagcaggccaagagaaacctggagggcgagatccagaactacaaggacgaggcccagaagcagagaaagatcatcttccacctggagaaggagagagacagatacatcaaccaggccagcgacctgacccagaaggccgacagcgtgagaatgccctggcccctggacaagggcaagtggtag

SEQ ID NO: 335223 - DNA, 466 bp, Artificial Sequence
  derived and/or modified sequence
atggacgagcttctaagagaaagggacatactaaataagaacatgcttaaggcggtcaatgcgacccagaagcagacagacttggtaaagctccatgaacaagccaagaggaacctggagggagaaatccagaactacaaggatgaggctcagaagcagagaaagatcatctttcatctggaaaaggagcgtgaccggtacatcaaccaagccagtgaccttacgcaaaaggctgactctgtcaggatgccctggcctctggacaaagggaaatggtgaaacagtggaccctcagggagcttctgagcctctgctgacaagggaagggcacagatcctacccactcatattccaccggccaaccaagtcacagggctgtgccggacatcctgggcaggagtgtggtcctccttagggaggggccctgtagggtgaggcagcaaatatatttgaacataaaatgtca

SEQ ID NO: 335224 - DNA, 279 bp, Artificial Sequence
  derived and/or modified sequence
atggatgagctcctgcgggaacgcgacatcctgaacaaaaatatgctgaaggccgttaacgcgacgcagaaacagactgatttggtgaaactccacgagcaggccaaaagaaacctcgaaggtgagatccagaattacaaagacgaggcccaaaagcaacggaagatcatctttcacttggagaaagagagagatcggtatatcaaccaagcatctgacctgacccagaaggccgactcggtgcgcatgccttggcccctcgataagggtaagtggtag

SEQ ID NO: 335225 - DNA, 279 bp, Artificial Sequence
  derived and/or modified sequence
atggacgagttgctccgggagcgagatatactaaacaaaaacatgctgaaagctgtgaacgcaactcagaaacagacagatttagtgaagctccacgagcaggccaagagaaacctggaaggcgagattcagaattacaaggatgaagcccagaaacaacggaagattatattccaccttgagaaggaaagagataggtacattaaccaggcctcagacctgactcaaaaggcggacagcgtccgcatgccctggccactggataaagggaaatggtag

SEQ ID NO: 335226 - DNA, 279 bp, Artificial Sequence
  derived and/or modified sequence
atggatgagctgctgcgggagcgggacatcctgaacaagaacatgctgaaggctgtgaatgccacccagaagcagacagacctggtgaagctgcacgagcaggccaagaggaacctggagggggagatccagaactacaaggatgaggcccagaagcagaggaagatcatcttccacctggagaaggagcgggaccgctacatcaaccaggccagtgacctgacccagaaggctgacagcgtgaggatgccctggcccctggacaagggcaagtggtag

SEQ ID NO: 335227 - DNA, 279 bp, Artificial Sequence
  derived and/or modified sequence
atggacgagctgctgcgggagcgggacatcctgaacaagaacatgctgaaggctgtgaacgcaactcagaagcagacagacctggtcaagttgcacgagcaagcgaagagaaatctagaaggtgagatccaaaactataaagacgaggctcaaaagcagcgcaaaatcatctttcatctggagaaggaacgcgaccggtatattaatcaggcttctgatctgactcaaaaggccgactccgtaagaatgccttggcctctcgataagggtaagtggtag

SEQ ID NO: 335228 - DNA, 279 bp, Artificial Sequence
  derived and/or modified sequence
atggacgagctgctgcgggagcgggacatcctgaacaagaacatgctgaaggcggttaacgccacacagaaacaaaccgaccttgttaagctgcacgaacaggccaagcgcaaccttgagggagaaatccagaactataaggacgaagcgcagaagcagcgaaaaattatttttcacttagagaaggagcgcgaccggtacataaatcaggcctccgaccttactcagaaggcggattcagtcaggatgccttggcctctggacaagggaaaatggtag

SEQ ID NO: 335229 - DNA, 279 bp, Artificial Sequence
  derived and/or modified sequence
atggacgaactgttgcgcgagagggatatcctgaataaaaatatgcttaaggcggtgaatgccacccagaagcagactgacttggtcaagctccacgagcaggccaagcgcaatctggaaggggaaattcagaattataaggatgaagcgcaaaagcaacggaaaatcatcttccacctagagaaggagcgagatcggtacattaatcaggccagcgacttgacgcagaaagctgactcagtgagaatgccgtggccgctggacaagggtaaatggtag

SEQ ID NO: 335230 - DNA, 279 bp, Artificial Sequence
  derived and/or modified sequence
atggacgaacttctaagagaacgcgacatactcaataaaaatatgctcaaggctgtcaatgccacccagaagcagaccgatctagtcaagcttcacgagcaagcaaaacggaatttagagggcgaaatacaaaactacaaggacgaggcccaaaagcaacgcaagatcatctttcacctagagaaggagagagaccgctatatcaaccaggcatctgacctgacgcagaaagctgattcagtccgcatgccatggcctttagataaaggtaagtggtag

SEQ ID NO: 335231 - protein, 559 aa, Artificial Sequence
  derived and/or modified sequence
MTIHFRSDISFQNTGFLAWYNSFPSDATLRLVNLNSSYGLCAGRVEIYHGGTWGTVCDDSWTIQEAEVVCRQLGCGRAVSALGNAYFGSGSGPITLDDVECSGTESTLWQCRNRGWFSHNCNHREDAGVICSGNHLSTPAPFLNITRPNTDYSCGGFLSQPSGDFSSPFYPGNYPNNAKCVWDIEVQNNYRVTVIFRDVQLEGGCNYDYIEVFDGPYRSSPLIARVCDGARGSFTSSSNFMSIRFISDHSITRRGFRAEYYSSPSNDSTNLLCLPNHMQASVSRSYLQSLGFSASDLVISTWNGYYECRPQITPNLVIFTIPYSGCGTFKQADNDTIDYSNFLTAAVSGGIIKRRTDLRIHVSCRMLQNTWVDTMYIANDTIHVANNTIQVEEVQYGNFDVNISFYTSSSFLYPVTSRPYYVDLNQDLYVQAEILHSDAVLTLFVDTCVASPYSNDFTSLTYDLIRSGCVRDDTYGPYSSPSLRIARFRFRAFHFLNRFPSVYLRCKMVVCRAYDPSSRCYRGCVLRSKRDVGSYQEKVDVVLGPIQLQTPPRREEEPR

SEQ ID NO: 335232 - protein, 2542 aa, Artificial Sequence
  derived and/or modified sequence
MGISTVILEMCLLWGQVLSTGGWIPRTTDYASLIPSEVPLDPTVAEGSPFPSESTLESTVAEGSPISLESTLESTVAEGSLIPSESTLESTVAEGSDSGLALRLVNGDGRCQGRVEILYRGSWGTVCDDSWDTNDANVVCRQLGCGWAMSAPGNAWFGQGSGPIALDDVRCSGHESYLWSCPHNGWLSHNCGHGEDAGVICSAAQPQSTLRPESWPVRISPPVPTEGSESSLALRLVNGGDRCRGRVEVLYRGSWGTVCDDYWDTNDANVVCRQLGCGWAMSAPGNAQFGQGSGPIVLDDVRCSGHESYLWSCPHNGWLTHNCGHSEDAGVICSAPQSRPTPSPDTWPTSHASTAGPESSLALRLVNGGDRCQGRVEVLYRGSWGTVCDDSWDTSDANVVCRQLGCGWATSAPGNARFGQGSGPIVLDDVRCSGYESYLWSCPHNGWLSHNCQHSEDAGVICSAAHSWSTPSPDTLPTITLPASTVGSESSLALRLVNGGDRCQGRVEVLYRGSWGTVCDDSWDTNDANVVCRQLGCGWAMLAPGNARFGQGSGPIVLDDVRCSGNESYLWSCPHNGWLSHNCGHSEDAGVICSGPESSLALRLVNGGDRCQGRVEVLYRGSWGTVCDDSWDTNDANVVCRQLGCGWATSAPGNARFGQGSGPIVLDDVRCSGHESYLWSCPNNGWLSHNCGHHEDAGVICSAAQSRSTPRPDTLSTITLPPSTVGSESSLTLRLVNGSDRCQGRVEVLYRGSWGTVCDDSWDTNDANVVCRQLGCGWATSAPGNARFGQGSGPIVLDDVRCSGHESYLWSCPHNGWLSHNCGHHEDAGVICSVSQSRPTPSPDTWPTSHASTAGPESSLALRLVNGGDRCQGRVEVLYRGSWGTVCDDSWDTSDANVVCRQLGCGWATSAPGNARFGQGSGPIVLDDVRCSGYESYLWSCPHNGWLSHNCQHSEDAGVICSAAHSWSTPSPDTLPTITLPASTVGSESSLALRLVNGGDRCQGRVEVLYQGSWGTVCDDSWDTNDANVVCRQLGCGWAMSAPGNARFGQGSGPIVLDDVRCSGHESYLWSCPHNGWLSHNCGHSEDAGVICSASQSRPTPSPDTWPTSHASTAGSESSLALRLVNGGDRCQGRVEVLYRGSWGTVCDDYWDTNDANVVCRQLGCGWAMSAPGNARFGQGSGPIVLDDVRCSGHESYLWSCPHNGWLSHNCGHHEDAGVICSASQSQPTPSPDTWPTSHASTAGSESSLALRLVNGGDRCQGRVEVLYRGSWGTVCDDYWDTNDANVVCRQLGCGWATSAPGNARFGQGSGPIVLDDVRCSGHESYLWSCPHNGWLSHNCGHHEDAGVICSASQSQPTPSPDTWPTSHASTAGSESSLALRLVNGGDRCQGRVEVLYRGSWGTVCDDYWDTNDANVVCRQLGCGWATSAPGNARFGQGSGPIVLDDVRCSGHESYLWSCPHNGWLSHNCGHHEDAGVICSASQSQPTPSPDTWPTSHASTAGSESSLALRLVNGGDRCQGRVEVLYRGSWGTVCDDYWDTNDANVVCRQLGCGWATSAPGNARFGQGSGPIVLDDVRCSGHESYLWSCPHNGWLSHNCGHHEDAGVICSASQSQPTPSPDTWPTSRASTAGSESTLALRLVNGGDRCRGRVEVLYQGSWGTVCDDYWDTNDANVVCRQLGCGWAMSAPGNAQFGQGSGPIVLDDVRCSGHESYLWSCPHNGWLSHNCGHHEDAGVICSAAQSQSTPRPDTWLTTNLPALTVGSESSLALRLVNGGDRCRGRVEVLYRGSWGTVCDDSWDTNDANVVCRQLGCGWAMSAPGNARFGQGSGPIVLDDVRCSGNESYLWSCPHKGWLTHNCGHHEDAGVICSATQINSTTTDWWHPTTTTTARPSSNCGGFLFYASGTFSSPSYPAYYPNNAKCVWEIEVNSGYRINLGFSNLKLEAHHNCSFDYVEIFDGSLNSSLLLGKICNDTRQIFTSSYNRMTIHFRSDISFQNTGFLAWYNSFPSDATLRLVNLNSSYGLCAGRVEIYHGGTWGTVCDDSWTIQEAEVVCRQLGCGRAVSALGNAYFGSGSGPITLDDVECSGTESTLWQCRNRGWFSHNCNHREDAGVICSGNHLSTPAPFLNITRPNTDYSCGGFLSQPSGDFSSPFYPGNYPNNAKCVWDIEVQNNYRVTVIFRDVQLEGGCNYDYIEVFDGPYRSSPLIARVCDGARGSFTSSSNFMSIRFISDHSITRRGFRAEYYSSPSNDSTNLLCLPNHMQASVSRSYLQSLGFSASDLVISTWNGYYECRPQITPNLVIFTIPYSGCGTFKQADNDTIDYSNFLTAAVSGGIIKRRTDLRIHVSCRMLQNTWVDTMYIANDTIHVANNTIQVEEVQYGNFDVNISFYTSSSFLYPVTSRPYYVDLNQDLYVQAEILHSDAVLTLFVDTCVASPYSNDFTSLTYDLIRSGCVRDDTYGPYSSPSLRIARFRFRAFHFLNRFPSVYLRCKMVVCRAYDPSSRCYRGCVLRSKRDVGSYQEKVDVVLGPIQLQTPPRREEEPR

SEQ ID NO: 335233 - DNA, 7629 bp, Artificial Sequence
  derived and/or modified sequence
atgggcatcagcaccgtgatcctggagatgtgcctgctgtggggccaggtgctgagcaccggcggctggatccccagaaccaccgactacgccagcctgatccccagcgaggtgcccctggaccccaccgtggccgagggcagccccttccccagcgagagcaccctggagagcaccgtggccgagggcagccccatcagcctggagagcaccctggagagcaccgtggccgagggcagcctgatccccagcgagagcaccctggagagcaccgtggccgagggcagcgacagcggcctggccctgagactggtgaacggcgacggcagatgccagggcagagtggagatcctgtacagaggcagctggggcaccgtgtgcgacgacagctgggacaccaacgacgccaacgtggtgtgcagacagctgggctgcggctgggccatgagcgcccccggcaacgcctggttcggccagggcagcggccccatcgccctggacgacgtgagatgcagcggccacgagagctacctgtggagctgcccccacaacggctggctgagccacaactgcggccacggcgaggacgccggcgtgatctgcagcgccgcccagccccagagcaccctgagacccgagagctggcccgtgagaatcagcccccccgtgcccaccgagggcagcgagagcagcctggccctgagactggtgaacggcggcgacagatgcagaggcagagtggaggtgctgtacagaggcagctggggcaccgtgtgcgacgactactgggacaccaacgacgccaacgtggtgtgcagacagctgggctgcggctgggccatgagcgcccccggcaacgcccagttcggccagggcagcggccccatcgtgctggacgacgtgagatgcagcggccacgagagctacctgtggagctgcccccacaacggctggctgacccacaactgcggccacagcgaggacgccggcgtgatctgcagcgccccccagagcagacccacccccagccccgacacctggcccaccagccacgccagcaccgccggccccgagagcagcctggccctgagactggtgaacggcggcgacagatgccagggcagagtggaggtgctgtacagaggcagctggggcaccgtgtgcgacgacagctgggacaccagcgacgccaacgtggtgtgcagacagctgggctgcggctgggccaccagcgcccccggcaacgccagattcggccagggcagcggccccatcgtgctggacgacgtgagatgcagcggctacgagagctacctgtggagctgcccccacaacggctggctgagccacaactgccagcacagcgaggacgccggcgtgatctgcagcgccgcccacagctggagcacccccagccccgacaccctgcccaccatcaccctgcccgccagcaccgtgggcagcgagagcagcctggccctgagactggtgaacggcggcgacagatgccagggcagagtggaggtgctgtacagaggcagctggggcaccgtgtgcgacgacagctgggacaccaacgacgccaacgtggtgtgcagacagctgggctgcggctgggccatgctggcccccggcaacgccagattcggccagggcagcggccccatcgtgctggacgacgtgagatgcagcggcaacgagagctacctgtggagctgcccccacaacggctggctgagccacaactgcggccacagcgaggacgccggcgtgatctgcagcggccccgagagcagcctggccctgagactggtgaacggcggcgacagatgccagggcagagtggaggtgctgtacagaggcagctggggcaccgtgtgcgacgacagctgggacaccaacgacgccaacgtggtgtgcagacagctgggctgcggctgggccaccagcgcccccggcaacgccagattcggccagggcagcggccccatcgtgctggacgacgtgagatgcagcggccacgagagctacctgtggagctgccccaacaacggctggctgagccacaactgcggccaccacgaggacgccggcgtgatctgcagcgccgcccagagcagaagcacccccagacccgacaccctgagcaccatcaccctgccccccagcaccgtgggcagcgagagcagcctgaccctgagactggtgaacggcagcgacagatgccagggcagagtggaggtgctgtacagaggcagctggggcaccgtgtgcgacgacagctgggacaccaacgacgccaacgtggtgtgcagacagctgggctgcggctgggccaccagcgcccccggcaacgccagattcggccagggcagcggccccatcgtgctggacgacgtgagatgcagcggccacgagagctacctgtggagctgcccccacaacggctggctgagccacaactgcggccaccacgaggacgccggcgtgatctgcagcgtgagccagagcagacccacccccagccccgacacctggcccaccagccacgccagcaccgccggccccgagagcagcctggccctgagactggtgaacggcggcgacagatgccagggcagagtggaggtgctgtacagaggcagctggggcaccgtgtgcgacgacagctgggacaccagcgacgccaacgtggtgtgcagacagctgggctgcggctgggccaccagcgcccccggcaacgccagattcggccagggcagcggccccatcgtgctggacgacgtgagatgcagcggctacgagagctacctgtggagctgcccccacaacggctggctgagccacaactgccagcacagcgaggacgccggcgtgatctgcagcgccgcccacagctggagcacccccagccccgacaccctgcccaccatcaccctgcccgccagcaccgtgggcagcgagagcagcctggccctgagactggtgaacggcggcgacagatgccagggcagagtggaggtgctgtaccagggcagctggggcaccgtgtgcgacgacagctgggacaccaacgacgccaacgtggtgtgcagacagctgggctgcggctgggccatgagcgcccccggcaacgccagattcggccagggcagcggccccatcgtgctggacgacgtgagatgcagcggccacgagagctacctgtggagctgcccccacaacggctggctgagccacaactgcggccacagcgaggacgccggcgtgatctgcagcgccagccagagcagacccacccccagccccgacacctggcccaccagccacgccagcaccgccggcagcgagagcagcctggccctgagactggtgaacggcggcgacagatgccagggcagagtggaggtgctgtacagaggcagctggggcaccgtgtgcgacgactactgggacaccaacgacgccaacgtggtgtgcagacagctgggctgcggctgggccatgagcgcccccggcaacgccagattcggccagggcagcggccccatcgtgctggacgacgtgagatgcagcggccacgagagctacctgtggagctgcccccacaacggctggctgagccacaactgcggccaccacgaggacgccggcgtgatctgcagcgccagccagagccagcccacccccagccccgacacctggcccaccagccacgccagcaccgccggcagcgagagcagcctggccctgagactggtgaacggcggcgacagatgccagggcagagtggaggtgctgtacagaggcagctggggcaccgtgtgcgacgactactgggacaccaacgacgccaacgtggtgtgcagacagctgggctgcggctgggccaccagcgcccccggcaacgccagattcggccagggcagcggccccatcgtgctggacgacgtgagatgcagcggccacgagagctacctgtggagctgcccccacaacggctggctgagccacaactgcggccaccacgaggacgccggcgtgatctgcagcgccagccagagccagcccacccccagccccgacacctggcccaccagccacgccagcaccgccggcagcgagagcagcctggccctgagactggtgaacggcggcgacagatgccagggcagagtggaggtgctgtacagaggcagctggggcaccgtgtgcgacgactactgggacaccaacgacgccaacgtggtgtgcagacagctgggctgcggctgggccaccagcgcccccggcaacgccagattcggccagggcagcggccccatcgtgctggacgacgtgagatgcagcggccacgagagctacctgtggagctgcccccacaacggctggctgagccacaactgcggccaccacgaggacgccggcgtgatctgcagcgccagccagagccagcccacccccagccccgacacctggcccaccagccacgccagcaccgccggcagcgagagcagcctggccctgagactggtgaacggcggcgacagatgccagggcagagtggaggtgctgtacagaggcagctggggcaccgtgtgcgacgactactgggacaccaacgacgccaacgtggtgtgcagacagctgggctgcggctgggccaccagcgcccccggcaacgccagattcggccagggcagcggccccatcgtgctggacgacgtgagatgcagcggccacgagagctacctgtggagctgcccccacaacggctggctgagccacaactgcggccaccacgaggacgccggcgtgatctgcagcgccagccagagccagcccacccccagccccgacacctggcccaccagcagagccagcaccgccggcagcgagagcaccctggccctgagactggtgaacggcggcgacagatgcagaggcagagtggaggtgctgtaccagggcagctggggcaccgtgtgcgacgactactgggacaccaacgacgccaacgtggtgtgcagacagctgggctgcggctgggccatgagcgcccccggcaacgcccagttcggccagggcagcggccccatcgtgctggacgacgtgagatgcagcggccacgagagctacctgtggagctgcccccacaacggctggctgagccacaactgcggccaccacgaggacgccggcgtgatctgcagcgccgcccagagccagagcacccccagacccgacacctggctgaccaccaacctgcccgccctgaccgtgggcagcgagagcagcctggccctgagactggtgaacggcggcgacagatgcagaggcagagtggaggtgctgtacagaggcagctggggcaccgtgtgcgacgacagctgggacaccaacgacgccaacgtggtgtgcagacagctgggctgcggctgggccatgagcgcccccggcaacgccagattcggccagggcagcggccccatcgtgctggacgacgtgagatgcagcggcaacgagagctacctgtggagctgcccccacaagggctggctgacccacaactgcggccaccacgaggacgccggcgtgatctgcagcgccacccagatcaacagcaccaccaccgactggtggcaccccaccaccaccaccaccgccagacccagcagcaactgcggcggcttcctgttctacgccagcggcaccttcagcagccccagctaccccgcctactaccccaacaacgccaagtgcgtgtgggagatcgaggtgaacagcggctacagaatcaacctgggcttcagcaacctgaagctggaggcccaccacaactgcagcttcgactacgtggagatcttcgacggcagcctgaacagcagcctgctgctgggcaagatctgcaacgacaccagacagatcttcaccagcagctacaacagaatgaccatccacttcagaagcgacatcagcttccagaacaccggcttcctggcctggtacaacagcttccccagcgacgccaccctgagactggtgaacctgaacagcagctacggcctgtgcgccggcagagtggagatctaccacggcggcacctggggcaccgtgtgcgacgacagctggaccatccaggaggccgaggtggtgtgcagacagctgggctgcggcagagccgtgagcgccctgggcaacgcctacttcggcagcggcagcggccccatcaccctggacgacgtggagtgcagcggcaccgagagcaccctgtggcagtgcagaaacagaggctggttcagccacaactgcaaccacagagaggacgccggcgtgatctgcagcggcaaccacctgagcacccccgcccccttcctgaacatcaccagacccaacaccgactacagctgcggcggcttcctgagccagcccagcggcgacttcagcagccccttctaccccggcaactaccccaacaacgccaagtgcgtgtgggacatcgaggtgcagaacaactacagagtgaccgtgatcttcagagacgtgcagctggagggcggctgcaactacgactacatcgaggtgttcgacggcccctacagaagcagccccctgatcgccagagtgtgcgacggcgccagaggcagcttcaccagcagcagcaacttcatgagcatcagattcatcagcgaccacagcatcaccagaagaggcttcagagccgagtactacagcagccccagcaacgacagcaccaacctgctgtgcctgcccaaccacatgcaggccagcgtgagcagaagctacctgcagagcctgggcttcagcgccagcgacctggtgatcagcacctggaacggctactacgagtgcagaccccagatcacccccaacctggtgatcttcaccatcccctacagcggctgcggcaccttcaagcaggccgacaacgacaccatcgactacagcaacttcctgaccgccgccgtgagcggcggcatcatcaagagaagaaccgacctgagaatccacgtgagctgcagaatgctgcagaacacctgggtggacaccatgtacatcgccaacgacaccatccacgtggccaacaacaccatccaggtggaggaggtgcagtacggcaacttcgacgtgaacatcagcttctacaccagcagcagcttcctgtaccccgtgaccagcagaccctactacgtggacctgaaccaggacctgtacgtgcaggccgagatcctgcacagcgacgccgtgctgaccctgttcgtggacacctgcgtggccagcccctacagcaacgacttcaccagcctgacctacgacctgatcagaagcggctgcgtgagagacgacacctacggcccctacagcagccccagcctgagaatcgccagattcagattcagagccttccacttcctgaacagattccccagcgtgtacctgagatgcaagatggtggtgtgcagagcctacgaccccagcagcagatgctacagaggctgcgtgctgagaagcaagagagacgtgggcagctaccaggagaaggtggacgtggtgctgggccccatccagctgcagaccccccccagaagagaggaggagcccagatag

SEQ ID NO: 335234 - DNA, 8073 bp, Artificial Sequence
  derived and/or modified sequence
tttatagcagcagtagaaatataccaccctagaggacacacctccttttagctaggtacctataaatgtccaggattttctattcaattgagaagaacccagcaaaatggggatctccacagtcatccttgaaatgtgtcttttatggggacaagttctatctacaggtgggtggatcccaaggactacagactacgcttcactgattccctcggaggtgcccttggatccaactgtagcagaaggttctccatttccctcggagtcgaccctggagtcaactgtagcagaaggttctccgatttccttggagtcaaccctggagtcaaccgtagcagaaggttctctgattccctcagagtcaaccctggagtcaactgtagcagaaggatctgattctggtttggccctgaggctggtgaatggagatggcaggtgtcagggccgagtggagatcctataccgaggctcctggggcaccgtgtgtgatgacagctgggacaccaatgatgccaacgtggtctgtaggcagctgggttgtggctgggccatgtcagctccaggaaatgcctggtttggccagggctcaggacccattgccctggatgatgtgcgctgctcaggacacgaatcctacctgtggagctgcccccacaatggctggctctcccataactgtggccatggtgaagatgctggtgttatctgctcagctgcccagcctcagtcaacactcaggccagaaagttggcctgtcaggatatcaccacctgtacccacagaaggatctgaatccagtttggccctgaggctggtgaatggaggcgacaggtgtcgaggccgagtggaggtcctataccgaggctcctggggcaccgtgtgtgatgactactgggacaccaatgatgccaatgtggtctgcaggcagctgggctgtggctgggccatgtcagccccaggaaatgcccagtttggccagggctcaggacccattgtcctggatgatgtgcgctgctcaggacatgagtcctacctgtggagctgcccccacaatggctggctcacccacaactgtggccatagtgaagacgctggtgtcatctgctcagctccccagtcccggccgacacccagcccagatacttggccgacctcacatgcatcaacagcaggacctgaatccagtttggccctgaggctggtgaatggaggtgacaggtgtcagggccgagtggaggtcctataccgaggctcctggggcaccgtgtgtgatgatagctgggacaccagtgacgccaatgtggtctgccggcagctgggctgtggctgggccacgtcagccccaggaaatgcccggtttggccagggttcaggacccattgtcctggatgacgtgcgctgctcaggctatgagtcctacctgtggagctgcccccacaatggctggctctcccataactgtcagcacagtgaagacgctggtgtcatctgctcagctgcccactcctggtcgacgcccagtccagacacgttgccgaccatcaccttacctgcatcgacagtaggatctgaatccagtttggccctgaggctggtgaatggaggtgacaggtgtcagggccgagtggaggtcctataccgaggctcctggggcaccgtgtgtgatgacagctgggacaccaatgatgccaatgtggtctgcaggcagctgggctgtggctgggccatgttggccccaggaaatgcccggtttggtcagggctcaggacccattgtcctggatgacgtgcgctgctcagggaatgagtcctacttgtggagctgcccccacaatggctggctctcccataactgtggccatagtgaagacgctggtgtcatctgctcaggacctgaatccagtttggccctgaggctggtgaatggaggtgacaggtgtcagggccgagtggaggtcctataccgaggctcttggggcaccgtgtgtgatgacagctgggacaccaatgatgccaatgtggtctgcaggcagctgggctgtggctgggccacgtcagccccaggaaatgcccggtttggtcagggctcaggacccattgtcctggatgatgtgcgctgctcaggacatgagtcctacctgtggagctgccccaacaatggctggctctcccacaactgtggccatcatgaagatgctggtgtcatctgctcagctgcccagtcccggtcgacgcccaggccagacacgttgtcgaccatcacgttacctccatcgacagtaggatctgaatccagtttgaccctgaggctggtgaatggaagtgacaggtgtcagggccgagtagaggtcctataccgaggctcctggggcaccgtgtgtgatgacagctgggataccaatgatgccaatgtggtctgcaggcagctgggctgtggctgggccacgtcggccccaggaaatgcccggtttggccagggctcaggacccattgttctggatgatgtgcgctgctcaggacacgagtcctacctgtggagctgcccccacaatggctggctctcccacaactgtggccatcatgaagatgctggtgtcatctgctcagtttcccagtcccggccgacacccagtccagatacttggccgacctcacatgcatcaacagcaggacctgaatccagtttggccctgaggctggtgaatggaggtgacaggtgtcagggccgagtggaggtcctataccgaggctcctggggcaccgtgtgtgatgatagctgggacaccagtgacgccaatgtggtctgccggcagctgggctgtggctgggccacgtcagccccaggaaatgcccggtttggccagggttcaggacccattgtcctggatgacgtgcgctgctcaggctatgagtcctacctgtggagctgcccccacaatggctggctctcccataactgtcagcacagtgaagacgctggtgtcatctgctcagctgcccactcctggtcgacgcccagtccagacacattgccgaccatcaccttgcctgcatcgacagtaggatctgaatccagtttggccctgaggctggtgaatggaggtgacaggtgtcagggccgagtggaggtcctataccaaggctcctggggcaccgtgtgcgatgacagctgggacaccaatgatgccaatgtcgtctgcaggcaactgggctgtggctgggccatgtcagccccaggaaatgcccggtttggtcagggctcaggacccattgtcctggatgatgtgcgctgctcaggacacgagtcttacctgtggagctgcccccacaatggctggctctcccacaactgtggccatagtgaagacgctggtgtcatctgctcagcttcccagtcccggccaacacctagtccagacacttggccaacctcacatgcatcaacagcaggatctgaatccagtttggccctgaggctggtgaatggaggtgacaggtgtcagggccgagtggaggtcctataccgaggctcctggggcaccgtgtgtgatgactactgggacaccaatgatgccaatgtggtttgcaggcagctgggctgtggctgggccatgtcagccccaggaaatgcccggtttggccagggttcaggacccattgtcctggatgatgtgcgctgctcaggacatgagtcctatctgtggagctgcccccacaatggctggctctcccacaactgtggccatcatgaagacgctggtgtcatctgctcagcttcccagtcccagccgacacccagcccagacacttggccaacctcacatgcatcaacagcaggatctgaatccagtttggccctgaggctggtgaatggaggtgacaggtgtcagggccgagtggaggtcctataccgaggctcctggggcaccgtgtgtgatgactactgggacaccaatgatgccaatgtggtttgcaggcagctgggctgtggctgggccacgtcagccccaggaaatgcccggtttggccagggttcaggacccattgtcctggatgatgtgcgctgctcaggacatgagtcctatctgtggagctgcccccacaatggctggctctcccacaactgtggccatcatgaagacgctggtgtcatctgctcagcttcccagtcccagccgacacccagcccagacacttggccaacctcacatgcatcaacagcaggatctgaatccagtttggccctgaggctggtgaatggaggtgacaggtgtcagggccgagtggaggtcctataccgaggctcctggggcaccgtgtgtgatgactactgggacaccaatgatgccaatgtggtttgcaggcagctgggctgtggctgggccacgtcagccccaggaaatgcccggtttggccagggttcaggacccattgtcctggatgatgtgcgctgctcaggacatgagtcctatctgtggagctgcccccacaatggctggctctcccacaactgtggccatcatgaagacgctggtgtcatctgctcagcttcccagtcccagccgacacccagcccagacacttggccaacctcacatgcatcaacagcaggatctgaatccagtttggccctgaggctggtgaatggaggtgacaggtgtcagggccgagtggaggtcctataccgaggctcctggggcaccgtgtgtgatgactactgggacaccaatgatgccaatgtggtttgcaggcagctgggctgtggctgggccacgtcagccccaggaaatgcccggtttggccagggttcaggacccattgtcctggatgatgtgcgctgctcaggacatgagtcctatctgtggagctgcccccacaatggctggctctcccacaactgtggccatcatgaagacgctggtgtcatctgctcagcttcccagtcccagccgacacccagcccagacacttggccaacctctcgtgcatcaacagcaggatctgaatccactttggccctgagactggtgaatggaggtgacaggtgtcgaggccgagtggaggtcctataccaaggctcctggggcaccgtgtgtgatgactactgggacaccaatgatgccaacgtggtctgcaggcagctgggctgtggctgggccatgtcagccccaggaaatgcccagtttggccagggctcaggacccattgtcctggatgatgtgcgctgctcaggacacgagtcttacctgtggagctgcccccacaatggctggctctcccacaactgtggccatcatgaagatgctggtgtcatctgctcagctgctcagtcccagtcaacgcccaggccagatacttggctgaccaccaacttaccggcattgacagtaggatctgaatccagtttggctctgaggctggtgaatggaggtgacaggtgtcgaggccgagtggaggtcctgtatcgaggctcctggggaaccgtgtgtgatgacagctgggacaccaatgatgccaatgtggtctgcaggcagctgggctgtggctgggccatgtcggccccaggaaatgcccggtttggccagggctcaggacccattgtcctggatgatgtgcgctgctcagggaatgagtcctacctgtggagctgcccccacaaaggctggctcacccacaactgtggccatcacgaagacgctggtgtcatctgctcagccacccaaataaattctactacgacagattggtggcatccaacaactacaaccactgcaagaccctcttcaaattgtggtggcttcttattctatgccagtgggacattctccagcccatcctaccctgcatactaccccaacaatgctaagtgtgtttgggaaatagaagtgaattctggttatcgcataaacctgggcttcagtaatctgaaattggaggcacaccataactgcagttttgattatgttgaaatctttgatggatcattgaatagcagtctcctgctggggaaaatctgtaatgataccaggcaaatatttacatcttcttacaaccgaatgaccattcactttcgaagtgacatcagtttccaaaacactggctttttggcttggtataactccttcccaagcgatgccaccttgaggttggtcaatttaaattcatcctatggtctatgtgccgggcgtgtagaaatttaccatggtggcacctgggggacagtttgtgatgactcctggaccattcaggaagctgaggtggtctgcagacagctagggtgtggacgtgcagtttcagcccttggaaatgcatattttggctctggctctggccccatcaccctggacgatgtagagtgctcagggacggaatccactctctggcagtgccggaaccgaggctggttctcccacaactgtaatcatcgtgaagatgctggtgtcatctgctcaggaaaccatctatcgacacctgctccttttctcaacatcacccgtccaaacacagattattcctgcggaggcttcctatcccaaccatcaggggacttttccagcccattctatcccgggaactatccaaacaatgccaagtgtgtgtgggacattgaggtgcaaaacaactaccgtgtgactgtgatcttcagagatgtccagcttgaaggtggctgcaactatgattatattgaagttttcgatggcccctaccgcagttcccctctcattgctcgagtttgtgatggggccagaggctccttcacttcttcctccaacttcatgtccattcgcttcatcagtgaccacagcatcacaaggagagggttccgggctgagtactactccagtccctccaatgacagcaccaacctgctctgtctgccaaatcacatgcaagccagtgtgagcaggagctatctccaatccttgggcttttctgccagtgaccttgtcatttccacctggaatggatactacgagtgtcggccccagataacgccgaacctggtgatattcacaattccctactcaggctgcggcaccttcaagcaggcagacaatgacaccatcgactattccaacttcctcacagcagctgtctcaggtggcatcatcaagaggaggacagacctccgtattcacgtcagctgcagaatgcttcagaacacctgggtcgacaccatgtacattgctaatgacaccatccacgttgctaataacaccatccaggtcgaggaagtccagtatggcaattttgacgtgaacatttccttttatacttcctcatctttcttgtatcctgtgaccagccgcccttactacgtggacctgaaccaggacttgtacgttcaggctgaaatcctccattctgatgctgtactgaccttgtttgtggacacctgcgtggcatcaccatactccaatgacttcacgtctttgacttatgatctaatccggagtggatgcgtgagggatgacacctacggaccctactcctcgccatctcttcgcattgcccgcttccggttcagggccttccacttcctgaaccgcttcccctccgtgtacctgcgttgtaaaatggtggtgtgcagagcgtatgacccctcttcccgctgctaccgaggctgtgtgttgaggtcgaagagggatgtgggctcctaccaggaaaaggtggacgtcgtcctgggtcccatccagctgcagacccccccacgccgagaagaggagcctcggtaggtggtcgctctcagaccccactgtccaccggggcgcagacccctgactcggggacttgggatgttcctcttggtgtcatattccaactcagattgagccctacattgtgctgcacctggtcatacggagttgaatcagacctggttcccgcctcccccaaggctcatggtccttggaggacccgttgcagggtgaggtcaagagagttctgacctggatggcccatagacctgacgtcccagaatccatgcttctcatctgcaaaatgaaaatgtcaatacttacttcttagcactgttgagagggttacttacataaaggaattttggtgaaactgc

SEQ ID NO: 335235 - DNA, 7629 bp, Artificial Sequence
  derived and/or modified sequence
atggggattagtaccgttatcctggagatgtgtttgctttggggacaagtgctctccaccgggggttggatcccaagaacaaccgattacgcaagtcttattccctccgaagtccctctggacccaaccgtggctgaggggtcgcccttcccctccgagagcacattggagagcacggtggcggaaggatctcctatatctctggagtcaactctggagtcaactgttgcagagggtagcctcatcccgagtgagtctaccctggaatccaccgtagcagagggctccgactcgggtctggccctgcgccttgtgaatggcgacggccggtgtcaggggcgggtggaaatcctctatagaggctcttggggtactgtctgtgacgattcttgggacactaacgatgcaaacgtggtttgcagacaactgggttgtggatgggccatgagcgcacccggcaacgcgtggtttggccaggggtccggtcccatcgccctggatgatgttcggtgcagcggtcacgaatcttacctgtggtcctgtccgcataacggctggctgtcccataattgtgggcacggcgaggatgccggggttatctgcagcgctgctcagcctcagagcacactgcggccggagtcatggcccgtgcgcatctccccaccagtgcccacagaaggtagtgagagcagcttggccctaaggttggtgaacggaggggataggtgtcgcgggagggtcgaagtgctgtaccgcggcagctggggaaccgtgtgcgacgactattgggacactaatgacgcaaacgtcgtgtgccggcagctaggctgtggttgggctatgtccgctcccgggaacgcacagttcggacagggaagcgggccaattgtgctcgacgatgtgagatgctcaggccacgagtcgtacctatggtcttgtccccacaatggttggctgactcataattgcggtcactcagaagacgccggggtgatctgctccgcaccacaatcaagaccaacgccttcaccggatacgtggccaacttctcatgcttctacggccggtccggagagttcactggccctgcgattagtgaatgggggggaccgatgccagggacgtgttgaagtgctctaccgtgggtcctgggggacggtctgcgacgactcatgggacactagcgatgcgaacgtggtttgccggcagctgggctgtggctgggccacatccgcacccggaaacgctcgctttggccaaggctccgggccgatcgtgcttgacgatgtcaggtgtagcggttatgagagttacttgtggagttgcccgcacaatgggtggcttagtcataattgccagcactcagaggacgccggggtgatatgctccgccgcacattcctggagcactccatctcctgacactctccccaccattacactccctgcctcaaccgttgggagcgaatctagtttggccctacggctggtgaatggcggagaccgttgccagggtcgcgttgaggtgctatatagagggtcatggggcacggtgtgcgatgacagttgggacacgaacgatgccaacgtggtgtgcaggcagctcggatgtggctgggctatgcttgccccaggcaatgcgaggtttggacaaggaagtggaccaatcgtgcttgacgatgtcagatgctcgggaaatgagtcttatctgtggtcttgtccccacaatgggtggttatcgcacaactgcggacatagcgaagacgccggggttatttgcagtgggccagagtcatctctggcccttcggctcgtcaatggcggcgataggtgccagggaagagtggaagttttgtatcgcggctcctggggcacagtctgtgacgactcttgggacaccaacgacgccaatgttgtgtgccgacagctgggctgtgggtgggcaacttccgcaccaggcaacgccaggtttgggcaaggaagtgggcccatcgtcttggacgacgtccgttgttcaggtcatgagtcttatctctggtcatgtcccaacaatgggtggctctcccacaactgcgggcaccacgaggacgccggagtcatttgttccgccgctcagtctagaagtacgcccagacctgatacactctccaccattaccttgccgccgagcaccgtggggagtgaatctagcctgacattaagattggtcaacgggtctgatcgatgccaggggcgcgttgaagtgctgtatcgcgggtcttggggcaccgtgtgtgacgatagttgggataccaatgacgcgaatgtggtttgtcgtcagctcggttgtggctgggccacttcagcgccaggcaatgctcggttcggccagggctccggaccgattgtcctggacgacgttcgttgctcaggacatgaatcttatctgtggagttgcccccacaacggctggctatcacataactgtggtcatcacgaggacgcaggtgtgatatgtagtgtctctcagtctaggcctaccccgagccccgacacttggccaacctcacacgcaagcactgcaggccctgaatcgagcctcgccttgcgactcgttaacggaggcgaccgctgtcagggacgcgtagaagtattatatcgtggcagctgggggacagtctgcgatgatagctgggatacatctgacgccaatgtagtgtgcagacaactggggtgtggctgggccacgtctgcaccaggcaacgctcgcttcggccagggctccggacccatcgtgctcgatgacgttcgctgtagcgggtacgagtcttacctttggagctgcccccataatgggtggctgagtcacaattgccagcattcggaagatgctggggtaatctgtagcgcggcacactcctggtccaccccgtccccagacaccctgccgacaatcactctgccagccagcaccgtgggctcagaaagctccttagctctgcgacttgtgaatggcggggatcgctgccagggccgcgtggaagtgctatatcaggggagttggggcacagtgtgtgacgattcgtgggatacgaatgatgctaatgttgtgtgccgtcaactgggatgcggctgggctatgagcgcacctgggaacgcccgatttggacagggttctggtcccattgttctggatgacgtcagatgctccggccatgaatcctacctgtggtcttgcccacacaacggctggctgtcgcacaattgcggacactcggaagacgcaggcgtaatctgtagcgcttctcagtcccggcctacaccaagtccagatacatggcccacctcacacgcgtcgactgcaggaagtgagtcttcgctggccctacgcctcgtgaacggaggagaccgttgccagggccgcgtggaagtcttgtataggggttcctggggaaccgtttgtgacgactattgggacaccaatgatgcgaatgtagtctgtcggcagttgggatgtggctgggccatgagcgctcctgggaacgcgagattcggccaagggtctggacctatcgtattggacgatgttcggtgttctgggcacgagtcttatctgtggagctgtccccataatggctggctgtcacacaactgcgggcaccacgaggacgccggggttatctgttctgcgtcgcagagccagccaacaccatcccccgacacgtggcctacctctcatgcatctacagctggctctgaatcttctttagctctcaggctcgtgaacggtggggaccgctgtcagggacgagtcgaggtcctctacagaggtagctggggcaccgtgtgtgacgattactgggatacgaacgatgcaaatgtggtgtgcaggcaactgggctgtggatgggctacctcagctccagggaacgcccgtttcggccaaggatccgggcctatagttctggacgatgtcaggtgcagcggacatgaatcatatctctggtcatgcccccacaatggttggctgtcccacaactgtgggcaccatgaggacgcaggcgtcatctgctctgctagtcaaagccaaccgacaccaagcccagacacctggcccacgagccatgcttccacagccggcagtgagagctccctcgcgctgcgcctggttaatggaggagatcgctgccagggccgggtggaagtcttgtacagaggctcttggggcaccgtgtgtgatgattactgggacaccaacgacgcaaacgttgtctgcaggcagttagggtgtggatgggcaacctccgcaccgggaaacgcgagattcggtcagggaagcggaccaatcgttctcgacgacgtgcgttgctccggtcatgagtcatatctatggtcatgtccccataacggttggctcagccacaactgcggccaccacgaagacgccggggttatctgttcagcaagccaaagccagcctactccgagcccagacacatggcctactagtcatgccagcacagcaggaagtgagagttcccttgcactcaggctggtaaatggcggcgataggtgtcagggccgggtcgaagtgctctaccgcgggtcctggggcacagtctgcgacgattactgggacactaacgacgcaaatgttgtatgcagacaactcggctgcgggtgggccacatcagctcctggcaatgcacgttttggccaaggctctgggcctatcgtgttagatgatgtgcgctgctccggtcacgaatcttacttatggtcttgcccccacaacggatggctttcccataattgtggccaccacgaggatgccggtgttatttgttcggcaagccagagccagccaacaccctcccccgatacctggccgacttccagagcctccacagccggttcagaaagcacattggcactgcgccttgtcaacggcggggaccggtgcaggggcagagtagaggttctctaccaggggagctggggcacggtatgcgatgactactgggatactaacgatgctaacgtggtgtgccgccagcttgggtgcggatgggctatgtctgcccctgggaacgctcagttcggacaggggtccggccccatcgtgttagatgacgtgaggtgttcaggtcacgagtcatatttatggagttgcccgcacaatggctggctgtcacataattgtggtcaccacgaagacgctggggttatctgtagcgcagcccagtctcagagcacaccacggcccgatacctggctgacaacgaatttgccggcactcacagtaggcagcgagtccagtctggcacttaggcttgtgaacgggggcgatcggtgtagaggcagagtagaggtactgtatcgggggagctggggcaccgtgtgcgatgactcctgggacacaaacgacgccaatgtggtgtgccgacagttggggtgcggttgggctatgagcgccccaggaaatgcacgttttgggcaaggcagcggaccaatcgtgctcgacgatgtgcgatgcagtgggaacgagtcatacctctggtcttgtccccataaagggtggctgactcataattgtggccaccacgaagatgctggcgttatctgctctgctacgcagatcaattctactaccactgactggtggcaccctactaccaccacaaccgcaagacccagctcaaactgcggtggatttttgttctacgctagcggcacattttccagcccatcttatcccgcctactatcctaacaacgccaaatgcgtgtgggaaatagaggtgaattcgggctacaggattaacctggggttcagtaaccttaagctggaagcccatcataattgcagcttcgactacgttgagatcttcgacggcagcctaaattcctccctactcctaggaaagatatgcaatgatacgcggcagattttcacttcaagctacaaccggatgaccatccactttaggagcgatattagttttcagaatactgggttcctggcctggtacaactcatttccatctgacgctactctgaggcttgtaaacttaaattcaagctacggcctttgcgccggtcgcgtggagatataccacggcggtacctggggtaccgtctgcgatgattcttggaccattcaagaagcagaagtcgtttgccgtcagcttgggtgcggaagagcagtgtcagccctaggtaacgcttactttgggagcggaagcggacccattacactggatgatgtagagtgcagtggaactgaatccacactatggcagtgtcgaaaccgcggctggttctcgcataactgcaaccatcgggaggacgctggcgtcatttgctcgggaaatcacttatctacccccgcaccattccttaacatcaccaggcctaacactgattactcatgtggcggtttcctgtcacagccaagcggagacttttcgagccccttttaccccgggaactacccgaacaacgctaaatgtgtttgggacatcgaggtccaaaacaattatagagtgacagtgatcttcagagatgttcagctcgaaggcgggtgcaactatgactatattgaggtgttcgatggcccgtatcggtcttcgcctctgattgcccgcgtctgcgacggagctaggggatcatttacctcatcaagtaattttatgtcaattcgcttcatatccgatcattctataacgaggaggggcttccgagccgagtactacagctctcctagtaatgatagcactaacctgctgtgcctgcccaatcacatgcaggctagtgtgtctcggagctacttgcagtcactgggcttctctgcctctgacctagtcatctctacgtggaatgggtactatgagtgcaggcctcaaattaccccaaacctcgtcatttttacaatcccttactctgggtgtggcacatttaagcaggccgacaatgataccattgattatagcaactttctgaccgccgccgtaagtggcggcataatcaaacggagaaccgacctgcggattcacgttagctgtcggatgctgcagaatacttgggtggacaccatgtacattgccaacgacaccattcatgttgcgaataacaccatacaggtggaggaggtccagtatggcaattttgacgttaatatctcgttctatacctctagcagctttttatatcctgttacgtcccggccatactacgtcgacctgaatcaagatttgtatgtgcaggctgaaatcctgcacagcgatgccgtgctcaccttatttgtagacacctgcgtggcttctccttacagtaacgacttcacctcgctgacctacgaccttattcgcagtggctgtgtcagggacgacacatatggcccatactctagcccatctctccgtatcgctcgttttcggtttagggcatttcactttctgaataggtttccctctgtctatctgaggtgtaagatggtggtgtgccgcgcatacgatcccagctctaggtgctatcggggctgtgtgcttcggagcaagagagatgttgggagttatcaggaaaaggtggacgtagtgttagggcctatccagctgcagactccccctaggagggaggaggagccccgatag

SEQ ID NO: 335236 - DNA, 7629 bp, Artificial Sequence
  derived and/or modified sequence
atgggcatcagcaccgtcatcctggagatgtgcctgctgtggggccaggtgctgagcactggaggctggatccccaggaccacagattatgccagcctcatccccagcgaggtgcccctggaccccaccgtggccgagggcagccccttccccagcgagagcaccctggagagcacagtggccgagggcagccccatcagcctggagagcaccctggagagcacagtggccgagggcagcctcatccccagcgagagcaccctggagagcacagtggccgagggcagtgacagcggcctggccctgcggctggtgaatggagatggccgctgccagggccgggtggagatcctgtaccggggctcctggggcaccgtgtgtgatgacagctgggacaccaatgatgccaacgtggtgtgccggcagctgggctgcggctgggccatgtctgcccctggaaatgcctggtttggccagggcagcggccccatcgccctggatgatgtgcgctgcagcggccacgagagctacctgtggagctgcccccacaacggctggctgagccacaactgtggccatggagaagatgctggggtcatctgcagcgctgcccagccccagagcaccctgcggcctgagagctggcctgtgcgcatcagcccccctgtgcccacagagggcagcgagagcagcctggccctgcggctggtgaatggaggagaccgctgccggggccgggtggaggtgctgtaccggggctcctggggcaccgtgtgtgatgactactgggacaccaatgatgccaacgtggtgtgccggcagctgggctgcggctgggccatgtctgcccctggaaatgcccagtttggccagggcagcggccccatcgtgctggatgatgtgcgctgcagcggccacgagagctacctgtggagctgcccccacaacggctggctgacccacaactgtggccacagtgaagatgctggggtcatctgcagcgccccccagagccggcccacccccagcccagacacctggcccaccagccacgccagcacagctggccctgagagcagcctggccctgcggctggtgaatggaggagaccgctgccagggccgggtggaggtgctgtaccggggctcctggggcaccgtgtgtgatgacagctgggacaccagtgatgccaacgtggtgtgccggcagctgggctgcggctgggccaccagcgcccctggaaatgcccgcttcggccagggcagcggccccatcgtgctggatgatgtgcgctgcagcggctatgagagctacctgtggagctgcccccacaacggctggctgagccacaactgccagcacagtgaagatgctggggtcatctgcagcgctgcccacagctggagcacccccagcccagacaccctgcccaccatcaccctgcctgccagcacagtgggcagcgagagcagcctggccctgcggctggtgaatggaggagaccgctgccagggccgggtggaggtgctgtaccggggctcctggggcaccgtgtgtgatgacagctgggacaccaatgatgccaacgtggtgtgccggcagctgggctgcggctgggccatgctggcccctggaaatgccaggtttggccagggcagcggccccatcgtgctggatgatgtgcgctgcagcggaaatgaaagctacctgtggagctgcccccacaacggctggctgagccacaactgtggccacagtgaagatgctggggtcatctgcagcggccctgagagcagcctggccctgcggctggtgaatggaggagaccgctgccagggccgggtggaggtgctgtaccggggctcctggggcaccgtgtgtgatgacagctgggacaccaatgatgccaacgtggtgtgccggcagctgggctgcggctgggccaccagcgcccctggaaatgccaggtttggccagggcagcggccccatcgtgctggatgatgtgcgctgcagcggccacgagagctacctgtggagctgccccaacaacggctggctgagccacaactgtggccaccatgaagatgctggggtcatctgcagcgctgcccagagccgcagcacccccaggccagacaccctgagcaccatcaccctgccccccagcacagtgggcagcgagagcagcctgaccctgcggctggtgaatggaagtgaccgctgccagggccgggtggaggtgctgtaccggggctcctggggcaccgtgtgtgatgacagctgggacaccaatgatgccaacgtggtgtgccggcagctgggctgcggctgggccaccagcgcccctggaaatgcccgcttcggccagggcagcggccccatcgtgctggatgatgtgcgctgcagcggccacgagagctacctgtggagctgcccccacaacggctggctgagccacaactgtggccaccatgaagatgctggggtcatctgcagcgtgtcccagagccggcccacccccagcccagacacctggcccaccagccacgccagcacagctggccctgagagcagcctggccctgcggctggtgaatggaggagaccgctgccagggccgggtggaggtgctgtaccggggctcctggggcaccgtgtgtgatgacagctgggacaccagtgatgccaacgtggtgtgccggcagctgggctgcggctgggccaccagcgcccctggaaatgccaggtttggccagggcagcggccccatcgtgctggatgatgtgcgctgcagcggctatgagagctacctgtggagctgcccccacaacggctggctgagccacaactgccagcacagtgaagatgctggggtcatctgcagcgctgcccacagctggagcacccccagcccagacaccctgcccaccatcaccctgcctgccagcacagtgggcagcgagagcagcctggccctgcggctggtgaatggaggagaccgctgccagggccgggtggaggtgctgtaccagggctcctggggcaccgtgtgtgatgacagctgggacaccaatgatgccaacgtggtgtgccggcagctgggctgcggctgggccatgtctgcccctggaaatgcccgcttcggccagggcagcggccccatcgtgctggatgatgtgcgctgcagcggccacgagagctacctgtggagctgcccccacaacggctggctgagccacaactgtggccacagtgaagatgctggggtcatctgcagcgccagccagagccggcccacccccagcccagacacctggcccaccagccacgccagcacagctggcagcgagagcagcctggccctgcggctggtgaatggaggagaccgctgccagggccgggtggaggtgctgtaccggggctcctggggcaccgtgtgtgatgactactgggacaccaatgatgccaacgtggtgtgccggcagctgggctgcggctgggccatgtctgcccctggaaatgccaggtttggccagggcagcggccccatcgtgctggatgatgtgcgctgcagcggccacgagagctacctgtggagctgcccccacaacggctggctgagccacaactgtggccaccatgaagatgctggggtcatctgcagcgccagccagagccagcccacccccagcccagacacctggcccaccagccacgccagcacagctggcagcgagagcagcctggccctgcggctggtgaatggaggagaccgctgccagggccgggtggaggtgctgtaccggggctcctggggcaccgtgtgtgatgactactgggacaccaatgatgccaacgtggtgtgccggcagctgggctgcggctgggccaccagcgcccctggaaatgcccgcttcggccagggcagcggccccatcgtgctggatgatgtgcgctgcagcggccacgagagctacctgtggagctgcccccacaacggctggctgagccacaactgtggccaccatgaagatgctggggtcatctgcagcgccagccagagccagcccacccccagcccagacacctggcccaccagccacgccagcacagctggcagcgagagcagcctggccctgcggctggtgaatggaggagaccgctgccagggccgggtggaggtgctgtaccggggctcctggggcaccgtgtgtgatgactactgggacaccaatgatgccaacgtggtgtgccggcagctgggctgcggctgggccaccagcgcccctggaaatgccaggtttggccagggcagcggccccatcgtgctggatgatgtgcgctgcagcggccacgagagctacctgtggagctgcccccacaacggctggctgagccacaactgtggccaccatgaagatgctggggtcatctgcagcgccagccagagccagcccacccccagcccagacacctggcccaccagccacgccagcacagctggcagcgagagcagcctggccctgcggctggtgaatggaggagaccgctgccagggccgggtggaggtgctgtaccggggctcctggggcaccgtgtgtgatgactactgggacaccaatgatgccaacgtggtgtgccggcagctgggctgcggctgggccaccagcgcccctggaaatgcccgcttcggccagggcagcggccccatcgtgctggatgatgtgcgctgcagcggccacgagagctacctgtggagctgcccccacaacggctggctgagccacaactgtggccaccatgaagatgctggggtcatctgcagcgccagccagagccagcccacccccagcccagacacctggcccaccagccgggccagcacagctggcagcgagagcaccctggccctgcggctggtgaatggaggagaccgctgccggggccgggtggaggtgctgtaccagggctcctggggcaccgtgtgtgatgactactgggacaccaatgatgccaacgtggtgtgccggcagctgggctgcggctgggccatgtctgcccctggaaatgcccagtttggccagggcagcggccccatcgtgctggatgatgtgcgctgcagcggccacgagagctacctgtggagctgcccccacaacggctggctgagccacaactgtggccaccatgaagatgctggggtcatctgcagcgctgcccagagccagagcacccccaggccagacacctggctgaccaccaacctgcctgccctgactgtgggcagcgagagcagcctggccctgcggctggtgaatggaggagaccgctgccggggccgggtggaggtgctgtaccggggctcctggggcaccgtgtgtgatgacagctgggacaccaatgatgccaacgtggtgtgccggcagctgggctgcggctgggccatgtctgcccctggaaatgcccgcttcggccagggcagcggccccatcgtgctggatgatgtgcgctgcagcggaaatgaaagctacctgtggagctgcccccacaagggctggctgacccacaactgtggccaccatgaagatgctggggtcatctgcagcgccacccagatcaacagcaccaccacagactggtggcaccccaccaccaccaccacagcccggcccagcagcaactgtggcggcttcctgttctacgccagcggcaccttcagcagccccagctacccagcctactaccccaacaatgccaagtgtgtgtgggagattgaggtgaacagcggctaccgcatcaacctgggcttcagcaacctgaagctggaggcccaccacaactgcagctttgattatgtggagatctttgatggcagcctgaacagcagcctgctgctgggcaagatctgcaatgacacccggcagatcttcaccagcagctacaacaggatgaccatccacttcagaagtgacatctccttccagaacacaggcttcctggcctggtacaacagcttccccagtgatgccaccctgcggctggtgaacctgaacagcagctatggcctgtgtgccggccgggtggagatctaccacggcggcacctggggcaccgtgtgtgatgacagctggaccatccaggaggccgaggtggtgtgccggcagctgggctgcggccgggctgtgtctgccctgggcaatgcctacttcggcagcggcagcggccccatcaccctggatgatgtggagtgcagcggcacagagagcaccctgtggcagtgcaggaacagaggctggttcagccacaactgcaaccaccgggaggatgctggggtcatctgcagcggcaaccacctgagcaccccagcccccttcctgaacatcacccggcccaacacagactacagctgtggcggcttcctgagccagcccagcggggacttcagcagccccttctacccaggcaactaccccaacaatgccaagtgtgtgtgggacatcgaggtgcagaacaactacagagtgaccgtcatcttcagagatgtgcagctggagggcggctgcaactatgactacatcgaggtgtttgatggcccctaccgcagcagccccctcatcgcccgggtgtgtgatggagcccggggcagcttcaccagcagcagcaacttcatgagcatccgcttcatcagtgaccacagcatcacccggcggggcttccgggcagagtactacagcagccccagcaatgacagcaccaacctgctgtgcctgcccaaccacatgcaggcctctgtgagccgcagctacctgcagagcctgggcttcagcgccagtgacctggtgatcagcacctggaatggctactatgagtgccggccccagatcacccccaacctggtgatcttcaccatcccctacagcggctgcggcaccttcaagcaggccgacaatgacaccatcgactacagcaacttcctgacagctgctgtgtctgggggcatcatcaagagaagaacagacctgcgcatccacgtgtcctgcaggatgctgcagaacacctgggtggacaccatgtacatcgccaatgacaccatccacgtggccaacaacaccatccaggtggaggaggtgcagtatggcaactttgatgtgaacatctccttctacaccagcagcagcttcctgtaccctgtgaccagccggccctactacgtggacctgaaccaggacctgtatgtgcaggccgagatcctgcacagtgatgctgtgctgaccctgtttgtggacacctgtgtggccagcccctacagcaatgacttcaccagcctgacctatgacctgatccgcagcggctgtgtgagagatgacacctacggcccctacagcagccccagcctgcgcatcgcccgcttccgcttccgggccttccacttcctgaaccgcttccccagcgtgtacctgcgctgcaagatggtggtgtgccgggcctatgaccccagcagccgctgctaccggggctgtgtgctgcggagcaagagagatgtgggcagctaccaggagaaggtggatgtggtgctgggccccatccagctgcagaccccaccccggcgggaggaggagcccaggtag

SEQ ID NO: 335237 - DNA, 7629 bp, Artificial Sequence
  derived and/or modified sequence
atgggcatcagcaccgtgatcctggagatgtgcctgctgtggggccaagttctctccaccggaggatggattcctaggactaccgactacgcgagcttgattccctccgaggtgcccctcgacccgactgttgccgaggggtccccttttccgagtgaatcaactctcgagtccaccgtggcagagggatcaccaatatcattggaatcaacgctggaaagcacagtggctgaagggtctcttatcccaagcgaatctacacttgaaagtaccgtggcagaggggtctgatagcggtctggccttgagactcgtgaacggcgatggtaggtgccagggcagagtggaaatcctgtaccgcggttcatgggggaccgtgtgtgatgatagctgggacacaaacgacgctaacgtagtgtgcagacaactggggtgtggctgggcaatgtccgcacctggcaacgcgtggtttggtcagggcagcggacccattgcacttgacgacgtgcgatgttcagggcatgagtcctatctgtggagctgtccccacaatggatggttgtctcataattgtgggcacggagaggatgccggtgtgatatgctccgccgcgcagccacaatcgaccctacgccctgagagctggcccgtccgaatttcccctcctgtgccaactgagggtagcgagtctagcctagcccttagactagtcaatggaggggatcggtgcaggggaagagttgaggtgctgtatcgcggctcatggggaacagtatgcgacgactactgggatactaacgacgccaatgttgtgtgccgacagcttggatgcggctgggccatgagcgcgccaggcaacgcccagtttgggcagggctccggacctattgtgctggacgacgttaggtgcagcggccatgagagctacctgtggtcctgccctcacaatggatggctgacacataactgtggccacagcgaggatgccggggtgatttgtagcgcaccgcagtcccgccctacccccagcccggacacgtggcccacaagtcatgccagcactgcagggcctgagtcaagcctggccctccgcctggttaatggtggggatagatgccagggacgagttgaggttctgtaccgcggatcatggggtacagtgtgtgacgattcttgggatacctcggacgcgaacgtagtctgccgccaattgggctgcggttgggcgacgagcgcgcccggcaacgctcgctttggccagggcagcgggcctattgtgcttgacgatgtgcgctgttccggctacgaaagctatttatggagctgcccacataatggatggctgtcccacaattgtcagcactcggaggacgcgggagtcatttgcagtgccgcccactcctggtctacgccaagtcctgacaccctgccaacaatcacactccctgcgtctacagtcggtagtgaatcctctctggcccttagactcgtaaacggaggcgacagatgccagggacgggtcgaggttctgtatcgggggtcctggggaaccgtgtgcgacgactcatgggacacaaatgacgcaaatgttgtgtgccggcagctgggctgcggatgggcaatgctggctccgggcaacgcaaggtttggacaagggagcggccccatcgtgctggatgacgtcagatgctctggtaacgagagttacctttggtcgtgtccccataacggatggctatcgcataattgcggtcatagtgaagatgccggggtcatatgcagtggacccgagtccagcctcgctttgcggttggtaaacggaggtgacaggtgccagggtagggtggaggtcctgtatcgaggatcttggggcactgtttgcgatgactcatgggataccaatgacgctaatgtggtctgtagacagttaggatgcggctgggcaacgtctgctccagggaatgctcggttcggccaaggaagcggccctattgttctcgacgatgtgagatgctccggacatgagagttacctgtggagctgccccaacaacggctggctgtctcataattgcggtcatcatgaagatgctggggttatttgttctgcagcgcaatctcggagcaccccccggcccgataccctctccaccattacactccctccttctacagttggatcagaatcttctctgaccttgcgacttgtgaacggcagcgaccgatgtcagggacgtgtggaagtgctgtacaggggctcctgggggacagtctgtgacgattcttgggacaccaatgatgccaacgtcgtttgccgccagctcggatgtggatgggctacttctgcccccggcaacgccaggttcgggcagggctcagggccaatcgtgctggatgatgtgaggtgcagcggccatgagagctatctgtggtcctgcccgcataatggctggctgagccataactgcggccatcacgaggatgccggcgtaatttgcagcgtttcccagtccagaccgacgcccagccctgacacttggccgacctcacacgcgtcgaccgctgggccagaaagcagcctcgccctaagactggtgaatggcggtgataggtgtcaagggagggtcgaagtgctttatagaggctcttggggcaccgtctgtgacgactcctgggacacaagcgacgccaatgttgtatgtcgccagctcggctgcggatgggcaactagcgcccctgggaatgcaagatttggacaggggagtggcccaatcgtgcttgatgatgtgcgatgttctggatacgaatcctacttgtggagttgtccccacaatggatggctctcccacaattgccagcatagcgaggatgccggagtgatttgttctgccgcccattcatggtccacccctagcccagacacgctgccgactatcaccctaccagcctctacagtggggtcagaatcttctctagcactgcggttggtgaacgggggggaccgatgccagggtcgcgttgaggtactctatcagggatcctgggggactgtctgtgacgattcctgggacacgaatgatgccaatgtagtttgcaggcagttggggtgtgggtgggcgatgagcgctccaggcaatgctagatttggacaggggagtggtccaattgtgttagatgacgttagatgctctgggcacgaaagctatttatggtcctgtccacataacggctggcttagtcataattgcggccacagcgaggacgctggcgttatttgcagcgctagccagtcaagacctactccaagccctgatacttggccaaccagtcacgcctccactgcggggtccgagtcttcactggcactgcggctggtgaacggaggcgatcggtgtcagggccgggttgaagtcttgtaccgcgggagctggggaacagtctgtgacgattactgggataccaatgacgctaacgtagtgtgtcgccagcttgggtgtgggtgggccatgagcgcacctggaaacgcccgcttcggacaaggtagcggcccaattgtacttgacgatgtgagatgtagcgggcacgaatcctacctctggagctgcccacataacggctggctgagccataactgtgggcaccatgaggatgcaggggtcatctgttccgcctcacagtctcagcccacgccgagcccagatacatggcctacttctcacgcttcaaccgcagggagcgagtcttctctggcgctgcgcctggtcaacggtggggatcggtgccaaggcagggtcgaggtgctgtaccgcggctcatgggggaccgtctgtgatgactactgggacacaaacgacgccaacgtggtgtgtagacaactgggctgtggctgggcaacctctgctccagggaacgcaaggttcggtcaggggtcaggcccaatcgtgttggatgacgttagatgttcagggcacgagagctacctgtggagctgtccacataatgggtggctgagtcataactgcggtcatcatgaggatgccggggtcatttgctctgcatctcagagccagccgacccccagccccgacacatggcccacttctcatgcctctaccgctggcagcgaatcttctcttgcacttagactcgttaacggtggagatcgatgtcagggtcgagtggaggtattatatagaggctcttggggaacagtgtgcgatgattattgggacaccaacgacgctaacgtggtgtgtagacagttgggctgcgggtgggctacaagcgctccagggaatgcgcgattcgggcaaggcagtggaccaatcgttctggacgatgtgagatgctccggtcatgagtcatatttatggagctgtccacacaatggctggttgtcccacaattgcgggcatcacgaggacgcgggcgtcatatgtagtgcttctcagtcacagcccacacccagtcccgatacctggccgacgagccatgcctcaactgcaggttcagagagctctttagctctccggctggtcaatggcggagaccggtgtcagggtcgagtggaggtgctgtaccgcggaagctgggggactgtttgcgacgattactgggataccaacgacgccaacgttgtctgtcgacagctgggttgtggatgggctaccagcgccccagggaatgcacgcttcgggcaggggagcgggcctatcgtgctggacgatgttcgttgctcaggccacgaatcctatttgtggtcatgtccacacaatgggtggttgtcgcacaactgtggccaccacgaggacgccggagtcatctgtagtgcatctcagtctcaaccaaccccctcaccagacacttggcccacgtctcgggcgagtaccgcagggtcagaaagtacgcttgcgctacgcctggttaacggcggggacagatgcagaggccgcgtggaggtactatatcagggttcctggggtacggtgtgcgacgattactgggacactaacgatgccaacgtggtttgtcgacagctggggtgtggatgggctatgtccgctcccggaaatgcccagttcggtcaaggttctgggcccattgtgctggacgatgttagatgctcagggcacgagtcctacctttggagctgtcctcataacgggtggttaagtcataattgcggccatcatgaggacgctggagtgatctgcagtgccgcccaatcacagagtaccccaagaccggatacatggttgactaccaaccttcctgccctcaccgtggggtctgaatcatcgctggcactgaggttggttaacggcggtgaccgttgccgcggaagggtggaagtgctctaccggggctcttggggcactgtgtgtgatgactcatgggatacaaacgatgcaaatgtcgtgtgccgacaactagggtgcggctgggctatgagtgcacccggaaatgcacgctttggccagggcagcgggccaattgttcttgacgacgtgaggtgttcaggcaatgaatcatatctgtggtcttgcccacacaaaggttggctaacacacaattgcggacatcacgaagacgcgggggtgatatgttctgcaacacagatcaactcaacaaccaccgactggtggcaccctaccactaccacaaccgcccgtccgagttccaactgtgggggctttttgttctacgcctccggtacgttctcttcacctagctaccctgcttactatccgaataacgcaaagtgcgtgtgggagatcgaggtgaatagcggatacagaattaatttaggttttagcaatctgaagctggaagcccatcacaactgcagcttcgattacgttgaaatctttgacggctctttaaattccagcttactcctgggcaagatttgtaatgatacgcgacagatattcactagctcctacaatcggatgactattcactttaggagtgatattagctttcaaaatacaggatttttggcatggtataatagctttcctagcgacgccactctgagactggtgaacctgaacagctcctatggcctctgcgctgggcgcgtggaaatttatcacggaggcacttggggcacagtgtgcgacgactcatggaccatccaagaggctgaagttgtctgcaggcaattggggtgtggccgcgccgtctcggcactcggtaacgcctactttggctctgggtcagggcccatcacactggatgacgtcgaatgctccggaaccgagagcaccctctggcaatgtagaaatagagggtggttctcccacaactgcaatcacagggaagacgccggagtgatctgtagtggaaaccatctaagcactccagctcctttcctcaatatcacgagacccaacactgactatagctgcggaggattcctgagccagccttccggtgatttttcttcccctttctaccctggaaactatcctaataacgcgaaatgtgtctgggacatcgaggttcaaaacaactaccgtgtcactgtgattttcagggatgtacagctcgaaggcggctgcaactacgattatatcgaggtgtttgacgggccctataggtcatcacctctcatcgcaagggtctgtgacggcgcccggggctcctttacaagctccagcaatttcatgtccattagatttatctccgaccacagtatcaccagaagagggtttcgagctgagtattacagctcccctagcaatgattcgaccaatctactgtgtctacccaatcatatgcaagcaagtgtgagtcgtagctacttacagtccctggggttttcagcttctgatttagtcatcagcacatggaatgggtactacgaatgccgcccccagataactccaaacctggtcatcttcacaatcccctattctggctgtggtaccttcaagcaggcagacaacgataccattgactactccaacttcttaacagccgcagtctctggtgggataattaagagacggacagacctgaggattcatgtttcgtgtcgcatgttacagaacacatgggtggatacaatgtatatcgccaacgacaccatccacgtcgctaataatactatccaggtggaagaagtccagtatggtaattttgatgtaaatatctctttttataccagcagctcattcctctacccagtgacctcacgcccctactatgtcgacctcaaccaagatctttacgtgcaggctgaaatcttgcactctgacgcagtgttaacactgttcgtggatacatgcgtggccagtccctactctaacgacttcaccagtttgacctacgacttaattagaagcggatgcgttcgcgacgacacctatggcccctattcaagcccgtctctccgaatcgcacggttccggttccgggcttttcatttcttaaaccgctttccatctgtctacctgcgttgtaaaatggtggtgtgcagagcttatgacccctccagccgctgttaccgtggctgtgtcctccgatcaaagcgagacgttggctcttaccaggagaaggtggacgtcgtgctgggtcctatccagttgcagacacctccgagacgggaagaagaaccccgatag

SEQ ID NO: 335238 - DNA, 7628 bp, Artificial Sequence
  derived and/or modified sequence
atgggtatttcaaccgtcattttggaaatgtgcctcttgtggggccaagttctctccaccgggggatggatccctaggacaacagattacgccagtctgattccctccgaagtgccgctcgaccctactgtggcggaaggctctcctttcccaagtgaaagtactctcgagtctacggtggctgagggcagccccatcagcctggagagtaccctggagtctacagtagcagagggtagcctgattccttccgaatccacattagagtccactgttgcagagggctccgactcaggcctggctctccgcctggtgaacggcgatggtagatgtcagggacgcgttgagatcctctacagaggttcatggggcactgtctgcgacgactcttgggacaccaacgacgcaaacgtggtctgtcggcagcttggatgcggatgggcaatgagcgcccctggaaatgcctggttcggtcaggggagcgggcctatcgcgctagatgatgtgcggtgtagcggacacgagagctatttgtggtcttgtcctcataatggatggctttcccataactgtggccacggtgaagatgcaggagtgatctgttccgcggctcaaccccagagcactttacggcctgagtcctggcccgtgagaattagcccaccagtgccaactgaaggatcggaatcgtccctcgcattgcgccttgtgaatggaggtgatcgctgtcgcggaagagttgaagtgctctatagggggtcctggggtaccgtctgcgatgattactgggataccaacgacgcaaatgtggtttgccgccaattaggatgtggatgggcaatgtccgctccgggaaacgctcagtttggccagggatctggcccaatagttttggacgacgtgagatgctctggccacgaaagttatctctggtcctgcccccacaacgggtggctgacacacaattgtggccacagcgaggacgccggagtgatttgctccgccccacagagcagacccaccccaagccccgatacctggcccacaagccacgcaagcaccgccggacccgagtcctccttagccctgagattagttaatggaggtgaccgctgtcagggtagggtcgaagttttgtaccgaggctcttgggggacggtttgtgacgactcgtgggatacgtctgatgcgaacgtggtatgcaggcagctgggatgcggatgggcaacaagcgctccaggtaatgcaaggtttggtcaaggttctggtcctatagtcctggatgacgtccgctgctcgggatacgagtcctacttatggagctgccctcacaatggctggctgagtcacaattgccagcactctgaggatgcgggagtaatttgctcggcagctcattcatggtcaacaccctcccccgacacactccctactatcacgctcccagccagcactgtcggctcagagtccagcctggctctccgtttggtgaacggaggcgataggtgtcagggacgcgtggaggtgctgtatcggggatcatggggaactgtgtgtgatgacagctgggatacgaacgacgcaaacgttgtttgtcgacagctaggctgtgggtgggctatgctcgcccctggtaatgcacgtttcggccagggatctggaccaatagtcctggatgacgtgcggtgctcaggaaatgagtcatacttgtggtcatgccctcataatgggtggctctcacacaattgtggacatagtgaggacgccggagtcatctgctctgggccagagagttccctcgccctgaggctggtcaacgggggagatagatgccagggcagggttgaagtgctctaccgcggttcttgggggacagtctgcgacgacagctgggatacaaacgatgctaacgtggtgtgccgccagctaggttgtgggtgggccaccagtgcccctggcaatgccagattcgggcagggcagcggcccaattgtgctcgatgacgtgcggtgttctggacacgagtcgtatctctggagctgtcctaataacggatggctaagccataactgtggacatcacgaggacgccggtgtgatctgtagcgctgcgcaaagcaggtcaactccaaggcctgacacactatccaccataaccctgccacctagtacagtcggctcagagagctccttaacacttcgtctcgtaaatggttctgatcgatgtcaagggagagtagaagtactgtaccggggttcatggggcaccgtttgtgatgactcctgggacaccaatgatgccaacgtggtttgcagacaattaggctgcggctgggcgaccagcgcgcctgggaacgctcggtttggccaggggagtggtcctattgttctcgacgacgtgcgttgttctgggcacgagtcttacctttggtcttgcccacacaacggatggctaagccataactgtggtcaccacgaagatgccggagtcatctgctcagtgtcacaatcgagaccgacgccaagccccgacacttggcccacctcccatgcctccactgctggtccggaatcttctctggcactgaggctcgtgaatggtggcgatagatgccaggggagggtggaggtcctctacagaggctcttggggaactgtatgcgacgattcgtgggatacttccgatgccaatgttgtttgccggcaactcggatgcgggtgggcaaccagcgcccctggcaacgcaagatttggccaggggtcgggccctatagtcctggacgacgttaggtgctctggctatgagtcatacttgtggagctgcccacataacggatggctgagccataattgccaacattcggaggatgcgggtgttatctgtagcgccgctcatagctggagcacaccctctccggataccttgcctacaattactctccctgcaagcacggttggaagcgagtccagtctggcattgcgcttggttaatggcggagaccggtgccagggccgagtggaggtgttgtatcaggggtcctggggaacagtgtgcgatgatagctgggacaccaatgatgctaatgtggtctgtcgacagctgggttgcggctgggctatgtctgctcccggaaacgctcgcttcggccaaggctcaggtcccattgtacttgatgacgtgagatgttccgggcatgagtcgtacctatggtcgtgccctcataacggctggctgtctcacaattgcgggcattccgaggacgccggtgtgatctgcagtgcctctcagagccgtcctaccccatcaccagatacctggccaacaagccatgccagcactgccggttcagagtccagccttgccctccggcttgtgaatggaggggacaggtgccagggtcgagtggaagtcctgtatcggggatcttggggaactgtgtgtgatgactattgggacactaacgacgctaatgtggtatgccgtcagttaggctgcggctgggcaatgtcagctcctgggaatgcgcgatttggccagggctccggcccaattgtgctggacgacgtgcgatgtagtggacatgagtcctacctctggtcgtgtcctcacaacggctggctgtcccacaattgtggacaccacgaagacgcaggcgtgatctgctccgcatcgcagtcccagccaacaccgagcccagatacttggcccacctcccatgccagcactgccggaagcgaaagctcgctcgccctgcgcctcgtgaatggaggggaccggtgccagggtcgggtggaagtgctgtatcgaggatcgtggggcactgtgtgtgatgattactgggacactaacgatgctaatgtggtgtgcaggcagttggggtgtggctgggccacatccgctcccggtaatgccagatttgggcagggttcaggcccaatcgttttggatgatgtgagatgctccggccatgaaagctacctatggagttgcccgcacaatgggtggctgtcacacaactgcggacaccacgaagatgcaggcgtgatctgctcagcatcccaaagccagcctacgcccagtcctgatacgtggccgacatctcacgccagtactgcgggaagcgagtctagcctggctctccgtctggtcaatggtggagacaggtgtcaaggccgtgtggaggtgctgtacagggggtcctggggaactgtctgcgacgactattgggacaccaatgacgcaaacgtggtgtgccgtcagttaggatgcggatgggccaccagcgcacctggcaatgccagatttggccaaggctctggcccaatcgtgctggatgacgtgcgttgctctggacacgaatcatacctgtggagttgtccccataatgggtggctgtcccacaactgtggccatcatgaagacgcaggtgttatttgttcagcctcccagagccagccaaccccctcacctgacacatggcccacatcacacgcaagcaccgccggttccgaatcttcccttgctttgcggctggtcaatgggggtgaccgctgccagggacgggtcgaggtcctatatagagggtcctgggggaccgtgtgcgatgattactgggataccaatgatgccaatgtggtgtgtaggcagctgggctgcgggtgggcaacttcggcaccagggaacgccaggttcggccaaggctccggccctattgtactggatgatgtcagatgctccggacatgagagctacctgtggtcttgtccacataacggttggttgtctcataactgtggacaccatgaggatgcgggagttatctgctcggctagccagtcacagcctacgccatccccggacacctggccaacttccagggcgtcaactgccggatcggagtccacattggctctacgcctcgtgaacggaggagacaggtgtcgaggcagggttgaggtactatatcagggctcctgggggaccgtgtgcgatgactattgggacaccaatgacgccaacgtggtgtgccggcagctgggatgcggatgggcaatgtcagccccaggcaatgcacagttcggacaggggtcaggacccatcgtgctggatgatgtgaggtgcagcgggcacgagtcatatttgtggtcgtgtccccacaacgggtggctgagtcataattgtggccatcacgaagacgccggagtgatttgtagcgcggctcagtcccagtctacccccaggcctgacacctggttgaccactaatctaccagccttgacagttggcagcgaatctagcctggctttgaggctcgtaaatggtggggaccgatgccggggaagggtagaggtcctctatagaggcagttggggtacagtatgcgacgacagttgggatacgaatgatgccaatgtggtgtgcaggcaactgggctgcggctgggcaatgtctgctcccggtaatgctcgctttggtcaaggctccggacctatcgtacttgacgacgttcgatgctctgggaatgagagttacctttggtcctgtccacacaaaggttggttaacacacaattgtggccaccacgaggacgccggagtgatctgttccgccacccagataaatagtacaaccactgattggtggcaccccacaactacaacaaccgccagaccatcctccaattgtggcggatttctgttctatgcaagtggaactttcagctccccatcatatccggcatattaccccaataacgctaaatgcgtgtgggaaatcgaagtgaacagcggctatcggatcaatctcggatttagcaacctgaagctggaagcacatcacaattgttcattcgactacgtcgagatatttgatgggagtctcaattcaagtctgctgttgggaaagatttgcaatgatacccgacagattttcacatcgtcatacaaccgtatgaccatccactttaggtcagacataagcttccagaacacaggtttcctggcctggtataactctttcccctccgacgctacactacggctcgtgaaccttaattcctcctatgggttatgtgccggtcgggtggagatttatcacgggggaacatggggcacggtctgcgatgactcatggactatccaggaggcagaggttgtgtgccgtcagcttggatgtggacgtgcagtttccgccttagggaatgcctatttcggctccggttccggcccaatcactcttgatgatgtcgagtgctctggtacagagtccacgctttggcagtgccggaaccgcggttggttctctcataattgtaatcaccgcgaggacgccggagtcatttgtagcggtaaccatctgtcaacacccgcaccctttttaaacatcacacgccctaatactgattactcttgcggaggctttctgtcccaaccatccggcgattttagcagtcctttttatccaggaaactacccaaacaatgctaaatgcgtctgggatatcgaggtgcagaataattaccgcgtgactgtcatcttcagggatgtccaacttgaaggagggtgcaattacgattatatagaggtgttcgatggaccataccggtcatccccactgatcgcccgagtgtgcgacggcgctagaggaagctttaccagcagctcaaattttatgtcaatccgattcatcagcgaccactctattactcgcagaggttttcgagctgagtactactctagcccctccaacgattcaacgaacctgttgtgccttccaaaccacatgcaggccagtgtatcccggagttatcttcagagtctaggcttctctgctagtgacttagttattagcacgtggaacgggtattatgaatgtcgtccccagatcactccgaatctggtcatctttactataccatattctgggtgcggtaccttcaagcaggcagataatgacacaatcgactactccaattttctgacagccgctgtttcaggcggaattattaaacggaggacagatctgaggatccatgtgtcttgtcgtatgctccagaacacatgggtagacactatgtatattgctaacgatactattcacgtagcgaataacacgatccaggtggaggaagtgcagtatggaaatttcgatgtgaatatcagtttctacacttccagctcctttttgtacccggtgacaagcaggccttattacgtcgacctgaatcaggacctttatgtgcaagctgagatcttgcactcagacgctgtcctgacacttttcgtggacacgtgcgtcgcgtccccttacagtaacgactttacgtcactgacttatgacctgattcggtctggctgcgtcagagacgacacgtatggtccatactcctcaccgtccctgaggattgcccgattcaggtttcgagccttccacttcctgaacagattccccagcgtctacttgcgctgtaagatggtggtgtgtcgggcttacgatccttctagcaggtgctacagagggtgcgtgcttaggagcaagcgcgatgttggatcttatcaagagaaagtggatgtcgtcttggggcctatccagttgcaaacacctccaagaagggaggaggagccacgtta

SEQ ID NO: 335239 - protein, 2413 aa, Artificial Sequence
  derived and/or modified sequence
MGISTVILEMCLLWGQVLSTGGWIPRTTDYASLIPSEVPLDPTVAEGSPFPSESTLESTVAEGSPISLESTLESTVAEGSLIPSESTLESTVAEGSDSGLALRLVNGDGRCQGRVEILYRGSWGTVCDDSWDTNDANVVCRQLGCGWAMSAPGNAWFGQGSGPIALDDVRCSGHESYLWSCPHNGWLSHNCGHGEDAGVICSAAQPQSTLRPESWPVRISPPVPTEGSESSLALRLVNGGDRCRGRVEVLYRGSWGTVCDDYWDTNDANVVCRQLGCGWAMSAPGNAQFGQGSGPIVLDDVRCSGHESYLWSCPHNGWLTHNCGHSEDAGVICSAPQSRPTPSPDTWPTSHASTAGPESSLALRLVNGGDRCQGRVEVLYRGSWGTVCDDSWDTSDANVVCRQLGCGWATSAPGNARFGQGSGPIVLDDVRCSGYESYLWSCPHNGWLSHNCQHSEDAGVICSAAHSWSTPSPDTLPTITLPASTVGSESSLALRLVNGGDRCQGRVEVLYRGSWGTVCDDSWDTNDANVVCRQLGCGWAMLAPGNARFGQGSGPIVLDDVRCSGNESYLWSCPHNGWLSHNCGHSEDAGVICSGPESSLALRLVNGGDRCQGRVEVLYRGSWGTVCDDSWDTNDANVVCRQLGCGWATSAPGNARFGQGSGPIVLDDVRCSGHESYLWSCPNNGWLSHNCGHHEDAGVICSAAQSRSTPRPDTLSTITLPPSTVGSESSLTLRLVNGSDRCQGRVEVLYRGSWGTVCDDSWDTNDANVVCRQLGCGWATSAPGNARFGQGSGPIVLDDVRCSGHESYLWSCPHNGWLSHNCGHHEDAGVICSVSQSRPTPSPDTWPTSHASTAGPESSLALRLVNGGDRCQGRVEVLYRGSWGTVCDDSWDTSDANVVCRQLGCGWATSAPGNARFGQGSGPIVLDDVRCSGYESYLWSCPHNGWLSHNCQHSEDAGVICSAAHSWSTPSPDTLPTITLPASTVGSESSLALRLVNGGDRCQGRVEVLYQGSWGTVCDDSWDTNDANVVCRQLGCGWAMSAPGNARFGQGSGPIVLDDVRCSGHESYLWSCPHNGWLSHNCGHSEDAGVICSASQSRPTPSPDTWPTSHASTAGSESSLALRLVNGGDRCQGRVEVLYRGSWGTVCDDYWDTNDANVVCRQLGCGWAMSAPGNARFGQGSGPIVLDDVRCSGHESYLWSCPHNGWLSHNCGHHEDAGVICSASQSQPTPSPDTWPTSHASTAGSESSLALRLVNGGDRCQGRVEVLYRGSWGTVCDDYWDTNDANVVCRQLGCGWATSAPGNARFGQGSGPIVLDDVRCSGHESYLWSCPHNGWLSHNCGHHEDAGVICSASQSQPTPSPDTWPTSHASTAGSESSLALRLVNGGDRCQGRVEVLYRGSWGTVCDDYWDTNDANVVCRQLGCGWATSAPGNARFGQGSGPIVLDDVRCSGHESYLWSCPHNGWLSHNCGHHEDAGVICSASQSQPTPSPDTWPTSRASTAGSESTLALRLVNGGDRCRGRVEVLYQGSWGTVCDDYWDTNDANVVCRQLGCGWAMSAPGNAQFGQGSGPIVLDDVRCSGHESYLWSCPHNGWLSHNCGHHEDAGVICSAAQSQSTPRPDTWLTTNLPALTVGSESSLALRLVNGGDRCRGRVEVLYRGSWGTVCDDSWDTNDANVVCRQLGCGWAMSAPGNARFGQGSGPIVLDDVRCSGNESYLWSCPHKGWLTHNCGHHEDAGVICSATQINSTTTDWWHPTTTTTARPSSNCGGFLFYASGTFSSPSYPAYYPNNAKCVWEIEVNSGYRINLGFSNLKLEAHHNCSFDYVEIFDGSLNSSLLLGKICNDTRQIFTSSYNRMTIHFRSDISFQNTGFLAWYNSFPSDATLRLVNLNSSYGLCAGRVEIYHGGTWGTVCDDSWTIQEAEVVCRQLGCGRAVSALGNAYFGSGSGPITLDDVECSGTESTLWQCRNRGWFSHNCNHREDAGVICSGNHLSTPAPFLNITRPNTDYSCGGFLSQPSGDFSSPFYPGNYPNNAKCVWDIEVQNNYRVTVIFRDVQLEGGCNYDYIEVFDGPYRSSPLIARVCDGARGSFTSSSNFMSIRFISDHSITRRGFRAEYYSSPSNDSTNLLCLPNHMQASVSRSYLQSLGFSASDLVISTWNGYYECRPQITPNLVIFTIPYSGCGTFKQADNDTIDYSNFLTAAVSGGIIKRRTDLRIHVSCRMLQNTWVDTMYIANDTIHVANNTIQVEEVQYGNFDVNISFYTSSSFLYPVTSRPYYVDLNQDLYVQAEILHSDAVLTLFVDTCVASPYSNDFTSLTYDLIRSGCVRDDTYGPYSSPSLRIARFRFRAFHFLNRFPSVYLRCKMVVCRAYDPSSRCYRGCVLRSKRDVGSYQEKVDVVLGPIQLQTPPRREEEPR

SEQ ID NO: 335240 - DNA, 7242 bp, Artificial Sequence
  derived and/or modified sequence
atgggcatcagcaccgtgatcctggagatgtgcctgctgtggggccaggtgctgagcaccggcggctggatccccagaaccaccgactacgccagcctgatccccagcgaggtgcccctggaccccaccgtggccgagggcagccccttccccagcgagagcaccctggagagcaccgtggccgagggcagccccatcagcctggagagcaccctggagagcaccgtggccgagggcagcctgatccccagcgagagcaccctggagagcaccgtggccgagggcagcgacagcggcctggccctgagactggtgaacggcgacggcagatgccagggcagagtggagatcctgtacagaggcagctggggcaccgtgtgcgacgacagctgggacaccaacgacgccaacgtggtgtgcagacagctgggctgcggctgggccatgagcgcccccggcaacgcctggttcggccagggcagcggccccatcgccctggacgacgtgagatgcagcggccacgagagctacctgtggagctgcccccacaacggctggctgagccacaactgcggccacggcgaggacgccggcgtgatctgcagcgccgcccagccccagagcaccctgagacccgagagctggcccgtgagaatcagcccccccgtgcccaccgagggcagcgagagcagcctggccctgagactggtgaacggcggcgacagatgcagaggcagagtggaggtgctgtacagaggcagctggggcaccgtgtgcgacgactactgggacaccaacgacgccaacgtggtgtgcagacagctgggctgcggctgggccatgagcgcccccggcaacgcccagttcggccagggcagcggccccatcgtgctggacgacgtgagatgcagcggccacgagagctacctgtggagctgcccccacaacggctggctgacccacaactgcggccacagcgaggacgccggcgtgatctgcagcgccccccagagcagacccacccccagccccgacacctggcccaccagccacgccagcaccgccggccccgagagcagcctggccctgagactggtgaacggcggcgacagatgccagggcagagtggaggtgctgtacagaggcagctggggcaccgtgtgcgacgacagctgggacaccagcgacgccaacgtggtgtgcagacagctgggctgcggctgggccaccagcgcccccggcaacgccagattcggccagggcagcggccccatcgtgctggacgacgtgagatgcagcggctacgagagctacctgtggagctgcccccacaacggctggctgagccacaactgccagcacagcgaggacgccggcgtgatctgcagcgccgcccacagctggagcacccccagccccgacaccctgcccaccatcaccctgcccgccagcaccgtgggcagcgagagcagcctggccctgagactggtgaacggcggcgacagatgccagggcagagtggaggtgctgtacagaggcagctggggcaccgtgtgcgacgacagctgggacaccaacgacgccaacgtggtgtgcagacagctgggctgcggctgggccatgctggcccccggcaacgccagattcggccagggcagcggccccatcgtgctggacgacgtgagatgcagcggcaacgagagctacctgtggagctgcccccacaacggctggctgagccacaactgcggccacagcgaggacgccggcgtgatctgcagcggccccgagagcagcctggccctgagactggtgaacggcggcgacagatgccagggcagagtggaggtgctgtacagaggcagctggggcaccgtgtgcgacgacagctgggacaccaacgacgccaacgtggtgtgcagacagctgggctgcggctgggccaccagcgcccccggcaacgccagattcggccagggcagcggccccatcgtgctggacgacgtgagatgcagcggccacgagagctacctgtggagctgccccaacaacggctggctgagccacaactgcggccaccacgaggacgccggcgtgatctgcagcgccgcccagagcagaagcacccccagacccgacaccctgagcaccatcaccctgccccccagcaccgtgggcagcgagagcagcctgaccctgagactggtgaacggcagcgacagatgccagggcagagtggaggtgctgtacagaggcagctggggcaccgtgtgcgacgacagctgggacaccaacgacgccaacgtggtgtgcagacagctgggctgcggctgggccaccagcgcccccggcaacgccagattcggccagggcagcggccccatcgtgctggacgacgtgagatgcagcggccacgagagctacctgtggagctgcccccacaacggctggctgagccacaactgcggccaccacgaggacgccggcgtgatctgcagcgtgagccagagcagacccacccccagccccgacacctggcccaccagccacgccagcaccgccggccccgagagcagcctggccctgagactggtgaacggcggcgacagatgccagggcagagtggaggtgctgtacagaggcagctggggcaccgtgtgcgacgacagctgggacaccagcgacgccaacgtggtgtgcagacagctgggctgcggctgggccaccagcgcccccggcaacgccagattcggccagggcagcggccccatcgtgctggacgacgtgagatgcagcggctacgagagctacctgtggagctgcccccacaacggctggctgagccacaactgccagcacagcgaggacgccggcgtgatctgcagcgccgcccacagctggagcacccccagccccgacaccctgcccaccatcaccctgcccgccagcaccgtgggcagcgagagcagcctggccctgagactggtgaacggcggcgacagatgccagggcagagtggaggtgctgtaccagggcagctggggcaccgtgtgcgacgacagctgggacaccaacgacgccaacgtggtgtgcagacagctgggctgcggctgggccatgagcgcccccggcaacgccagattcggccagggcagcggccccatcgtgctggacgacgtgagatgcagcggccacgagagctacctgtggagctgcccccacaacggctggctgagccacaactgcggccacagcgaggacgccggcgtgatctgcagcgccagccagagcagacccacccccagccccgacacctggcccaccagccacgccagcaccgccggcagcgagagcagcctggccctgagactggtgaacggcggcgacagatgccagggcagagtggaggtgctgtacagaggcagctggggcaccgtgtgcgacgactactgggacaccaacgacgccaacgtggtgtgcagacagctgggctgcggctgggccatgagcgcccccggcaacgccagattcggccagggcagcggccccatcgtgctggacgacgtgagatgcagcggccacgagagctacctgtggagctgcccccacaacggctggctgagccacaactgcggccaccacgaggacgccggcgtgatctgcagcgccagccagagccagcccacccccagccccgacacctggcccaccagccacgccagcaccgccggcagcgagagcagcctggccctgagactggtgaacggcggcgacagatgccagggcagagtggaggtgctgtacagaggcagctggggcaccgtgtgcgacgactactgggacaccaacgacgccaacgtggtgtgcagacagctgggctgcggctgggccaccagcgcccccggcaacgccagattcggccagggcagcggccccatcgtgctggacgacgtgagatgcagcggccacgagagctacctgtggagctgcccccacaacggctggctgagccacaactgcggccaccacgaggacgccggcgtgatctgcagcgccagccagagccagcccacccccagccccgacacctggcccaccagccacgccagcaccgccggcagcgagagcagcctggccctgagactggtgaacggcggcgacagatgccagggcagagtggaggtgctgtacagaggcagctggggcaccgtgtgcgacgactactgggacaccaacgacgccaacgtggtgtgcagacagctgggctgcggctgggccaccagcgcccccggcaacgccagattcggccagggcagcggccccatcgtgctggacgacgtgagatgcagcggccacgagagctacctgtggagctgcccccacaacggctggctgagccacaactgcggccaccacgaggacgccggcgtgatctgcagcgccagccagagccagcccacccccagccccgacacctggcccaccagcagagccagcaccgccggcagcgagagcaccctggccctgagactggtgaacggcggcgacagatgcagaggcagagtggaggtgctgtaccagggcagctggggcaccgtgtgcgacgactactgggacaccaacgacgccaacgtggtgtgcagacagctgggctgcggctgggccatgagcgcccccggcaacgcccagttcggccagggcagcggccccatcgtgctggacgacgtgagatgcagcggccacgagagctacctgtggagctgcccccacaacggctggctgagccacaactgcggccaccacgaggacgccggcgtgatctgcagcgccgcccagagccagagcacccccagacccgacacctggctgaccaccaacctgcccgccctgaccgtgggcagcgagagcagcctggccctgagactggtgaacggcggcgacagatgcagaggcagagtggaggtgctgtacagaggcagctggggcaccgtgtgcgacgacagctgggacaccaacgacgccaacgtggtgtgcagacagctgggctgcggctgggccatgagcgcccccggcaacgccagattcggccagggcagcggccccatcgtgctggacgacgtgagatgcagcggcaacgagagctacctgtggagctgcccccacaagggctggctgacccacaactgcggccaccacgaggacgccggcgtgatctgcagcgccacccagatcaacagcaccaccaccgactggtggcaccccaccaccaccaccaccgccagacccagcagcaactgcggcggcttcctgttctacgccagcggcaccttcagcagccccagctaccccgcctactaccccaacaacgccaagtgcgtgtgggagatcgaggtgaacagcggctacagaatcaacctgggcttcagcaacctgaagctggaggcccaccacaactgcagcttcgactacgtggagatcttcgacggcagcctgaacagcagcctgctgctgggcaagatctgcaacgacaccagacagatcttcaccagcagctacaacagaatgaccatccacttcagaagcgacatcagcttccagaacaccggcttcctggcctggtacaacagcttccccagcgacgccaccctgagactggtgaacctgaacagcagctacggcctgtgcgccggcagagtggagatctaccacggcggcacctggggcaccgtgtgcgacgacagctggaccatccaggaggccgaggtggtgtgcagacagctgggctgcggcagagccgtgagcgccctgggcaacgcctacttcggcagcggcagcggccccatcaccctggacgacgtggagtgcagcggcaccgagagcaccctgtggcagtgcagaaacagaggctggttcagccacaactgcaaccacagagaggacgccggcgtgatctgcagcggcaaccacctgagcacccccgcccccttcctgaacatcaccagacccaacaccgactacagctgcggcggcttcctgagccagcccagcggcgacttcagcagccccttctaccccggcaactaccccaacaacgccaagtgcgtgtgggacatcgaggtgcagaacaactacagagtgaccgtgatcttcagagacgtgcagctggagggcggctgcaactacgactacatcgaggtgttcgacggcccctacagaagcagccccctgatcgccagagtgtgcgacggcgccagaggcagcttcaccagcagcagcaacttcatgagcatcagattcatcagcgaccacagcatcaccagaagaggcttcagagccgagtactacagcagccccagcaacgacagcaccaacctgctgtgcctgcccaaccacatgcaggccagcgtgagcagaagctacctgcagagcctgggcttcagcgccagcgacctggtgatcagcacctggaacggctactacgagtgcagaccccagatcacccccaacctggtgatcttcaccatcccctacagcggctgcggcaccttcaagcaggccgacaacgacaccatcgactacagcaacttcctgaccgccgccgtgagcggcggcatcatcaagagaagaaccgacctgagaatccacgtgagctgcagaatgctgcagaacacctgggtggacaccatgtacatcgccaacgacaccatccacgtggccaacaacaccatccaggtggaggaggtgcagtacggcaacttcgacgtgaacatcagcttctacaccagcagcagcttcctgtaccccgtgaccagcagaccctactacgtggacctgaaccaggacctgtacgtgcaggccgagatcctgcacagcgacgccgtgctgaccctgttcgtggacacctgcgtggccagcccctacagcaacgacttcaccagcctgacctacgacctgatcagaagcggctgcgtgagagacgacacctacggcccctacagcagccccagcctgagaatcgccagattcagattcagagccttccacttcctgaacagattccccagcgtgtacctgagatgcaagatggtggtgtgcagagcctacgaccccagcagcagatgctacagaggctgcgtgctgagaagcaagagagacgtgggcagctaccaggagaaggtggacgtggtgctgggccccatccagctgcagaccccccccagaagagaggaggagcccagatag

SEQ ID NO: 335241 - DNA, 7686 bp, Artificial Sequence
  derived and/or modified sequence
tttatagcagcagtagaaatataccaccctagaggacacacctccttttagctaggtacctataaatgtccaggattttctattcaattgagaagaacccagcaaaatggggatctccacagtcatccttgaaatgtgtcttttatggggacaagttctatctacaggtgggtggatcccaaggactacagactacgcttcactgattccctcggaggtgcccttggatccaactgtagcagaaggttctccatttccctcggagtcgaccctggagtcaactgtagcagaaggttctccgatttccttggagtcaaccctggagtcaaccgtagcagaaggttctctgattccctcagagtcaaccctggagtcaactgtagcagaaggatctgattctggtttggccctgaggctggtgaatggagatggcaggtgtcagggccgagtggagatcctataccgaggctcctggggcaccgtgtgtgatgacagctgggacaccaatgatgccaacgtggtctgtaggcagctgggttgtggctgggccatgtcagctccaggaaatgcctggtttggccagggctcaggacccattgccctggatgatgtgcgctgctcaggacacgaatcctacctgtggagctgcccccacaatggctggctctcccataactgtggccatggtgaagatgctggtgttatctgctcagctgcccagcctcagtcaacactcaggccagaaagttggcctgtcaggatatcaccacctgtacccacagaaggatctgaatccagtttggccctgaggctggtgaatggaggcgacaggtgtcgaggccgagtggaggtcctataccgaggctcctggggcaccgtgtgtgatgactactgggacaccaatgatgccaatgtggtctgcaggcagctgggctgtggctgggccatgtcagccccaggaaatgcccagtttggccagggctcaggacccattgtcctggatgatgtgcgctgctcaggacatgagtcctacctgtggagctgcccccacaatggctggctcacccacaactgtggccatagtgaagacgctggtgtcatctgctcagctccccagtcccggccgacacccagcccagatacttggccgacctcacatgcatcaacagcaggacctgaatccagtttggccctgaggctggtgaatggaggtgacaggtgtcagggccgagtggaggtcctataccgaggctcctggggcaccgtgtgtgatgatagctgggacaccagtgacgccaatgtggtctgccggcagctgggctgtggctgggccacgtcagccccaggaaatgcccggtttggccagggttcaggacccattgtcctggatgacgtgcgctgctcaggctatgagtcctacctgtggagctgcccccacaatggctggctctcccataactgtcagcacagtgaagacgctggtgtcatctgctcagctgcccactcctggtcgacgcccagtccagacacgttgccgaccatcaccttacctgcatcgacagtaggatctgaatccagtttggccctgaggctggtgaatggaggtgacaggtgtcagggccgagtggaggtcctataccgaggctcctggggcaccgtgtgtgatgacagctgggacaccaatgatgccaatgtggtctgcaggcagctgggctgtggctgggccatgttggccccaggaaatgcccggtttggtcagggctcaggacccattgtcctggatgacgtgcgctgctcagggaatgagtcctacttgtggagctgcccccacaatggctggctctcccataactgtggccatagtgaagacgctggtgtcatctgctcaggacctgaatccagtttggccctgaggctggtgaatggaggtgacaggtgtcagggccgagtggaggtcctataccgaggctcttggggcaccgtgtgtgatgacagctgggacaccaatgatgccaatgtggtctgcaggcagctgggctgtggctgggccacgtcagccccaggaaatgcccggtttggtcagggctcaggacccattgtcctggatgatgtgcgctgctcaggacatgagtcctacctgtggagctgccccaacaatggctggctctcccacaactgtggccatcatgaagatgctggtgtcatctgctcagctgcccagtcccggtcgacgcccaggccagacacgttgtcgaccatcacgttacctccatcgacagtaggatctgaatccagtttgaccctgaggctggtgaatggaagtgacaggtgtcagggccgagtagaggtcctataccgaggctcctggggcaccgtgtgtgatgacagctgggataccaatgatgccaatgtggtctgcaggcagctgggctgtggctgggccacgtcggccccaggaaatgcccggtttggccagggctcaggacccattgttctggatgatgtgcgctgctcaggacacgagtcctacctgtggagctgcccccacaatggctggctctcccacaactgtggccatcatgaagatgctggtgtcatctgctcagtttcccagtcccggccgacacccagtccagatacttggccgacctcacatgcatcaacagcaggacctgaatccagtttggccctgaggctggtgaatggaggtgacaggtgtcagggccgagtggaggtcctataccgaggctcctggggcaccgtgtgtgatgatagctgggacaccagtgacgccaatgtggtctgccggcagctgggctgtggctgggccacgtcagccccaggaaatgcccggtttggccagggttcaggacccattgtcctggatgacgtgcgctgctcaggctatgagtcctacctgtggagctgcccccacaatggctggctctcccataactgtcagcacagtgaagacgctggtgtcatctgctcagctgcccactcctggtcgacgcccagtccagacacattgccgaccatcaccttgcctgcatcgacagtaggatctgaatccagtttggccctgaggctggtgaatggaggtgacaggtgtcagggccgagtggaggtcctataccaaggctcctggggcaccgtgtgcgatgacagctgggacaccaatgatgccaatgtcgtctgcaggcaactgggctgtggctgggccatgtcagccccaggaaatgcccggtttggtcagggctcaggacccattgtcctggatgatgtgcgctgctcaggacacgagtcttacctgtggagctgcccccacaatggctggctctcccacaactgtggccatagtgaagacgctggtgtcatctgctcagcttcccagtcccggccaacacctagtccagacacttggccaacctcacatgcatcaacagcaggatctgaatccagtttggccctgaggctggtgaatggaggtgacaggtgtcagggccgagtggaggtcctataccgaggctcctggggcaccgtgtgtgatgactactgggacaccaatgatgccaatgtggtttgcaggcagctgggctgtggctgggccatgtcagccccaggaaatgcccggtttggccagggttcaggacccattgtcctggatgatgtgcgctgctcaggacatgagtcctatctgtggagctgcccccacaatggctggctctcccacaactgtggccatcatgaagacgctggtgtcatctgctcagcttcccagtcccagccgacacccagcccagacacttggccaacctcacatgcatcaacagcaggatctgaatccagtttggccctgaggctggtgaatggaggtgacaggtgtcagggccgagtggaggtcctataccgaggctcctggggcaccgtgtgtgatgactactgggacaccaatgatgccaatgtggtttgcaggcagctgggctgtggctgggccacgtcagccccaggaaatgcccggtttggccagggttcaggacccattgtcctggatgatgtgcgctgctcaggacatgagtcctatctgtggagctgcccccacaatggctggctctcccacaactgtggccatcatgaagacgctggtgtcatctgctcagcttcccagtcccagccgacacccagcccagacacttggccaacctcacatgcatcaacagcaggatctgaatccagtttggccctgaggctggtgaatggaggtgacaggtgtcagggccgagtggaggtcctataccgaggctcctggggcaccgtgtgtgatgactactgggacaccaatgatgccaatgtggtttgcaggcagctgggctgtggctgggccacgtcagccccaggaaatgcccggtttggccagggttcaggacccattgtcctggatgatgtgcgctgctcaggacatgagtcctatctgtggagctgcccccacaatggctggctctcccacaactgtggccatcatgaagacgctggtgtcatctgctcagcttcccagtcccagccgacacccagcccagacacttggccaacctctcgtgcatcaacagcaggatctgaatccactttggccctgagactggtgaatggaggtgacaggtgtcgaggccgagtggaggtcctataccaaggctcctggggcaccgtgtgtgatgactactgggacaccaatgatgccaacgtggtctgcaggcagctgggctgtggctgggccatgtcagccccaggaaatgcccagtttggccagggctcaggacccattgtcctggatgatgtgcgctgctcaggacacgagtcttacctgtggagctgcccccacaatggctggctctcccacaactgtggccatcatgaagatgctggtgtcatctgctcagctgctcagtcccagtcaacgcccaggccagatacttggctgaccaccaacttaccggcattgacagtaggatctgaatccagtttggctctgaggctggtgaatggaggtgacaggtgtcgaggccgagtggaggtcctgtatcgaggctcctggggaaccgtgtgtgatgacagctgggacaccaatgatgccaatgtggtctgcaggcagctgggctgtggctgggccatgtcggccccaggaaatgcccggtttggccagggctcaggacccattgtcctggatgatgtgcgctgctcagggaatgagtcctacctgtggagctgcccccacaaaggctggctcacccacaactgtggccatcacgaagacgctggtgtcatctgctcagccacccaaataaattctactacgacagattggtggcatccaacaactacaaccactgcaagaccctcttcaaattgtggtggcttcttattctatgccagtgggacattctccagcccatcctaccctgcatactaccccaacaatgctaagtgtgtttgggaaatagaagtgaattctggttatcgcataaacctgggcttcagtaatctgaaattggaggcacaccataactgcagttttgattatgttgaaatctttgatggatcattgaatagcagtctcctgctggggaaaatctgtaatgataccaggcaaatatttacatcttcttacaaccgaatgaccattcactttcgaagtgacatcagtttccaaaacactggctttttggcttggtataactccttcccaagcgatgccaccttgaggttggtcaatttaaattcatcctatggtctatgtgccgggcgtgtagaaatttaccatggtggcacctgggggacagtttgtgatgactcctggaccattcaggaagctgaggtggtctgcagacagctagggtgtggacgtgcagtttcagcccttggaaatgcatattttggctctggctctggccccatcaccctggacgatgtagagtgctcagggacggaatccactctctggcagtgccggaaccgaggctggttctcccacaactgtaatcatcgtgaagatgctggtgtcatctgctcaggaaaccatctatcgacacctgctccttttctcaacatcacccgtccaaacacagattattcctgcggaggcttcctatcccaaccatcaggggacttttccagcccattctatcccgggaactatccaaacaatgccaagtgtgtgtgggacattgaggtgcaaaacaactaccgtgtgactgtgatcttcagagatgtccagcttgaaggtggctgcaactatgattatattgaagttttcgatggcccctaccgcagttcccctctcattgctcgagtttgtgatggggccagaggctccttcacttcttcctccaacttcatgtccattcgcttcatcagtgaccacagcatcacaaggagagggttccgggctgagtactactccagtccctccaatgacagcaccaacctgctctgtctgccaaatcacatgcaagccagtgtgagcaggagctatctccaatccttgggcttttctgccagtgaccttgtcatttccacctggaatggatactacgagtgtcggccccagataacgccgaacctggtgatattcacaattccctactcaggctgcggcaccttcaagcaggcagacaatgacaccatcgactattccaacttcctcacagcagctgtctcaggtggcatcatcaagaggaggacagacctccgtattcacgtcagctgcagaatgcttcagaacacctgggtcgacaccatgtacattgctaatgacaccatccacgttgctaataacaccatccaggtcgaggaagtccagtatggcaattttgacgtgaacatttccttttatacttcctcatctttcttgtatcctgtgaccagccgcccttactacgtggacctgaaccaggacttgtacgttcaggctgaaatcctccattctgatgctgtactgaccttgtttgtggacacctgcgtggcatcaccatactccaatgacttcacgtctttgacttatgatctaatccggagtggatgcgtgagggatgacacctacggaccctactcctcgccatctcttcgcattgcccgcttccggttcagggccttccacttcctgaaccgcttcccctccgtgtacctgcgttgtaaaatggtggtgtgcagagcgtatgacccctcttcccgctgctaccgaggctgtgtgttgaggtcgaagagggatgtgggctcctaccaggaaaaggtggacgtcgtcctgggtcccatccagctgcagacccccccacgccgagaagaggagcctcggtaggtggtcgctctcagaccccactgtccaccggggcgcagacccctgactcggggacttgggatgttcctcttggtgtcatattccaactcagattgagccctacattgtgctgcacctggtcatacggagttgaatcagacctggttcccgcctcccccaaggctcatggtccttggaggacccgttgcagggtgaggtcaagagagttctgacctggatggcccatagacctgacgtcccagaatccatgcttctcatctgcaaaatgaaaatgtcaatacttacttcttagcactgttgagagggttacttacataaaggaattttggtgaaactgc

SEQ ID NO: 335242 - DNA, 7242 bp, Artificial Sequence
  derived and/or modified sequence
atgggcatttccacagtgatcctggaaatgtgcctgttgtggggccaggtcctgtctactggcggatggattccaaggactactgactacgcaagcctgatcccgtccgaagttcctcttgaccccaccgttgccgaaggcagcccattcccttccgaatccactctggagtccacagtggccgaggggagccccatctcgctcgagtccactcttgaaagtactgtggcggaggggtctctgattccaagcgagagcactctcgagtctaccgtcgcagagggctctgacagtggtttagcactccggttagtgaacggcgacggcaggtgtcagggacgagtcgaaattctgtatcgcggaagttggggcacggtatgcgatgactcctgggatacaaatgacgcgaatgtcgtgtgcagacagctcggctgcgggtgggctatgagtgctcctggtaatgcctggtttggacagggatctgggcccatcgccctggacgatgtgcgttgttccggccacgagagttacctatggagctgcccgcacaacgggtggttgtctcacaattgcggtcacggggaagacgcgggcgtcatctgttccgccgcacaaccacagtccacccttagaccagagtcgtggccagtgcggattagcccacccgtgcccacagagggcagtgagagctctctggccctccgcctcgttaatggcggggataggtgtcgcggtcgagtggaggtactgtatagagggtcctgggggacggtctgtgatgattactgggatacgaacgatgcaaacgtggtgtgccggcagctggggtgcggttgggcgatgtcagctcctgggaatgcgcagttcggacaggggagtggtccaatcgttttagatgatgtacgctgtagtggccacgaaagttatctgtggagctgcccacataacggctggctgacacacaattgtggccacagcgaagatgccggcgtgatctgtagtgccccgcaaagtagacccactccttctcccgatacctggcctacgagccacgccagcactgcaggccctgaatcaagtttagccctgaggctcgtgaacgggggagaccggtgccaagggcgcgtggaagtactttatcgcgggtcctggggcactgtgtgtgatgattcctgggacacgagtgacgcgaacgtggtgtgtaggcagctgggatgtgggtgggccacgagcgcccccggaaatgctcgtttcggacagggctctggtcccattgttttagacgacgtgaggtgttcagggtacgaatcctacctttggagctgtccacacaacggctggctgtcccacaactgccagcactccgaggatgccggagtcatctgtagtgccgcacactcatggtcgactccatcacccgatactctccccacgatcactctccccgccagcaccgtgggcagcgagtctagccttgcactgcggctcgtcaatggtggcgacagatgccagggcagggtcgaagtactttacagagggtcatggggcacggtctgcgacgatagctgggatacaaatgatgccaacgtggtttgtaggcagctcggatgcggatgggccatgttagcacccggtaacgctcgcttcggacagggctcagggcccatagtactggatgacgtgcgatgctccggcaatgagtcctacttatggtcctgcccccacaatggctggctctcgcacaactgcgggcattccgaggatgcgggtgtgatttgttcgggccccgagtcctctttggcgttgagactggtcaatgggggggataggtgccagggcagggtggaggtgctttaccgcggttcgtggggaaccgtctgtgatgatagttgggacaccaatgacgccaatgtggtgtgcaggcagttagggtgcgggtgggctacaagcgcacccgggaatgcacgctttggccagggcagtgggcccatcgtgctggacgacgtcagatgtagcggccacgagtcatacttgtggtcctgcccaaataatgggtggttgtcacataattgcggacatcacgaagacgctggagtgatttgttcagccgcgcagtctaggagtactcctcgacctgatactctgagcaccattaccctccctcccagtactgttggatcagaatcatccctgacactgagactcgtgaatggatcagatagatgccagggccgagtggaagttctttacagagggtcgtggggcacagtctgtgacgattcttgggacactaacgatgcaaatgtggtgtgtcgacagctggggtgtgggtgggcaactagcgccccaggaaacgcccggttcggccagggttccgggcccatcgtgctggatgacgttaggtgcagcggccacgagtcatacctatggtcctgtccgcacaatgggtggcttagccataactgcggccatcatgaggacgccggtgtgatatgttcggtgtctcagtctcgaccaaccccatctcctgatacctggccaacaagccatgccagtaccgcaggtcccgaatcatccttggccctgcgattagtgaacggaggagatagatgtcaggggcgggtagaggtattgtatagaggtagttggggcaccgtctgcgatgacagctgggacactagcgacgccaacgtcgtgtgtcgacaactcggatgtggctgggctacttccgcgcccggcaacgcacggtttgggcagggctctggaccaatcgtgcttgacgatgtgcggtgctcgggctacgagtcctatctgtggagttgcccccataacggatggctttcccataactgtcagcatagcgaagatgctggagtgatctgttctgcagcacactcttggtcgactcctagccccgacacacttcctacaatcacactccctgcttcaaccgttggctctgagtcatcattggcactgaggctggtgaatgggggcgatcggtgccagggtcgagtggaagtactttatcaagggagttgggggacggtgtgtgacgatagctgggacactaacgatgcaaatgtggtttgtcggcagctcgggtgcggttgggcaatgtccgcccctggcaatgctagattcggtcagggctctggtcctattgttctggacgacgttcggtgttccggccatgagagctacctgtggagctgcccacacaacggatggctgagccataactgtggccacagcgaagatgcaggagtaatctgctcagcatcgcagtctagacccacaccatcgcccgacacttggccgacaagccatgctagtactgctggatctgagtccagcctggccttgaggttggtaaatggcggggaccggtgccaaggacgggtagaagtcctttatcggggcagttggggtacagtctgcgacgactattgggacaccaatgatgccaacgtggtctgtcgccaactggggtgtggatgggcgatgtcggctcctggcaacgctagattcgggcagggctcagggcccatcgtccttgatgatgttagatgttccggccacgagtcctatctgtggtcttgcccacataatgggtggttgagccacaactgcggccaccacgaagacgctggcgtaatctgctcggcctcacagtctcaaccgaccccctctccagacacttggccaacaagccacgcttcaactgccggatcagagtcaagcctcgctctccgcttagtaaacggaggcgatagatgccaggggcgggtagaggtcctctacagaggttcttgggggacagtgtgtgacgattattgggacaccaatgacgccaatgtggtgtgccggcaattaggttgtggatgggcaacgtccgcccccggcaacgctcgcttcggacagggatcaggacccatcgtgttggatgatgtccggtgcagcgggcatgaatcctacctgtggtcttgcccccacaacggatggttatctcataactgcggccatcacgaggacgccggtgtgatctgttctgcgagccagtcacagccaacaccctcacccgacacttggcctacttcacatgcctctacagccgggtccgaaagcagtctggcactgcgcctggtcaacgggggagatcgatgccagggaagagtggaggtgctatacaggggctcgtggggaacagtgtgtgacgattattgggacactaacgatgctaacgtcgtgtgccgacagctgggatgtggctgggcaacctctgcacccggaaatgctaggttcggacaggggtctggaccgatcgtgctggatgacgtccgctgctcaggccacgaaagctatctgtggtcgtgtccacataacggctggttgtcgcacaactgcgggcatcatgaggacgctggcgtgatctgctccgcatctcagagtcaacccacccccagccctgatacttggcctacttccagagcctctacagcgggtagcgagtccacgctcgctttgaggctcgtcaacggcggagatcgttgccgcggcagagtggaggtgctatatcagggaagttggggcactgtatgtgacgattattgggacaccaatgatgccaacgtggtgtgccgtcagctgggatgtggctgggcaatgtccgccccgggaaatgcccaattcggacaggggtccggacctattgttctggacgacgtgcgttgcagtgggcacgaatcttatttatggtcttgtccacataacggatggctctctcacaattgcggccaccacgaagatgctggggtcatctgctcggctgcccaaagtcagagcaccccgcggcccgacacctggctgacaactaatttgcctgccttgactgtcgggtctgaatccagtctggctctgcgcctggtgaatggcggtgacagatgtagagggcgggtcgaagtgctataccgcgggtcttgggggacagtgtgcgacgacagttgggacactaatgatgcaaacgttgtgtgtcggcagctgggatgcgggtgggccatgtccgcccctggtaacgctcggttcggccagggatccgggcctattgtccttgatgatgttaggtgtagcgggaacgaatcttacctgtggagttgccctcacaaggggtggctcacacataattgtggccaccatgaggatgctggagtgatctgttcagcaactcagatcaatagtaccacaacagattggtggcatcccacaactaccacaacagcccggccgtcgagtaattgtgggggattccttttttatgcatctgggacattcagcagcccttcctaccctgcatattaccccaataacgctaaatgtgtgtgggagattgaggttaatagcggctatcgcatcaacctgggatttagcaacttaaaacttgaggctcaccataattgcagctttgactacgtagagatttttgatggtagtcttaactccagtctgctgctcgggaagatctgcaatgatacccggcagatctttacttcttcttataacaggatgacgatacattttagaagtgacataagtttccagaatacaggtttcctggcctggtacaatagtttcccttcagatgccaccctccgcctagtgaacctgaactcctcctatgggctttgcgcgggtcgtgtggaaatctatcacgggggaacatgggggactgtatgcgatgattcttggacaattcaggaggcagaggtcgtgtgcagacagctgggatgcgggagggccgtgtctgcacttggtaatgcgtactttgggtcgggctcagggccaattaccctggacgatgtggagtgctccggcaccgaaagcacattatggcagtgtaggaaccggggttggttctcacataactgtaatcatcgagaggacgctggtgtgatttgtagcggaaaccacctgtctacacccgcaccatttctaaacatcaccaggccgaatactgattacagttgcggtggctttctctctcagcccagcggggacttctccagtccgttttaccctggcaactacccgaacaatgcgaaatgcgtgtgggatattgaggttcagaataattatcgggtcaccgtgatctttcgtgatgtacagctggaaggggggtgtaactatgattacattgaggtttttgacgggccatacaggagcagtcctctaatcgctagagtttgtgatggagcgcgggggtctttcacgagtagcagcaactttatgtctattcggttcatcagcgatcattctatcaccaggcgaggcttccgggccgagtactactcctcaccctccaatgactccaccaatctcctgtgcctccccaaccatatgcaggccagtgtgtctcgaagctacctgcagagtcttggctttagcgcatctgatctagtgatttctacttggaatggctactacgaatgcagaccacagattacacctaatctggtcatcttcactatcccttacagcggctgtggaaccttcaagcaagccgacaacgacactatcgactatagcaactttttgaccgcggccgtgagtggcggcattataaagaggcggaccgacctgcggatacatgttagttgtaggatgctgcagaacacctgggtcgatacaatgtatattgcgaacgatacaattcacgtcgctaacaatactatccaggtcgaggaggtgcagtatgggaactttgacgtgaatatctctttttacacctctagtagcttcctgtaccccgtgacttctcgtccttactacgtggatctgaatcaggacctgtacgtccaggctgagatcctccatagcgacgctgttctgactctgttcgtcgacacatgtgtggctagcccctatagcaacgatttcacctcccttacatatgaccttatccggtctgggtgtgtgagggatgacacatatggcccctattcatctccatctctcaggatcgctagattccgctttagagcttttcactttctgaacaggtttccttctgtctacctgaggtgtaagatggttgtctgtcgcgcctacgacccttctagtagatgctaccgtggctgcgtgctgcgctccaagagggatgttggcagctaccaagagaaggtggacgtcgtcctgggaccaatacagctccaaaccccaccccggagagaagaggaacctcggtag

SEQ ID NO: 335243 - DNA, 7242 bp, Artificial Sequence
  derived and/or modified sequence
atgggcatctcgacagtaatcctggagatgtgcctgctttggggacaggtcttgagtaccggaggatggatcccacggactaccgattatgcgtccctgatcccaagtgaggtgccactggatcccacagtcgctgagggctctccctttccttccgagtctactctcgaatccacagtcgcggaaggcagtccaatttccttagagagtacactggagtcaactgtggccgagggctcacttataccttcagagtcgaccctggaatcgacagtggccgaggggtctgacagtggattagcattgcgattagtcaatggcgacgggcgctgtcaagggagagtcgagatcctgtatcgtggatcgtggggaaccgtctgcgatgacagctgggacacaaatgatgcgaacgtagtgtgccggcaactcggatgtgggtgggctatgagcgcccctggcaatgcatggttcggtcagggttctgggcccattgcattggatgatgtgagatgttctggacacgaaagctatttgtggtcatgtccccacaacgggtggctgagccataactgtgggcatggtgaagatgccggcgtgatttgctcagcagcccaaccacagagtacgctacggccagagagctggcccgtgcgaatcagtccaccagttcctacagaagggtctgagtcaagtctcgccttgcggctggtgaatggtggcgaccggtgtcggggacgggttgaggtcttataccggggttcctgggggactgtctgtgacgactactgggataccaatgacgcaaatgtcgtctgccggcagctaggttgcggctgggccatgtcggctcccggcaatgcccaattcggccagggctctggtcccatcgtgctcgacgatgtgcgctgcagtggtcacgaatcgtacctgtggtcctgcccccacaacggctggctgacacacaattgtggtcactctgaagacgccggggtcatttgctcggctccacagtcaaggcccaccccttccccggatacatggcccacctctcatgctagcacagctggacctgaatcaagccttgcgcttcgtctggttaatggcggtgaccgatgccagggccgggtggaagttctttaccgcggatcatggggcacggtttgtgatgactcatgggacaccagcgacgccaacgtagtatgtcggcagctaggttgtggctgggcgaccagcgccccggggaatgccagatttgggcagggttccggcccaattgtgctggacgacgtcagatgctcagggtatgaatcttacctctggagctgtccacacaacgggtggctttcccacaactgccagcattcagaagacgctggtgttatatgcagcgcagcccattcgtggtcaaccccaagccccgacacactgccaactataaccctgccggcttcaacggtgggcagcgagtcaagtctcgccttgcggctcgtaaacggcggtgaccggtgtcaggggcgggtagaagtgctgtacagggggagctgggggacagtgtgtgatgacagttgggacacaaatgacgccaacgtcgtctgtagacagctcggatgcggatgggccatgctggctccagggaacgcccgcttcggccaaggttccggacctatcgttctggatgatgtgagatgcagcggaaacgaatcttacttatggtcatgcccccacaatggttggctatcccacaactgtgggcattctgaggatgcgggagtgatatgtagcggacccgaatcctccttagcactccgactggttaacggtggggaccgctgccaaggcagagtggaagtgctgtatcgaggctcttggggtaccgtctgcgatgatagctgggatacaaatgacgccaacgtcgtgtgtcgacaactgggctgcggctgggccacatcagcccccgggaacgcccgattcggccaggggagtggaccgatcgtcttagacgacgtaagatgtagtggacatgagagctacctgtggtcatgtcccaataatggctggttatctcacaattgtggccaccacgaagacgccggcgtgatttgttccgctgcccagtccagatcaactccccgaccagacaccttgagtactataactcttccaccatcaaccgttggctccgagagcagcttaacgctccggctcgtcaacggctctgacaggtgccaagggcgcgttgaagtactataccgtggcagttggggcacggtatgcgacgattcttgggacactaacgacgcaaacgtcgtttgtagacagttaggatgcggctgggccacatccgcgcctgggaacgctcgcttcggccaaggtagtgggcctatcgttttggacgatgttcgctgttccggccacgagtcatacctttggtcttgcccacacaatggttggctgagccacaattgcggccaccatgaggacgccggcgtgatctgtagtgtgtcccagtctagaccgacaccgagcccggatacctggccaacatcccatgccagtacggctggacctgaatctagtctggcgctccggcttgtgaacgggggagaccgctgccagggacgcgttgaggtgttataccggggttcttggggcactgtgtgtgatgatagttgggacacttcagatgcgaacgtggtttgtcggcaattgggatgcgggtgggctaccagtgcccccggcaacgcgaggttcggccaagggagcggtcctattgtgctggacgacgttagatgtagtggatacgagtcctatttatggtcttgccctcacaacggctggctctcacacaattgtcaacatagcgaggacgcgggtgttatctgtagcgcagcacacagctggtccactccttctcccgacactcttcccaccataacactaccagcctctaccgtgggatccgaatcatccctggctctgcggctggttaatggcggagatcgatgccaaggcagggtagaagtgttatatcaggggtcgtgggggaccgtgtgcgacgactcctgggatacaaatgacgccaacgtcgtctgccggcaattgggatgcggatgggctatgtctgctccaggaaatgctcgctttggtcaaggttctggaccgatcgtattagacgatgtgcgctgctcaggacatgagtcttacctgtggagctgcccacacaacggttggctgtcacacaattgcgggcactccgaggatgccggagtaatctgcagcgcctcccagtctcgtcctaccccaagtcctgacacatggcccacctcacatgcctcgactgccgggagcgagagctctctggccctgaggttagtgaatggaggagacaggtgccaaggacgtgtcgaagtgttgtatcgcggaagttggggcactgtctgtgacgattactgggacacaaatgatgcaaacgtggtctgtcggcagctaggctgtggctgggcaatgagcgcccccgggaacgctaggtttggccagggatcggggcctatagtgttggacgatgtacgctgttccgggcacgaatcatacctgtggtcttgcccgcataacgggtggctgtctcacaactgcggccaccacgaagacgctggcgtgatctgttccgcatctcagtcccagcccactccttcccctgatacatggcccacgtcccacgctagcaccgctggctctgaatcatccctggccctgagactggtcaatgggggggatcgctgccagggacgtgtggaggtgctctaccgtggatcttggggcaccgtttgtgatgactactgggatacaaatgatgctaacgtcgtgtgccgccaattgggctgcggctgggccaccagtgctccagggaacgccagatttggccagggcagtggtcctatcgttttggacgatgtgagatgttccggacacgagtcttacctgtggagctgtccccacaacggctggctgagccataactgtggccaccatgaggatgcaggtgtgatctgcagcgctagccaatctcagcctacaccaagccctgatacctggcctacaagccacgcctctactgcaggttccgaatcaagccttgcgctccggctggttaatggcggtgaccgatgccagggtcgggtcgaagtattataccgcgggagctggggtacagtttgcgacgattattgggacaccaatgacgccaatgttgtttgccggcagttggggtgcggttgggccacgagtgcacccggcaatgctagatttggccagggcagcgggcccattgtgttggacgacgtgcgatgttctggccacgagagctacctctggtcatgcccgcacaacggctggctgagccataactgcggtcaccatgaggacgcaggcgtgatctgttcagcttctcaaagccagccaactccttcccccgatacttggcctacctcccgggcttccacagccggttcagagtccacactggccctgcggctggtgaatgggggcgatcgatgtcgcggacgggtggaagttctctaccagggcagttggggcactgtgtgtgacgattattgggatacaaatgacgccaatgtcgtctgcaggcaactcgggtgcggatgggccatgtcagcccctggtaacgcacaatttgggcaaggcagcggacctatagttctggatgacgttcggtgttcggggcacgagagctacctgtggtcttgtccacacaacggatggctgtcacataactgcggacaccatgaagacgccggcgtgatttgttctgctgcgcagagccaatcgacaccacgtccagatacttggctgacgaccaatctcccggccctgacggtgggatcagagagtagtctggctctgcgtcttgtcaatggcggtgacagatgtaggggccgtgtggaagtgctttaccggggctcatggggcaccgtgtgcgacgactcgtgggataccaacgatgccaacgtcgtctgccgccaactgggctgtggttgggccatgtcggcacctggcaacgcacgcttcgggcagggaagtggtcccattgtgctggatgatgtgaggtgtagcggaaacgagagctacctgtggtcttgcccacacaaaggatggctaacacacaactgtggtcaccatgaagacgctggggtcatctgttccgccactcaaattaattctaccactacagattggtggcatcctaccacaacgactactgctagaccttcctcaaactgcggaggatttctgttctacgccagtggcactttctctagtccctcctaccccgcgtattaccctaataacgcaaagtgcgtgtgggagatagaggtgaactcagggtatcgcataaacttgggcttcagtaacctgaaactggaagcccaccataattgcagctttgattatgtagaaatttttgacggttctttaaacagcagcctcctcctgggcaaaatctgtaacgatactagacagattttcacttcttcctataaccgcatgactatacattttcgtagcgatatatcttttcagaataccggcttcctggcttggtataacagctttccctcagacgctacactccggctagtcaacctgaactccagttacggtctgtgtgcggggagagtggaaatttatcatggcgggacttggggcaccgtgtgtgacgactcatggactatccaggaggccgaggttgtatgtcgccaactgggatgcggccgtgccgtcagtgcccttggcaatgcgtatttcggctcaggctcggggcctattactctagatgatgtcgagtgttctgggactgaatcgacactgtggcagtgccgcaatcgagggtggttttcccacaactgcaatcatagggaagacgcaggggtgatttgtagcggcaaccatcttagcactccagctcccttcttgaatatcacccgcccgaacaccgattatagctgtggcggcttcctgtcacagccaagcggtgattttagctctccattctatcccggaaactatcccaacaatgcaaagtgcgtctgggatatcgaagtgcaaaacaactatcgcgtgaccgtcatatttagggacgttcagctggaaggagggtgcaactacgattatatagaggtatttgatggtccttaccgatcttccccactgattgcccgcgtctgtgacggcgcgaggggatcattcacctcatcctccaatttcatgtcaattaggttcatctcagaccacagtatcacgcggcggggcttcagagccgaatattactcaagtccaagcaacgatagcacaaacctactttgcttacctaaccacatgcaggcatctgtttctagatcatacttgcagtctctgggattctcagcctctgacctggtcatcagtacatggaatggctattatgaatgcagacctcagatcacgcctaacctggtgatcttcaccattccctattccggctgcggcactttcaagcaggccgacaacgacacaatcgactactccaattttcttaccgctgccgtgagtggtggcattattaaacgcagaacagatttacggatccatgtcagctgtcggatgctgcagaatacttgggtggatacaatgtatatcgccaacgacacaatccacgtggctaacaatactatccaggtggaagaggttcaatatggcaatttcgacgtcaatatttccttttacactagcagctcattcctgtatcctgtcacgtcccggccatattacgtggatctcaaccaagatctgtacgtgcaggccgagatccttcatagcgacgccgtgcttacactgttcgtggatacctgtgtagcgtcaccatacagcaacgacttcaccagccttacatatgatttgattcgttctggttgcgtgagggatgatacatacggcccttattcttccccaagcctgcgaatagctcggttccgcttcagagcattccatttcctaaaccggttcccatccgtgtacctgaggtgcaaaatggttgtgtgtcgagcttacgatccgagctcgagatgttataggggatgtgtgctgcgctccaagagagatgtgggcagctaccaagaaaaagttgatgtggtgctgggacctattcagctgcagactcctcctagaagagaagaggagccacggtag

SEQ ID NO: 335244 - DNA, 7242 bp, Artificial Sequence
  derived and/or modified sequence
atgggcattagtaccgtgattttagaaatgtgccttctttggggtcaggtgttatcaactggcggttggataccaaggactaccgactacgcctcactcattccatccgaagtgccattggacccaacagtggctgaaggatccccctttccatcagagtcaacccttgaaagcaccgtcgcagaaggctccccgatcagccttgagagcacgctagaatcaaccgtcgccgaaggtagcctgatcccgtccgagtctacgctagagagcaccgtggccgagggctctgacagcgggctcgctttaagactggtgaacggcgacgggaggtgccagggtagggtagagattctgtatagagggtcatggggtactgtctgcgatgattcgtgggacacaaatgatgcgaatgtggtgtgccgacaactgggctgtggctgggccatgagtgctccaggtaacgcctggttcgggcaaggatcagggccaatcgccttagacgatgtgaggtgttccgggcacgaatcctatctctggagttgtccccataatggctggctttcacataattgtggccatggagaggacgcaggcgttatctgttccgccgcccagccacagagcacattgcggcctgagtcatggcccgtccggatttcacctccagtgcccactgaaggtagtgagagcagtctagcgctgagactcgtcaatggcggcgacaggtgcagaggaagagttgaggtcttatacaggggcagctgggggactgtgtgtgacgactattgggacacaaatgatgctaacgtggtttgtaggcaactcggttgcggatgggctatgtccgcccccggcaacgctcagtttgggcagggctcgggaccaatcgtcttagacgacgtccggtgcagcgggcacgagtcctacctgtggtcctgccctcacaacggatggttgactcataactgtgggcatagcgaggacgcgggggtcatttgcagtgccccccagagtaggccaacgccgtccccagacacatggccgacatctcacgcatccactgccggtccagagtcctctttggctctacgcctggtgaacggaggggacaggtgtcagggacgagtagaagtgttgtacaggggctcttgggggactgtgtgtgatgatagttgggacacgagcgacgctaatgtggtatgccgccagctgggttgcgggtgggccacctcagcccccgggaatgcgaggtttgggcaagggtcaggtcccatcgtcctggatgatgtccgctgtagtgggtatgagagctatttgtggtcatgccctcataatgggtggctctctcacaattgccaacactctgaagatgccggggtcatttgtagtgcagctcactcatggagcacaccaagtcctgatacccttcccaccatcaccttgccggcgagcacagttggctccgagagttccctggcacttcgactggtgaatggtggcgatcgctgccagggaagagttgaggttttatatcgggggtcctggggcaccgtgtgcgatgatagctgggacactaacgatgccaacgtcgtatgtagacagctgggctgtggttgggctatgctggccccgggaaatgcccgcttcggtcagggatctggcccgatcgtgctcgatgacgtgcgctgcagcggcaacgaatcctatctttggagctgtccccataacggctggctgagtcataattgcggccattctgaagacgcgggggtgatatgttctgggcccgaaagctctctggcattgagactggtgaacggcggggatcgctgtcagggccgtgtcgaagtcttatatagggggtcatggggcacagtttgcgacgacagctgggatacgaacgacgcaaatgtggtgtgccggcagcttggctgtgggtgggcgacctccgcgcctggaaacgctcgcttcggtcagggctcagggccaatagtgctcgatgatgtcagatgttcgggtcacgagtcttatctgtggtcctgtcccaataacggctggttgagccacaactgcggtcatcatgaggacgctggggtgatctgttccgcagctcagagccgttcaacgccaagacctgacacgctgagtacgattacactgcccccttccacagtgggctccgagagctccctgacactgcgcctggtaaacgggagcgacaggtgccaagggagagtcgaagtgctgtacaggggaagctggggaaccgtctgcgacgactcttgggatacaaatgacgccaatgttgtttgccgccagctcgggtgcggatgggcaacttcagcccccggaaatgccaggtttgggcagggcagtggacccattgttttagatgacgtgcggtgctcagggcacgaaagttacctgtggtcttgtccacacaatggttggctctcacataactgtggccaccacgaagacgccggcgtgatctgctctgtgagccagagccggccaaccccgagcccagacacttggcctacttcacacgcctcgactgcgggccccgaatcatccctggctctcaggctggtgaatggcggcgacaggtgtcagggcagggtggaggtgctgtaccgaggttcgtggggaacagtgtgcgatgacagctgggacaccagcgacgcgaatgtcgtttgccgacaattaggttgcggttgggctacgagcgctccagggaatgctcgcttcgggcagggctccggaccaatagtgctggacgacgtgagatgtagcggttacgagtcctatctttggtcttgtcctcacaacggctggttgagccataattgtcagcactccgaggatgctggcgtgatttgttctgcagctcattcatggtccacgccatctcctgacacactgccaaccatcactttacccgccagcactgtcggcagcgaatcctcactggcccttaggctggttaacgggggggacagatgccagggccgcgtcgaggtcttataccagggatcttggggcacggtctgtgacgacagctgggatacaaatgacgccaatgtggtgtgtaggcagctgggctgtggttgggcaatgagcgcacccggaaacgcgaggtttgggcaaggatccggtccgatcgtgctggacgacgttaggtgctccgggcatgagagttatttgtggtcttgtccgcataatggttggctgtcccacaactgcggccactcggaggacgctggagtcatctgcagcgcctctcagtcacggcccaccccttctccagatacatggccgacttcgcatgcctcaaccgccggcagcgagagctcactggccctgcgcctcgtgaatgggggagaccgctgtcaaggccgtgtcgaagttttatacagggggtcctggggaacggtctgtgatgactactgggataccaacgacgctaacgtcgtgtgcaggcagctggggtgcgggtgggctatgtccgctcctggcaacgctcgattcggccagggcagcggacctattgtgttagatgatgtcagatgttccggccacgagagctacctctggtcatgtccacacaacggttggctgagtcataactgcggtcatcacgaggacgcaggtgtaatctgcagcgcttcccaaagccagcccacacccagcccagacacttggcctacctcgcatgcctccactgctgggagcgaatcttccctcgccctacgactggtcaacgggggcgataggtgtcagggccgcgttgaagtactgtataggggttcgtggggtaccgtgtgtgacgactactgggacactaacgatgccaacgttgtatgccggcagctgggatgcggttgggcaacgtctgcccccggcaacgccaggtttggtcagggttcgggccctattgtattggacgatgtgcggtgcagcgggcacgaaagctatctgtggtcttgtccacataacgggtggctttcccacaattgtggacatcacgaggatgcaggggtcatctgctcggcttcacaatctcagccaacacccagccctgatacatggcccactagtcatgcaagcaccgcaggatctgagagctcacttgcgctgagacttgtcaatggcggtgatcgctgccaaggaagggtggaagtgctctaccgtgggtcctgggggactgtgtgcgacgattattgggatacaaacgacgccaatgtggtgtgccggcagctgggttgcggatgggcaaccagcgccccagggaacgcccggtttggtcaggggtcaggacccatcgtactggacgatgtaaggtgttccggccatgaatcctatctatggtcctgcccccataacgggtggctcagccacaattgcggccatcacgaagacgcaggtgtgatttgttctgcctcccagtcacagcccacgccatccccagatacctggcccactagtagggcttctacagcaggcagcgaatctactctggcattacggctggtgaacggcggcgatcgttgtaggggccgagtcgaagtcctgtaccaagggtcatgggggaccgtatgcgatgattattgggacactaatgacgcaaacgtcgtgtgccgacagctgggatgcggatgggccatgtctgccccgggtaacgctcagttcgggcagggttccggacccatcgtattagatgacgtgagatgcagtggtcacgaatcgtacctttggagctgtccccacaacgggtggctgtcgcataactgtgggcaccatgaagacgcaggagttatctgctcagccgctcagtctcagtccacgcctcgacccgacacttggttgaccacaaatctgcccgcactgaccgtcggcagcgagtcctccctggccctgaggctggtgaacggaggcgatagatgtagagggcgtgtcgaggttttatacagaggcagttggggaaccgtctgcgatgactcatgggacacgaacgatgcaaatgtcgtatgcagacagctcggatgtgggtgggcaatgagcgccccaggaaacgcacggtttggacagggctcaggtccaatagtgctagatgatgtcaggtgcagtggcaacgagtcatatctgtggagctgcccacataaggggtggctcacccataattgcggccaccacgaagacgcgggggtcatttgcagtgccacacaaattaattcgactacgaccgactggtggcatccaacaaccactaccacggctcggccctcatctaattgcggggggtttttgttttatgccagcggcactttttccagtccaagctatcccgcctattacccaaacaacgcaaagtgcgtgtgggaaatcgaggtgaattcaggatacagaattaacctgggcttctccaacctgaaactggaggcccaccataattgctcctttgactacgtggagatctttgacggctccctgaactcatctctgctactcggcaagatctgtaatgacactagacagatcttcacctcctcctataaccggatgacaattcacttcaggtcagacattagtttccaaaacaccggctttttggcatggtacaattccttcccaagcgatgccacactgcgtctcgtcaatctgaattcctcctatggactgtgcgccggacgagtcgagatctaccacgggggaacctggggaacagtttgcgatgattcttggacgatacaggaggcggaggtcgtgtgccggcagctgggttgtggaagggcagtgtccgctcttggcaatgcttatttcggatcaggcagtggaccaatcactctggacgatgtcgagtgttctggaaccgagtctactctgtggcagtgccgtaacagaggctggtttagccataattgcaaccaccgtgaagatgctggcgtaatctgtagtgggaaccacttatctaccccagcgcctttcttgaacatcactcggccaaacactgactattcctgtggcgggttcctctctcagcctagcggggatttcagtagcccgttctaccctggcaattacccaaacaatgccaagtgcgtctgggacatcgaggtgcagaataattatcgagttaccgtcatctttagggacgtacagctggagggtgggtgtaactatgattatatcgaggtgtttgacgggccttatcggtccagtccacttatagctagagtatgcgacggggcgcggggaagtttcacctcgagcagcaatttcatgagtattcggtttatctcagaccactccatcacccgcaggggcttccgcgcagaatactactccagcccaagtaatgattctactaatttactgtgtctgcccaaccacatgcaggcgagcgtttccagatcctatctgcagtcccttggcttttccgcctctgacctggttatctctacctggaatggatattatgagtgccggccacagataactcctaacctggtcatctttaccattccttattcggggtgcggcaccttcaagcaagcggataacgacacaatcgactattctaacttcctaacggccgccgtatcgggaggtataatcaaacgccgaaccgacctgagaatccacgtttcatgccgcatgttgcagaacacgtgggtggacacgatgtatatcgcaaacgatactattcacgtggcaaataacaccatccaggtggaagaagtgcagtacggcaactttgatgttaacatttccttttatacatctagctcattcctttatccggtcaccagccggccttattacgtagatcttaatcaggacctgtacgttcaagctgagatcctacattcagacgccgtgttaaccttgttcgtggacacctgtgttgcttctccttactccaacgacttcacatctctaacctatgacttgatccgctctggttgcgttagggacgacacatacgggccttattctagccctagccttagaatcgcacgtttcaggtttcgtgctttccacttcctgaatcggtttccaagcgtttacctgcggtgtaagatggtggtgtgtcgcgcgtatgacccaagctcacgatgttaccggggatgcgtgctgcggagcaagcgcgatgttggcagctaccaggagaaagtggacgttgtactgggccctatccagttgcaaacaccccctcgcagggaagaggagcctcggtag

SEQ ID NO: 335245 - DNA, 7242 bp, Artificial Sequence
  derived and/or modified sequence
atggggataagcactgttattctggagatgtgtcttctctggggccaggtgctgtccaccggaggctggatacctcgtacaaccgactacgccagtctaatcccctccgaagtacccctggacccaaccgtagctgagggatcaccattcccatctgaaagcacactggagagcacagtggctgaaggctcacctattagcttagaaagtacccttgaaagtactgtggctgagggctccttaatcccatccgaatcaacactggagtctaccgttgcagagggctctgacagtggtctcgcacttcgactagtgaacggtgacggacggtgtcagggcagggtggaaattctttaccggggctcatggggaacagtctgcgacgacagctgggataccaatgacgccaatgtagtgtgtcgtcagttaggatgcggatgggccatgtccgcccccggcaacgcgtggttcgggcagggctctggtccgatcgcgctagacgatgtgagatgctccggccacgaaagctacctgtggtcatgccctcacaacggctggttgtcccacaattgcggccatggggaggacgccggggtgatttgctctgctgcccagccgcagtcaacgttgcggcctgaaagttggccagttagaatctccccccccgtgccaacagagggctccgagtctagcttggcgctcaggctggtgaacgggggagatagatgtaggggccgcgtagaggtattgtaccggggcagctggggaactgtgtgtgatgattattgggatacgaacgacgccaatgtggtttgcagacagctggggtgtggatgggcaatgtcggcccctggtaacgctcagtttggtcagggcagcgggccgatcgtgctggatgatgtgcgttgttccgggcacgaatcgtatctgtggtcttgtcctcacaatggttggctgactcacaactgtgggcatagtgaggatgccggtgtcatctgttcagccccccagtcgcggccaaccccctctccggacacttggccaacatcacacgcgtcgaccgccggacccgaatcaagcctcgccctcaggctggttaacggcggtgaccggtgccagggccgggtcgaagttttgtacaggggaagctggggcacagtttgtgatgatagttgggatactagtgacgcaaatgtggtgtgtcgtcagctcggctgtgggtgggccacctctgcaccggggaacgcccgctttggccaaggatccggccccatcgtcctcgatgatgtaagatgcagtggctatgaatcctacctgtggagctgtcctcacaacgggtggctgtcccataattgccagcactccgaggatgcaggagtgatctgtagtgcggcccacagttggagcactccaagccctgataccttgccgactatcacactgcccgcctccactgttgggtccgaatcatctctggccctgagactggtaaatggcggtgatagatgtcaggggagagttgaagtcctatatcgaggcagctggggtaccgtatgtgatgacagctgggataccaacgatgctaatgtggtctgcagacagctggggtgcgggtgggcgatgctcgcgcctggaaacgcgagatttgggcagggtagcggtccaatcgtgttggatgacgttcgatgttcaggaaacgaatcgtatctgtggtcttgtccgcacaacgggtggctttcacacaattgtggtcatagtgaagatgctggcgtgatatgctctggccccgagagctcactggctttaaggctggtcaacggtggtgaccggtgtcagggtcgagtagaagtcctttatagggggtcttggggcacagtatgcgatgattcttgggacacgaatgacgccaacgtggtttgccggcagctgggatgcgggtgggccacatcagcgcctggcaacgcacgatttggccagggatctggcccgatagtattggacgatgtgcgatgtagcggccacgagagctatctgtggagttgtccgaataacggatggctctctcacaattgcggacaccacgaggatgccggggtcatctgcagcgccgctcagtctagatcaactcctaggcccgataccctgtccactatcactctacccccctcaaccgtgggatcagagtcgagcctgaccttgcgcttagttaacggctccgatcggtgtcaaggtagggtggaggtgctctatagaggcagctgggggacggtctgtgacgactcgtgggacaccaatgacgctaacgtggtttgtagacagttgggctgcgggtgggcaacaagtgcccccggaaacgcgcgattcggacagggcagtggacccattgtcctggacgacgtcagatgctcaggccatgaatcatatctgtggtcatgccctcacaatggctggctgtctcataattgcgggcaccatgaagatgccggtgtgatctgcagtgtaagccagtcccgcccaaccccatcacccgacacctggccgacatcacacgctagtacagccggccccgaatccagcctcgctcttcgactggtgaatgggggcgatcgttgtcagggccgtgtggaggtcctgtatcgcggcagttggggcacagtgtgcgacgactcatgggacacgtccgacgccaatgtggtgtgccgccagcttgggtgtggatgggctacatctgctccggggaacgctcggtttgggcagggctctggacccattgttctggacgatgtgaggtgttcaggttatgagtcctacctgtggtcctgcccccataatggatggctatcacataactgtcaacattccgaggacgctggggtaatctgttccgcagcccatagttggagcacacccagtccagataccctgcccaccatcacacttcccgcatccacagttggcagcgaatccagcctcgcactgcgacttgtcaatggcggagatcggtgccagggccgcgtcgaggtcttgtaccaaggaagctggggaaccgtgtgcgatgactcctgggacaccaacgacgcaaacgttgtgtgccggcagctgggatgtggctgggctatgagtgccccgggcaatgcgaggtttggacaaggaagcgggccgatagtgctggacgatgtacggtgtagtggccatgagagttacctgtggagctgcccccacaatggatggctgtcccataactgcggccacagcgaggatgcgggggtcatttgctctgcctctcagtctaggcctacaccgtcccccgacacctggcccaccagccatgcctccacggcaggctcagagtcctcattagccttgagactggttaacggcggggaccgatgccaaggtcgcgtggaagttttatatcggggttcatggggcacagtgtgtgatgactattgggacacaaacgatgccaacgtggtgtgccgccagctgggatgtggatgggcaatgtcggcaccgggcaacgctaggtttgggcaagggtcaggccctatcgtcctcgatgacgttagatgcagcggccacgagtcctacctctggagctgcccgcataacggttggcttagccacaattgcggtcaccatgaagacgccggcgtgatctgcagcgcctctcagagtcagcctactcctagcccagacacctggcccactagtcacgcctctaccgcaggctctgagtcctctctggccttgagactggtcaacggtggcgatagatgtcaggggcgggtggaagtgctgtaccgcggctcttggggaacggtgtgtgacgattactgggataccaatgacgctaacgtagtctgtaggcagctgggttgcgggtgggcaacctctgcacctgggaatgctcgcttcggccaggggtccggcccaattgttcttgacgatgtccgctgtagcggccatgagtcctacctgtggtcctgcccccacaacggctggctgagtcataactgcggtcatcacgaggacgccggggttatttgcagcgcctcccagtctcagcctacaccatctcccgatacatggccaacatcacacgcatcaaccgcgggaagtgagtcctctcttgccctgagactcgtgaacgggggtgataggtgtcaggggcgggtagaggtgctgtacagagggagctgggggacggtgtgcgatgactactgggacactaacgacgctaatgttgtgtgtaggcagctgggatgtggatgggcaacatccgctccagggaacgcccgttttggccagggttccgggccaatcgtgctagatgatgtccggtgctcaggccatgaatcatatctatggtcttgcccccacaacggttggttatctcataattgcgggcaccatgaggatgccggcgtcatttgtagtgcttcgcaatcccagcccacgccttcacctgatacctggccgacctcacgcgccagcacagccggctcagagagtacccttgcactgaggctcgtgaacggcggagatcgctgccgcggacgagttgaggtcctttaccagggtagctggggcactgtatgcgatgactattgggatacaaatgatgcgaatgttgtttgtcggcagctcggttgcggatgggcaatgagcgctcctggcaacgcccagttcggacaagggtccggtcccatcgtcctcgacgatgtgcggtgctctgggcatgagtcatatttatggtcatgcccacataatggctggctgagtcacaactgtgggcaccatgaggatgctggcgtgatttgttccgccgctcaaagtcagtcaacaccacggcccgacacatggctgacaaccaacctccctgccctcaccgtcgggtcagaatcttcacttgccctcaggctggtgaacggaggagataggtgtcgaggacgtgttgaggtcctgtacaggggctcctggggcactgtttgcgatgacagctgggatactaacgacgccaatgtggtgtgcaggcaattaggatgcgggtgggcgatgtctgcgcctggtaacgcacggttcggccaaggctccggacctatcgtgttggacgatgtgcggtgcagtggcaacgagtcatacctctggtcatgcccacacaaggggtggctgacacataactgcgggcaccatgaggatgcaggagtcatatgctccgcaacgcaaattaatagcacaacgacagattggtggcatcccacaaccacgacaacggctcgacctagcagtaactgtggagggttcttattctatgcaagtggaaccttttcctctcccagttatcctgcctactatcccaataacgccaagtgtgtctgggagatcgaagtcaacagcgggtaccgcatcaacctggggttcagcaatctgaaactggaggcacaccacaactgtagtttcgattacgtcgagatcttcgacgggagtctaaattccagtttgctgctgggcaaaatctgcaacgacacccgtcagatttttacatccagctataataggatgaccatacacttcagatctgacataagctttcagaacacaggcttcctcgcctggtacaactccttccccagcgacgcaactctcagactggtgaatttaaactcatcttacggactttgtgcgggtcgcgtggagatatatcacggggggacatggggcaccgtatgcgacgactcctggacaattcaagaggccgaggttgtatgtcgtcagttggggtgcgggcgggccgtgtccgctcttggcaacgcctattttggcagcggctctgggccaattaccctggatgacgtagagtgttcagggacggagagtactctatggcagtgccgaaatagaggctggttctcccataattgcaaccacagggaggacgcgggagtcatttgctccggaaatcatttatctacccctgcacccttcctgaacattacacgccccaacaccgattacagctgtgggggatttttgagtcagccatcgggcgatttttcgtctccattttaccccggcaactaccccaataatgctaagtgtgtttgggatattgaggtgcaaaataactaccgagtgaccgtcatctttcgggatgtccagcttgaggggggttgcaactacgattacattgaagtcttcgatggcccctatcggtctagcccgctgatcgcgcgggtgtgtgatggtgctagaggatcttttacgagtagctcaaactttatgagcatcaggttcatctcagatcattccatcacccggaggggattccgggcagagtattactccagtccatcaaacgatagcaccaacttactgtgcttgcctaaccatatgcaggcctctgtgtccagaagttaccttcagagcttgggcttttcagcctccgacctggtaattagtacctggaacgggtactacgagtgccggccgcaaattacgcccaacctagttatcttcaccatcccctatagcgggtgcgggacattcaagcaagcagacaacgatactatagattatagtaacttcctcacagccgctgtgagtggcggaattattaagaggcggactgatttgcgtattcatgtgtcatgcaggatgttgcagaacacgtgggtggacacaatgtatatcgccaacgatacaatccacgtggctaacaacaccatacaggtggaagaagtgcagtacggcaatttcgatgtgaacatttctttctatacatcatcttctttcctgtaccccgttaccagtaggccctactatgtggacctgaatcaagatctttacgtccaggccgagatcttacactccgacgctgttttaaccctttttgtcgatacctgcgtggcttctccctattccaacgacttcactagcttaacctatgacctgatcagatcagggtgcgtgcgggacgacacatacggaccctatagctccccatcgttacggatcgctcgttttaggtttcgcgccttccatttcctaaatcggtttccatctgtgtatctaaggtgcaagatggttgtctgccgtgcatacgacccctcatctaggtgctacaggggatgcgtgcttaggtctaagagagacgtagggagttaccaagagaaggtagatgtcgtgctcggtcctatccagctccagaccccaccccgtcgagaggaagaacccagatag

SEQ ID NO: 335246 - DNA, 7242 bp, Artificial Sequence
  derived and/or modified sequence
atgggtattagtactgtaattcttgaaatgtgtctgctttgggggcaagttctgtcgacaggggggtggatcccccggaccacagactatgcttccctaattccttctgaggtgcccctcgaccccacagtggctgaaggaagccccttcccgagcgagtcaaccttagagtctacagtcgcagaaggctcccccatatcacttgagagcacgctggagagcacagtggctgagggcagcctcataccttctgagtcaacactcgagagtaccgttgctgagggctctgattcgggattggccctacgtctcgtaaatggggacggccgttgccagggcagagtggaaattctctaccgaggatcctgggggaccgtatgtgacgactcatgggatacaaatgatgcaaatgttgtgtgtcgacagctagggtgtggttgggcgatgtctgcccccggcaatgcctggtttggtcagggctcaggacctatcgcgctcgatgatgtgagatgtagtggacacgagtcatatctgtggagctgtccccacaatggttggttatcacataattgtggacacggcgaagatgcaggagtgatctgttccgccgctcagccacagtcaactttgcgcccagaatcctggccagtgcgaatcagtccaccagtgccaacggaaggatccgagtcatcgttggcccttaggttagttaatgggggtgaccgctgtagaggcagggtcgaggtgttgtatcgcggatcatggggaactgtctgtgatgattactgggacaccaacgacgctaatgttgtttgtcgtcagcttggctgcgggtgggccatgagtgctccgggaaatgcccagttcggacaaggaagcggacctattgtgctcgatgatgtgagatgtagtggccatgaaagctatctttggtcatgtccgcacaacggttggctgacacacaactgtggacattctgaggacgccggagtaatttgctccgcccctcaatcccgccctaccccctctcccgatacctggcccacctcccatgcgtcaacggcaggccccgagtcttctttggccctccgcctggtcaacggaggggacagatgtcagggacgggtagaggttctgtaccgtgggtcatggggaaccgtctgcgacgatagttgggacaccagcgacgcaaacgtggtatgccggcagttaggctgcgggtgggcgactagtgctcccggtaatgctaggttcggccaggggagcgggcccattgtccttgacgatgtccgctgcagcggctatgagtcatacctttggtcttgtccgcataacggctggttatcacacaactgccagcacagtgaagacgcaggcgtcatatgctccgctgcccacagttggtccacaccaagccccgatacgctaccaactattacactacctgcatctaccgtcggaagcgagtcaagcctggccctgcgactcgtaaacggcggcgacaggtgccagggccgtgtggaagtgctgtaccgaggttcgtggggaactgtctgtgatgactcctgggatacaaacgacgccaatgtagtctgccggcaactgggctgcggctgggctatgctggccccaggcaacgccagattcgggcagggttctgggccaattgtcctggatgatgtcaggtgctcaggtaacgagagttatctgtggagctgcccccataatggatggctgtcacacaactgcggtcactcagaggatgctggagtcatttgttccggacccgaaagctcgctcgccttgcggctggtaaatggcggcgaccgatgccaaggcagagttgaggtgctatacagaggctcttggggaactgtgtgtgacgactcttgggacaccaacgatgcgaatgtggtgtgtcgccagctgggttgcggttgggctacaagcgctcctggcaatgcacggtttggccaggggtcaggacctatagttctggatgatgttaggtgttccggacatgagtcgtacttgtggtcgtgccccaataacggctggctcagccataactgcggccaccacgaagatgccggtgtgatatgctcggcagcccagtctagatctactccacgcccagacactctctctactattactctgcctccgagcactgtgggtagcgaatccagcctgactctgaggcttgtgaatggctctgacaggtgccagggtagagtcgaggtgctgtaccgtggctcatggggaactgtttgtgatgattcctgggatacaaatgacgccaacgtcgtgtgcagacaactaggttgcggttgggcgacgtcagcgcctggcaatgcacgcttcgggcagggcagcgggcccatcgttttggacgatgtccgttgtagtgggcacgagagttacctgtggagctgcccgcacaatggctggctaagccataattgcggccatcatgaggacgccggagttatatgttcagtgtctcagagccgtcctacaccatcccctgacacctggcctaccagccatgccagcacggctgggcccgaatcctctctagcactgagactggtcaacggcggtgaccggtgccagggaagagttgaagtcctctacagggggagttgggggactgtctgtgatgattcctgggatacatcagacgctaatgtggtctgcagacaactcggctgtggctgggcaacctccgcccctggcaacgccaggtttggccagggaagcggaccaatcgtgctggacgacgtgagatgttctggatacgaaagctatctctggtcatgtccccataacggatggctttctcacaactgccaacacagtgaagatgcaggcgtcatctgttccgccgctcacagttggtcaacaccatccccagacacacttcctaccataacccttcccgctagcacagtggggagtgaatctagtttagctctaagactcgtaaacggtggagatcggtgccaggggcgtgtggaagtgctgtatcagggttcctggggtaccgtttgtgacgatagctgggatacaaatgacgccaacgtcgtgtgcagacaactggggtgcgggtgggccatgagtgcccctgggaatgcgcgctttggtcagggttcagggcccattgtgctggacgacgtgcgctgttcagggcacgaatcctacctgtggtcgtgtccacataacggctggctgagtcataactgtggccatagcgaagatgccggcgtaatttgctcggcttctcaatcaaggcctacaccaagccccgacacttggcccacctcacatgcgtccaccgccggaagtgagagcagcctggccctgcgcctagttaacgggggggaccgatgccagggaagagtcgaggtcttgtaccgtggtagttggggcactgtgtgcgacgattactgggataccaacgacgccaacgtcgtgtgtagacaactggggtgtgggtgggcaatgtctgccccgggaaacgccagatttggacagggttctggccctatagtcctagacgatgtgcggtgttcaggacacgaaagctatctctggtcttgtcctcacaacggctggttgagccacaattgtggtcatcacgaggacgccggcgtgatctgcagcgccagtcaaagccagcccaccccctcccctgacacctggcctacgtcacatgctagcactgcggggtcagagagcagcctcgcgctgcgacttgttaacggcggcgaccggtgccaaggtcgcgtggaggttctgtaccggggtagttggggcactgtgtgtgatgactactgggacactaatgacgccaacgtggtgtgccgacagctgggttgcggctgggccacctcagccccaggaaatgcgaggtttgggcagggatcagggccaatagtgctcgatgatgtgagatgtagcgggcacgaaagttacctgtggtcttgcccacacaatggttggctgagccataactgtgggcatcatgaggatgccggtgttatctgtagtgcgagccaaagtcaaccaactccctcgcccgatacatggccaacctcccatgctagcaccgcaggttccgaatcaagcctggcactgcgtttggtgaacgggggcgatcgctgccagggccgcgttgaagtactctataggggttcttggggaaccgtgtgtgatgactattgggacactaatgatgctaacgtggtgtgtaggcagctcgggtgtggttgggctaccagtgccccgggcaacgctcgatttggacagggttctggccccatcgttctggacgacgttagatgctccggccacgagagctacctttggtcctgtcctcataacggttggctgtcgcacaattgcggacatcatgaagacgccggcgtgatatgctccgcctcgcagagccagcctactccaagcccagacacgtggcccacctctagggcctccaccgccggaagcgaaagtactctggccctgcgtctggtgaacggtggagataggtgcaggggtcgcgttgaagtcctctatcaaggatcgtggggcacagtgtgcgacgactattgggacacaaacgacgcaaacgtggtgtgcaggcaacttggatgcggctgggctatgagtgctcccgggaatgctcagttcggacaggggagcggacccatcgtcctagatgatgtgagatgctctgggcacgagtcgtacctttggtcctgtccacacaatggttggttaagccacaattgtggccatcacgaagacgcaggagtcatctgttctgccgctcagtctcagtcaacccccagaccagatacgtggctgactaccaacttgccagccctcacagtcggcagtgagtcatcccttgcccttaggcttgtgaacggaggcgaccgatgcagaggacgagtggaggtcctgtatcgcggaagctggggcaccgtgtgtgacgatagctgggacacgaatgatgccaatgtcgtgtgtcgccaattaggttgcgggtgggccatgtccgcacctggaaacgccaggtttggtcagggctccgggcccatcgtgctcgatgatgtgcgttgtagcggaaatgaaagctatctctggagctgcccgcacaaaggctggcttactcataattgcggtcatcatgaggatgctggggtgatttgtagcgcgacccagataaattctacgacaacagattggtggcatccgaccactactacaacagctcggccaagctcaaactgtggtggattcttattttatgcttcgggcactttttcgtcacctagctatcctgcctattacccaaacaacgccaaatgcgtctgggagatcgaggtgaactccggctatcgaataaacctaggattttccaatctcaagctcgaggctcaccacaactgctcgttcgattacgtcgagatttttgatggatctctcaacagttcgcttctccttggaaagatctgtaatgacacgagacagatctttacatcttcctacaaccggatgaccatccacttccgatcagacatctctttccagaacacggggttcctcgcatggtacaactccttcccttccgatgccaccctccgccttgtcaacctaaactcatcttacggcctgtgtgccggccgggtagagatctaccatgggggaacctggggaactgtgtgcgacgacagttggaccattcaggaagccgaagtagtgtgtcggcagctcggctgtggacgtgccgtgtccgctctggggaatgcctacttcgggagcgggtctggacccataacactggacgacgttgagtgctccggaacagagagtacactgtggcaatgcagaaatcgcggttggttttcccataactgtaaccatagggaggacgctggcgtgatctgctccggcaatcacttatcaacaccggcgccattcctgaatatcacaagaccaaatactgattacagttgcggaggcttcctgtcacaacctagtggggacttttcctccccgttttacccgggcaactatccaaataacgccaaatgcgtctgggatatagaggtgcaaaacaactatagggtgaccgtaatttttagagacgtacagctggaggggggctgtaattatgactacatcgaagtcttcgatggaccttatagatcatcaccactgatcgcccgggtatgcgatggtgctcggggctcctttacaagctcatccaacttcatgagtatacgattcatctcagatcattccataaccaggcgcgggtttcgtgcagaatattactcaagccctagtaacgactcgactaacctgttatgtctgcctaaccatatgcaggccagcgtcagccgctcttatcttcaaagtctcggctttagcgcatccgacctggtcatatccacatggaacgggtactatgaatgccgcccccagatcacgcctaaccttgtgatatttaccattccctattctggatgcggtacgtttaagcaagctgacaacgacaccattgattatagtaattttctgaccgcagctgtgagtggcggcatcatcaagcggcgcactgatctccgaatccacgttagctgccgaatgttgcagaacacatgggtggacacaatgtatatagccaatgacacgatccatgtggcaaataatacaatacaggtggaagaggtccagtacggaaacttcgacgttaacatctccttttacacctcctcttcatttctgtacccggtgacctccagaccttactatgtggacctgaatcaggacctctacgtccaagctgaaattcttcactcagacgctgtccttaccttgttcgtggacacatgtgtggccagcccctactccaacgactttacatcactaacctatgatctgataaggtcgggatgtgtgcgggatgacacctatgggccatatagcagcccatccttacgcatcgctcgttttagatttagagcttttcacttcttgaacaggtttccaagtgtgtacttgcgctgcaaaatggtggtgtgcagggcctacgaccctagctcccgctgctatcgcggatgcgtcctacggtccaagagggatgtcggctcctatcaagaaaaggtagatgtggtgcttggacccatccagctgcaaactccaccccgaagggaggaagagccaaggtag

SEQ ID NO: 335247 - DNA, 7242 bp, Artificial Sequence
  derived and/or modified sequence
atgggcatcagcaccgtcatcctggagatgtgcctgctgtggggccaggtgctgagcactggaggctggatccccaggaccacagattatgccagcctcatccccagcgaggtgcccctggaccccaccgtggccgagggcagccccttccccagcgagagcaccctggagagcacagtggccgagggcagccccatcagcctggagagcaccctggagagcacagtggccgagggcagcctcatccccagcgagagcaccctggagagcacagtggccgagggcagtgacagcggcctggccctgcggctggtgaatggagatggccgctgccagggccgggtggagatcctgtaccggggctcctggggcaccgtgtgtgatgacagctgggacaccaatgatgccaacgtggtgtgccggcagctgggctgcggctgggccatgtctgcccctggaaatgcctggtttggccagggcagcggccccatcgccctggatgatgtgcgctgcagcggccacgagagctacctgtggagctgcccccacaacggctggctgagccacaactgtggccatggagaagatgctggggtcatctgcagcgctgcccagccccagagcaccctgcggcctgagagctggcctgtgcgcatcagcccccctgtgcccacagagggcagcgagagcagcctggccctgcggctggtgaatggaggagaccgctgccggggccgggtggaggtgctgtaccggggctcctggggcaccgtgtgtgatgactactgggacaccaatgatgccaacgtggtgtgccggcagctgggctgcggctgggccatgtctgcccctggaaatgcccagtttggccagggcagcggccccatcgtgctggatgatgtgcgctgcagcggccacgagagctacctgtggagctgcccccacaacggctggctgacccacaactgtggccacagtgaagatgctggggtcatctgcagcgccccccagagccggcccacccccagcccagacacctggcccaccagccacgccagcacagctggccctgagagcagcctggccctgcggctggtgaatggaggagaccgctgccagggccgggtggaggtgctgtaccggggctcctggggcaccgtgtgtgatgacagctgggacaccagtgatgccaacgtggtgtgccggcagctgggctgcggctgggccaccagcgcccctggaaatgcccgcttcggccagggcagcggccccatcgtgctggatgatgtgcgctgcagcggctatgagagctacctgtggagctgcccccacaacggctggctgagccacaactgccagcacagtgaagatgctggggtcatctgcagcgctgcccacagctggagcacccccagcccagacaccctgcccaccatcaccctgcctgccagcacagtgggcagcgagagcagcctggccctgcggctggtgaatggaggagaccgctgccagggccgggtggaggtgctgtaccggggctcctggggcaccgtgtgtgatgacagctgggacaccaatgatgccaacgtggtgtgccggcagctgggctgcggctgggccatgctggcccctggaaatgccaggtttggccagggcagcggccccatcgtgctggatgatgtgcgctgcagcggaaatgaaagctacctgtggagctgcccccacaacggctggctgagccacaactgtggccacagtgaagatgctggggtcatctgcagcggccctgagagcagcctggccctgcggctggtgaatggaggagaccgctgccagggccgggtggaggtgctgtaccggggctcctggggcaccgtgtgtgatgacagctgggacaccaatgatgccaacgtggtgtgccggcagctgggctgcggctgggccaccagcgcccctggaaatgccaggtttggccagggcagcggccccatcgtgctggatgatgtgcgctgcagcggccacgagagctacctgtggagctgccccaacaacggctggctgagccacaactgtggccaccatgaagatgctggggtcatctgcagcgctgcccagagccgcagcacccccaggccagacaccctgagcaccatcaccctgccccccagcacagtgggcagcgagagcagcctgaccctgcggctggtgaatggaagtgaccgctgccagggccgggtggaggtgctgtaccggggctcctggggcaccgtgtgtgatgacagctgggacaccaatgatgccaacgtggtgtgccggcagctgggctgcggctgggccaccagcgcccctggaaatgcccgcttcggccagggcagcggccccatcgtgctggatgatgtgcgctgcagcggccacgagagctacctgtggagctgcccccacaacggctggctgagccacaactgtggccaccatgaagatgctggggtcatctgcagcgtgtcccagagccggcccacccccagcccagacacctggcccaccagccacgccagcacagctggccctgagagcagcctggccctgcggctggtgaatggaggagaccgctgccagggccgggtggaggtgctgtaccggggctcctggggcaccgtgtgtgatgacagctgggacaccagtgatgccaacgtggtgtgccggcagctgggctgcggctgggccaccagcgcccctggaaatgccaggtttggccagggcagcggccccatcgtgctggatgatgtgcgctgcagcggctatgagagctacctgtggagctgcccccacaacggctggctgagccacaactgccagcacagtgaagatgctggggtcatctgcagcgctgcccacagctggagcacccccagcccagacaccctgcccaccatcaccctgcctgccagcacagtgggcagcgagagcagcctggccctgcggctggtgaatggaggagaccgctgccagggccgggtggaggtgctgtaccagggctcctggggcaccgtgtgtgatgacagctgggacaccaatgatgccaacgtggtgtgccggcagctgggctgcggctgggccatgtctgcccctggaaatgcccgcttcggccagggcagcggccccatcgtgctggatgatgtgcgctgcagcggccacgagagctacctgtggagctgcccccacaacggctggctgagccacaactgtggccacagtgaagatgctggggtcatctgcagcgccagccagagccggcccacccccagcccagacacctggcccaccagccacgccagcacagctggcagcgagagcagcctggccctgcggctggtgaatggaggagaccgctgccagggccgggtggaggtgctgtaccggggctcctggggcaccgtgtgtgatgactactgggacaccaatgatgccaacgtggtgtgccggcagctgggctgcggctgggccatgtctgcccctggaaatgccaggtttggccagggcagcggccccatcgtgctggatgatgtgcgctgcagcggccacgagagctacctgtggagctgcccccacaacggctggctgagccacaactgtggccaccatgaagatgctggggtcatctgcagcgccagccagagccagcccacccccagcccagacacctggcccaccagccacgccagcacagctggcagcgagagcagcctggccctgcggctggtgaatggaggagaccgctgccagggccgggtggaggtgctgtaccggggctcctggggcaccgtgtgtgatgactactgggacaccaatgatgccaacgtggtgtgccggcagctgggctgcggctgggccaccagcgcccctggaaatgcccgcttcggccagggcagcggccccatcgtgctggatgatgtgcgctgcagcggccacgagagctacctgtggagctgcccccacaacggctggctgagccacaactgtggccaccatgaagatgctggggtcatctgcagcgccagccagagccagcccacccccagcccagacacctggcccaccagccacgccagcacagctggcagcgagagcagcctggccctgcggctggtgaatggaggagaccgctgccagggccgggtggaggtgctgtaccggggctcctggggcaccgtgtgtgatgactactgggacaccaatgatgccaacgtggtgtgccggcagctgggctgcggctgggccaccagcgcccctggaaatgccaggtttggccagggcagcggccccatcgtgctggatgatgtgcgctgcagcggccacgagagctacctgtggagctgcccccacaacggctggctgagccacaactgtggccaccatgaagatgctggggtcatctgcagcgccagccagagccagcccacccccagcccagacacctggcccaccagccgggccagcacagctggcagcgagagcaccctggccctgcggctggtgaatggaggagaccgctgccggggccgggtggaggtgctgtaccagggctcctggggcaccgtgtgtgatgactactgggacaccaatgatgccaacgtggtgtgccggcagctgggctgcggctgggccatgtctgcccctggaaatgcccagtttggccagggcagcggccccatcgtgctggatgatgtgcgctgcagcggccacgagagctacctgtggagctgcccccacaacggctggctgagccacaactgtggccaccatgaagatgctggggtcatctgcagcgctgcccagagccagagcacccccaggccagacacctggctgaccaccaacctgcctgccctgactgtgggcagcgagagcagcctggccctgcggctggtgaatggaggagaccgctgccggggccgggtggaggtgctgtaccggggctcctggggcaccgtgtgtgatgacagctgggacaccaatgatgccaacgtggtgtgccggcagctgggctgcggctgggccatgtctgcccctggaaatgccaggtttggccagggcagcggccccatcgtgctggatgatgtgcgctgcagcggaaatgaaagctacctgtggagctgcccccacaagggctggctgacccacaactgtggccaccatgaagatgctggggtcatctgcagcgccacccagatcaacagcaccaccacagactggtggcaccccaccaccaccaccacagcccggcccagcagcaactgtggcggcttcctgttctacgccagcggcaccttcagcagccccagctacccagcctactaccccaacaatgccaagtgtgtgtgggagattgaggtgaacagcggctaccgcatcaacctgggcttcagcaacctgaagctggaggcccaccacaactgcagctttgattatgtggagatctttgatggcagcctgaacagcagcctgctgctgggcaagatctgcaatgacacccggcagatcttcaccagcagctacaacaggatgaccatccacttcagaagtgacatctccttccagaacacaggcttcctggcctggtacaacagcttccccagtgatgccaccctgcggctggtgaacctgaacagcagctatggcctgtgtgccggccgggtggagatctaccatggaggcacctggggcaccgtgtgtgatgacagctggaccatccaggaggccgaggtggtgtgccggcagctgggctgcggccgggctgtgtctgccctgggcaatgcctactttggaagtggcagcggccccatcaccctggatgatgtggagtgcagcggcacagagagcaccctgtggcagtgcaggaacagaggctggttcagccacaactgcaaccacagagaagatgctggggtcatctgcagcggcaaccacctgagcaccccagcccccttcctgaacatcacccggcccaacacagactacagctgtggcggcttcctgagccagcccagcggggacttcagcagccccttctacccaggcaactaccccaacaatgccaagtgtgtgtgggacatcgaggtgcagaacaactacagagtgaccgtcatcttcagagatgtgcagctggagggcggctgcaactatgactacatcgaggtgtttgatggcccctaccgcagcagccccctgattgcccgggtgtgtgatggagcccggggcagcttcaccagcagcagcaacttcatgagcatccgcttcatcagtgaccacagcatcacccggcggggcttccgggcagagtactacagcagccccagcaatgacagcaccaacctgctgtgcctgcccaaccacatgcaggcctctgtgagccgcagctacctgcagagcctgggcttcagcgccagtgacctggtgatcagcacctggaatggctactatgaatgtcggccccagatcacccccaacctggtgatcttcaccatcccctacagcggctgcggcaccttcaagcaggccgacaatgacaccatcgactacagcaacttcctgacagctgctgtgtctgggggcatcatcaagagaagaacagacctgcgcatccacgtgtcctgcaggatgctgcagaacacctgggtggacaccatgtacatcgccaatgacaccatccacgtggccaacaacaccatccaggtggaggaggtgcagtatggcaactttgatgtgaacatctccttctacaccagcagcagcttcctgtaccctgtgaccagccggccctactacgtggacctgaaccaggacctgtatgtgcaggccgagatcctgcacagtgatgctgtgctgaccctgtttgtggacacctgtgtggccagcccctacagcaatgacttcaccagcctgacctatgacctgatccgcagcggctgtgtgagagatgacacctacggcccctacagcagccccagcctgagaattgcccgcttccgcttccgggccttccacttcctgaaccgcttccccagcgtgtacctgcgctgcaagatggtggtgtgccgggcctatgaccccagcagccgctgctaccggggctgtgtgctgcggagcaagagagatgtgggcagctaccaggagaaggtggatgtggtgctgggccccatccagctgcagaccccaccaagaagagaggaggagcccaggtag

SEQ ID NO: 335248 - DNA, 7242 bp, Artificial Sequence
  derived and/or modified sequence
atgggcatcagcaccgtgatcctggagatgtgcctgctgtggggccaggttctctctactggaggatggattcccagaactaccgattatgcctccctgataccttctgaggtgcccctcgatcccaccgtcgcggaaggctcgcctttcccttcagaatcgactctcgaaagtaccgttgcagaaggcagtcccatctcgctcgagtccactcttgagagtacggtggccgaaggatctctgatcccaagcgaatctacgctcgagagcacagtcgccgaggggagtgactccggcctggccctgcggctggttaacggggatggacgctgccagggcagggtagagatcctgtatcgcggcagttggggcaccgtgtgcgatgattcatgggacacaaatgacgccaacgtggtgtgtagacaactgggatgcggctgggccatgtccgcgccaggtaacgcctggttcgggcagggtagcggtccaatcgcactcgacgacgtgaggtgtagtggccacgagagctatctatggagctgtccccataacgggtggttgtcacacaactgcggccatggggaagatgccggcgtaatttgttctgctgcccagccacagtcaacactcaggcccgaatcttggcccgttaggatctccccaccggtgcctactgaaggatccgagtctagtctggccttgaggttggtcaatgggggcgacaggtgtcgcgggcgggtcgaagtgctatacagaggctcatggggtaccgtttgcgacgattactgggacacgaatgacgccaacgtcgtgtgtcggcaattaggatgtggctgggccatgtctgcccctggaaatgcgcaatttggccagggtagtgggcctatcgtgctggatgacgtcagatgtagcggccacgagtcctacctatggtcctgtccccacaatgggtggttgacacacaactgcgggcactccgaggacgctggggtgatttgctcagccccgcagtcccgacctacgccttcgcctgacacctggcccacttcccacgcgagcacagccggacctgaatcgtctctggccctgcgcctagtcaacggcggggacagatgccaggggcgcgtggaggtgctctatagaggtagttggggtacagtttgcgacgacagctgggacacctctgacgctaacgtggtatgtcgacagctgggctgcggctgggccacttcggctcccggcaatgcacggttcgggcagggctcgggccctatcgtgctggatgatgtgcgatgtagcgggtatgagtcttatctgtggagctgtccccacaatgggtggctgagtcataattgtcagcattccgaggatgcgggcgttatttgttcagccgcccactcatggagtacaccatcccccgacacattgccgacgatcactctgcccgcaagcaccgtaggttcggaaagcagtctcgctctgaggctggttaacggtggagaccgctgccagggccgcgtggaggtcctctatagaggtagctgggggacggtctgcgacgacagctgggacactaacgatgccaacgttgtgtgccggcagctcgggtgcggatgggctatgctggcacctggcaacgcccggttcggacagggtagcgggcccatcgtgcttgatgacgtgcgttgttccggcaatgagagctatctgtggtcatgcccccacaatggttggctgagtcacaattgtgggcactcggaagatgctggagtgatatgcagtgggcccgagagctccctggcattgcgcctcgtgaacgggggggatcgatgtcagggaagagtggaggtgctttatcgtggcagttggggaaccgtatgtgatgactcatgggatacaaatgacgccaacgtggtatgcaggcagctgggatgtggatgggccacgtcagctcccggtaacgccagatttggccaaggaagcggtccaattgtcctcgacgacgtcaggtgttctggccacgagagctatctttggagctgccctaacaatggctggttatctcataactgtgggcatcatgaggatgctggcgttatttgctcagcggcccagagccgctccacacctcgtcccgatacattgagtaccatcacactgccaccaagtaccgttggctctgaaagtagtctaacactgcggctcgtcaatggctccgaccggtgtcaggggagagtcgaagtgttgtatagggggagttgggggaccgtctgtgacgactcttgggacaccaatgacgcaaacgtggtgtgtcgtcaactgggatgtgggtgggcaacgtccgctcccggcaatgcccgcttcggacagggcagtggtccaatagtactagacgacgtccgctgcagtggccatgaatcctacctttggtcctgtccacacaatggctggcttagtcacaactgtggccaccacgaagacgcgggtgtcatttgctctgtgtcacagagccgaccaacccccagccccgatacatggcccacttcccatgcctccaccgcgggacccgaaagctccttggccctgcgccttgtaaatggaggcgaccgttgccagggcagggtggaagtgctgtacagaggctcatggggaaccgtctgtgacgactcctgggatacttctgacgctaacgtcgtgtgccggcagctaggctgtggatgggccaccagcgctcctgggaacgcacgcttcggtcagggctccggccctattgttctagatgacgtcaggtgttcaggctacgagagttacttatggtcttgcccacataacggatggttatctcacaactgtcaacacagcgaggacgccggagttatttgtagcgccgcacattcctggtccaccccctcccccgacaccctgccgactatcacactccctgcaagcactgtggggtcagagtcatctctggcgcttagactggttaacggaggagaccggtgccagggccgcgttgaggtcctgtatcagggtagttggggtaccgtatgtgatgattcttgggacactaatgacgctaacgtcgtttgcaggcaattaggctgtggctgggccatgtcagcacctggcaatgcccgattcggccaagggtccggccccatcgttctcgacgacgtcagatgttccggtcatgagtcttacttgtggtcatgtccgcacaacggctggctttcccacaactgcggacactcagaagatgcaggcgtgatttgttccgccagccagagcaggcccactcccagtccagacacctggccaacatcgcacgcatccaccgcgggctccgagtcctcgctggcgcttaggttggtcaatggcggcgacagatgccaaggacgggtggaggttctgtatcgtggatcttggggcactgtatgtgacgattattgggataccaacgatgccaacgtagtgtgccgtcagctaggatgcggatgggccatgtctgctcccggaaatgctagatttggccaggggtctggtcccatcgttctggacgatgtccgctgttctggacacgaaagttacctgtggtcctgccctcacaacggatggctcagtcataattgcggccaccacgaggacgcgggcgttatctgcagcgcgtctcagtctcagccaacgccatcccccgatacctggcctacttcacacgctagtacagccggcagcgaatcaagcttagctctgcggttggtcaacgggggtgataggtgccagggacgcgtcgaagtgttatacagggggtcatggggaactgtctgcgacgactactgggatacaaatgatgctaatgtagtgtgtcggcagctcggttgtggatgggccacctcagcacctggaaacgccagatttgggcagggtagtgggccaatcgtattagatgacgtgagatgcagcgggcatgagtcatacttgtggagctgtccccataacgggtggctgagtcacaattgcggccaccatgaggatgcgggagtgatatgttccgcctctcaaagtcagccgactccttctccagacacttggcctacgagccatgcctccacagccggctccgagagctcactcgctctgcggcttgtaaacggcggcgaccgttgccaggggcgcgttgaggtcctttaccggggatcttggggtactgtctgcgacgattattgggataccaacgatgccaatgtcgtatgtaggcagctgggatgcgggtgggccacctcagccccaggaaacgcacgttttggacagggctctgggcctatcgtgctcgacgacgtcagatgtagtggccacgaaagctatctctggtcctgcccacacaatgggtggctgagtcacaattgcggccaccatgaagatgctggagtgatctgctccgcttctcagtctcagcctaccccatctcccgacacctggccaacctcacgagccagcacggccggatccgaaagcacccttgccctgagacttgtcaatggcggagaccggtgtcggggacgcgtggaggttttgtatcaggggtcttgggggaccgtctgcgatgattattgggacacaaacgacgccaatgtcgtttgcaggcagctcggatgcggctgggccatgtcggcccctgggaatgcacagtttggccaggggagcggcccaattgtgctggacgacgtgcggtgctccggccacgaaagctacttatggagctgtccccataacggatggctcagtcacaattgtggccatcacgaagatgctggcgtgatctgctctgcagctcagtcccagtctactcctcgaccagacacatggctcacaacgaacctgcccgcgctgaccgttggcagtgagtcgtcattagctctaaggttagtgaacggcggagataggtgtagaggcagagttgaagtgttgtacagagggagctggggaaccgtctgcgatgattcttgggacaccaatgatgcgaacgtggtctgcagacaactgggatgtggctgggccatgtccgccccagggaacgcacggtttggacagggttctggacctattgtgctcgatgacgtgcggtgctccggaaatgaatcatacctgtggagctgcccccacaaaggttggttaactcataactgtggtcaccatgaggatgctggcgtcatttgctcagcaacccagatcaattccactaccaccgactggtggcacccaaccaccaccaccactgcacggcccagttctaactgcgggggcttcctgttctacgctagtggaaccttcagcagcccttcctatccggcctactatcccaacaatgccaagtgtgtgtgggagatcgaagtgaattcaggctaccggatcaatcttggtttttccaacctcaaactggaggcccatcataactgctccttcgattacgttgaaatattcgacggctccctgaactcatccctcttgcttggaaagatctgtaatgacaccagacaaattttcacctcatcttacaacagaatgaccattcacttcagatcggacatatcattccagaatacggggtttctggcttggtacaattctttcccctctgacgcgacactgagactagtaaatctgaatagcagctatggcttgtgtgctggcagagttgagatctaccatgggggaacatggggcactgtgtgtgacgacagctggaccattcaggaagctgaagttgtttgccgccagctcgggtgcggtagagccgtttcagcactggggaacgcctacttcggaagcggcagcggcccaatcacactggacgacgtggagtgtagtggcaccgagagtacattgtggcagtgcagaaaccgcgggtggttcagccacaattgcaatcatagggaggacgctggcgttatctgttcggggaatcatctaagcacacctgccccgttcctgaatattactaggccaaatactgattattcatgcggagggttcttaagccaacctagcggcgatttttcatcccccttttaccccggcaattatcccaataacgcaaagtgcgtgtgggatattgaagtccaaaataattatagggtcaccgtgatctttcgcgacgtacagctggaaggcggctgcaattatgactacatcgaagtgttcgatgggccctataggtcttctccactgatagccagagtatgtgatggggctagaggttcattcacctccagcagtaacttcatgagcattcgtttcatttccgatcatagcataacccgccgagggttccgcgccgagtattacagctccccaagcaatgattccacaaatcttctgtgcctccccaaccacatgcaggcctcggtttcaagatcctacctgcagtccttaggcttctcagcgtcagatctagtaataagcacctggaacggttattatgagtgcagacctcaaatcacacccaatctcgtgatcttcactattccgtatagcggctgtggcaccttcaagcaagccgataacgataccattgactacagtaatttcctcacagcggcggtgagcggcggcatcatcaagcgcagaaccgatttgagaattcatgtctcatgccggatgttgcagaacacctgggtggataccatgtatatagctaacgatacgatacacgtggccaataatacaatccaggtggaggaggtccagtatgggaactttgacgtcaacatcagcttctacacctcatcatcttttctctaccccgtgacctctaggccctactacgtggacttaaatcaggacctttacgttcaggctgagattctgcattcggacgcagttctgaccctgttcgtggacacatgcgtggccagtccgtactctaatgacttcacctctctcacatacgatttgattcgctcgggctgtgtgagagacgacacttacgggccgtactccagccccagcctcaggattgcacggtttcgcttcagagcctttcactttctcaacagatttccctccgtttaccttcgatgtaaaatggtcgtctgcagggcctacgatccctcttctcgctgttaccgtggctgtgtgctgcgcagtaagcgagacgtcggcagctaccaggaaaaggttgacgttgtacttggccccatccaactgcagactcctcctcggcgggaggaggagcccagatag

SEQ ID NO: 335249 - DNA, 7242 bp, Artificial Sequence
  derived and/or modified sequence
atgggcatcagcaccgtgatcctggagatgtgcctgctgtggggccaggtcctcagtactgggggatggataccgagaactactgattatgctagcttaattccgtcagaggttcccctagatcccaccgtggccgaaggaagcccttttccatctgaaagtacccttgagagcactgtggcagaaggcagcccaatttctctggagtctaccctggagtcgaccgtggctgaaggttccttaattccatccgaaagtactcttgagtctacagttgctgagggttcagattctggcttggccctgcgcctggtgaacggggatggtcgatgccaaggaagagtggagatcctgtaccggggatcctggggaactgtctgtgatgacagttgggacacaaacgatgctaacgtagtatgcagacagctggggtgtggctgggccatgtcagcgccgggcaatgcctggttcgggcaggggagcggcccaattgctttagatgacgtaaggtgtagcggacatgaatcttacctgtggagctgcccgcataatggatggctgagtcacaattgcgggcacggggaggacgccggcgttatttgcagcgccgctcagccacagtcaaccctgaggccagaatcatggcctgtgcgtatctcgcccccagtacctacagaaggcagcgagtcctccctggcccttaggctggttaacggcggggatcgatgcagggggagggtagaggttctgtatcgaggatcatgggggactgtgtgcgacgattactgggacaccaatgacgctaatgtggtgtgtaggcaattgggatgcgggtgggcaatgtctgcacccgggaacgcacagttcgggcaggggtcagggcccatagtgctggatgacgtccgttgttcaggccacgagtcctacctgtggagttgtccacacaacgggtggctgacccacaattgcggccactcagaggacgctggagtgatttgctcagcaccacaatctcggcccaccccctcccccgacacctggccaacctcccatgcctctaccgcaggaccagaaagttccttagcactgagactggtgaatggaggcgacaggtgtcaagggcgcgtggaagttctgtatagaggatcatggggaactgtgtgtgatgactcttgggatacctctgacgccaacgtggtctgcaggcagctgggttgcggctgggcaacatccgcacccggcaacgcccggttcggacaggggtcgggccctatcgtgttagatgatgtgaggtgtagcggttatgagtcctatctgtggtcctgcccccacaatggttggctgtcgcacaattgccagcacagcgaggacgccggcgttatatgttctgctgctcattcgtggagcaccccttctcccgataccctgccaactattaccctgcccgcttcgacagtcggctccgaatcgtcgctggcccttagacttgtaaacggtggcgataggtgccagggacgagtggaggtgttgtataggggctcatggggtacagtctgtgatgactcctgggacacaaatgatgctaacgtcgtatgtaggcagctgggttgcgggtgggccatgctggcccctggcaacgcccgcttcggacaggggagcggcccaattgtgctcgacgacgtgcgatgttcaggtaacgaaagctacctgtggagttgtccacacaatggttggcttagccataattgtggccactccgaggacgctggtgtgatatgcagcggccccgagtcaagccttgccctgaggctggtaaacgggggggatcggtgtcaggggcgggtcgaagtgctctatagaggaagctggggaacggtgtgtgatgattcatgggacacaaacgatgccaatgtcgtctgccgacaattgggatgcggctgggcaacaagtgctcccggaaacgcaagatttgggcagggcagcgggcccatcgtcttagacgatgtccgctgttcaggccacgagagctatctgtggtcgtgcccgaataatggatggctgtcccacaattgtggacatcatgaggacgctggagttatttgcagtgccgctcagagccgatccaccccaaggccagacacgctgtccacaattaccctccccccgtccaccgtcggttctgaatctagtctcacgcttaggctcgttaacggatcagacaggtgtcagggaagagtggaggtcctgtaccgcggatcttggggtaccgtatgtgatgacagctgggataccaacgatgccaacgtggtgtgccgccagctgggatgcggatgggccacaagtgctcccggcaacgctaggttcggacagggatcaggccctatcgtgctggacgatgtgcgctgctccgggcatgagtcatatttgtggagttgcccccacaacgggtggctctcccacaactgtggtcaccacgaggacgcgggtgttatctgctcggtgtctcagagtagacctactccctctcccgacacctggccgacttcacatgcctccactgctggccctgaatcctcactggctctgaggctggtcaacggcggtgacaggtgccagggcagggtggaggttctatataggggttcttggggaactgtgtgcgatgactcttgggatacgtccgacgcaaatgtggtgtgccggcaactcggatgcgggtgggcgacttccgcaccaggcaatgccaggtttggccagggctcagggccgatcgttctcgatgacgtgcggtgcagtggttatgaaagctatttgtggtcttgtccgcacaatgggtggctgtcacacaattgccagcattctgaggacgctggagtcatatgcagcgccgcacactcatggtccacacctagccccgacaccctccctactatcacacttccggctagcactgtcgggtcagagtctagcctggccctgaggctggttaacgggggcgatcgctgtcaggggagagtcgaggtcctctatcagggtagctggggcacagtctgcgacgacagctgggatactaatgacgccaacgtcgtatgtaggcagctgggctgtggctgggccatgtccgccccagggaatgccagattcggccagggctctgggcctattgtcctcgacgatgtccgatgctccgggcacgaatcttacctgtggtcatgtcctcacaacgggtggttatcacataattgcgggcattccgaggatgctggtgtgatttgctcagcctcgcagagccgaccaacgccttcccccgatacgtggcctacctcgcacgcctcgaccgctggatccgagtctagcctggccctgcgcctggtaaatggaggcgaccgctgtcaaggccgagtagaggttctgtacagaggcagctggggaacagtgtgcgacgactactgggatacaaacgacgccaacgtcgtttgtcggcaactcggctgcgggtgggctatgtcagcccctggaaatgcgaggtttggccaagggtccggccctatcgttctcgatgacgtgaggtgcagcggacatgaaagctacctgtggtcttgtccacacaacggttggttgagtcataattgcgggcaccatgaagatgcgggtgtgatttgctccgcttctcagagccaaccaacgccatcacccgatacttggcccacttcacacgcttctaccgccgggtctgaatcttcattagctctgcgtctggtcaacggaggagacagatgtcaggggcgggtggaggtgctgtaccgtggcagttggggcactgtctgcgacgactattgggataccaacgacgccaatgtggtgtgtaggcagctggggtgtgggtgggctacctctgcacctggcaatgcgaggtttggacaggggagcgggcccatagttctggatgacgtgaggtgttccgggcatgaatcatatctgtggtcctgtccccacaacggttggctgagccacaactgtggtcaccatgaagatgcaggcgtcatttgtagtgcaagccagtcccaaccaacaccttcccctgacacatggccaacatcccacgcaagcacagcagggagcgaaagttccctcgctctgcgattagtgaacggcggggacagatgtcagggtcgggtagaggtcttgtacagagggtcatggggcaccgtctgcgacgactactgggatacaaatgacgcaaatgtggtctgccgccagctgggatgtggctgggctacatctgcacctgggaacgccaggttcgggcaaggcagtggtcctattgtactggacgacgtcaggtgctctggccatgaatcttatctctggtcttgtcctcataacgggtggctatcgcataattgtggccaccacgaggacgcaggagtgatatgttcggcgtcccagtctcagcctacaccaagtcccgatacctggcctacgtccagagccagcacggcaggtagcgaaagcacactcgctctgcgccttgtgaacggcggtgatagatgcaggggtcgcgtggaagtcctgtaccaggggtcctggggtacggtgtgtgatgactattgggatacaaacgatgctaatgtggtgtgcaggcagcttggttgtggttgggccatgtccgccccaggcaacgctcagtttggtcagggaagcggacctatcgtgttggacgacgtgagatgcagcgggcacgaatcgtacctgtggagctgtcctcacaacggttggttgagccacaattgcggacaccatgaggacgctggcgtcatatgttccgctgcgcagtcccagtcaactcctaggccagatacttggctaaccaccaacctcccagcactgaccgtaggcagcgagtctagccttgccctcagattggtgaacggcggagaccgctgcagaggccgggtcgaagtgttgtacaggggaagctggggcacagtttgtgatgactcctgggatacgaatgacgccaatgtcgtgtgtaggcaattgggatgcgggtgggccatgtccgctcccgggaatgctcgcttcgggcaagggagcggaccgattgtgctcgacgatgtgcgttgttctggaaatgaatcgtatctgtggagctgccctcacaagggttggctgacacacaactgcggccaccacgaagacgcaggggttatatgcagcgccactcagatcaacagtacaaccaccgattggtggcacccaactaccaccacgacggctagaccatcctctaactgtggtggcttcctgttctacgccagcggcaccttttcctccccctcttatcccgcgtactacccaaataacgcaaaatgcgtgtgggaaatcgaggttaatagtggctaccgaatcaacttaggcttctcaaacttgaagctggaggctcaccataactgcagcttcgattatgtggagatcttcgatggcagtttgaactcgagtctgcttttgggtaagatctgtaacgacactcgtcagatattcacatcatcttacaatcgtatgacgatccactttagatctgatattagttttcagaacactggttttctcgcttggtacaattcatttcctagcgatgctaccctgagactggtcaatctcaactcctcatatggactgtgtgccggccgcgtcgagatctaccacggagggacatgggggacagtgtgcgatgatagttggacaatccaggaggccgaggtggtctgtaggcagctcggatgcggccgcgctgtctctgcattgggtaacgcatacttcggtagcggaagtggacccatcaccttagatgatgtggaatgtagcggcacggaaagcaccttgtggcaatgtcggaaccgcggttggtttagccacaattgcaatcatagagaggatgctggcgtgatctgctctggtaaccacctctccactccggctccctttctaaacatcacaagacctaacacagactactcgtgcggggggttcttgagccaaccctccggtgacttttctagccctttttaccctggcaactaccccaataatgcaaaatgtgtgtgggacatcgaggttcagaataattatcgtgtgaccgtgattttccgggatgtccagctggagggggggtgcaattatgactatatcgaagtgttcgacggcccctacaggtccagtccgctgatcgcccgcgtgtgcgatggcgcccggggatctttcacctcttcctctaactttatgtctattcgatttatctctgaccactcgataaccagacgaggctttcgcgcagagtattactcgtcaccctcgaacgattcaacgaacctgttatgtctgcccaaccatatgcaggccagcgtgagcagatcttacctccagagcttagggtttagcgccagtgatttagtcatctccacctggaatggatactacgagtgccgtcctcagattactcccaacctcgttatcttcacaattccatattccgggtgcggcacattcaagcaggctgataacgacacgatcgactattcaaacttcttaaccgctgccgtgagtgggggcatcatcaaacgccgaacggatctgagaatccacgtaagttgccgtatgctgcagaacacatgggttgataccatgtacatcgcaaacgacactattcacgtggccaacaacactatacaggtagaggaggtgcagtacgggaattttgatgttaatatcagcttttacacctcctccagcttcttatatcccgtgacatccagaccttactacgtcgacctgaatcaggacttatatgtccaggctgaaattctacactcagatgctgtcttaacattatttgtggatacttgcgtggcctccccctattccaatgattttacatccctgacctacgatctcattagatccggttgtgttagagacgatacatatggaccatatagtagccctagtctgcgtattgcacggttccggtttcgagcctttcacttcttaaatcgattcccatctgtttacctcagatgcaaaatggttgtatgtagagcatacgacccgtctagccgttgctacaggggctgtgtgcttcggtctaaacgagatgttggctcttatcaagaaaaagtggacgtagtgctgggacctatccaattacaaaccccacccagacgagaggaggaacctaggtag

SEQ ID NO: 335250 - DNA, 7242 bp, Artificial Sequence
  derived and/or modified sequence
atgggcatcagcaccgtgatcctggagatgtgcctgctgtggggccaggtgctaagtactgggggatggatccccagaacgacagattatgcctctctcatcccctctgaggtgcccctcgacccaactgttgctgaaggatctccattcccctcggaatcaacactggaatcgactgttgcagagggcagtcctatcagtctggagtctaccctcgaatctacagtggctgagggatcccttattccttctgagagtacccttgagagtaccgtggccgaaggctctgactccgggctggcactccgcttggtgaacggggatggccggtgccagggaagagtggaaatactgtaccgcgggagttggggtacagtgtgtgacgacagctgggataccaatgacgcaaatgtggtgtgccgacaactgggctgtggctgggccatgtctgcccctggaaacgcttggtttggccaaggctccgggcccatcgccctggacgacgttcggtgctccggacacgagtcttacctatggagctgcccacataatggctggctaagccacaactgcgggcatggcgaggacgcaggtgtaatctgtagcgccgcccaaccacaatccactctgcgtcccgagagctggcctgtgaggatttcccccccggtccccactgaaggaagcgaaagtagtctcgctttgcggctcgtaaatggcggcgacagatgtcggggcagagtagaagtgctgtaccgcggaagttgggggactgtgtgcgacgactactgggacaccaacgatgcaaacgtagtttgtcgccaactgggctgtggctgggccatgagcgccccggggaatgcccagtttgggcagggatcaggaccaatcgtgcttgatgatgtgcggtgttctggccacgaaagttacttgtggagttgtcctcacaacggctggctgacacataactgcggtcattccgaggatgccggagttatatgttctgcgccacagagtaggccaacaccaagtcctgacacttggcctaccagtcacgctagcaccgccggcccagagtcatctctggctttgaggctggtcaacggcggtgatcgttgtcaaggaagggtcgaggtgttgtacaggggctcctgggggacagtttgtgacgattcttgggatacaagcgatgccaacgttgtgtgcaggcagctggggtgcggctgggcgacaagtgccccaggtaatgcccgctttgggcagggtagcggtcctatcgtgctggacgacgtgcgctgcagcggctacgagtcttacctctggtcctgtccacacaacggctggctttcccacaattgtcaacactcggaggacgcaggggtaatctgtagcgccgctcacagctggtccaccccttcacctgatacactccctactataactctgccggcttctacggtcggatccgagagttccctagccctgaggttggtgaacggcggagatcgctgtcagggtcgggtcgaggtactgtaccgagggtcatggggtaccgtctgtgacgactcgtgggacactaacgatgcaaatgtggtgtgcagacagttagggtgtggctgggctatgctggctccaggaaatgcccggttcggacagggatccggccccatcgtcctggatgacgtgaggtgtagcggaaacgagtcatacctatggtcttgtcctcataatggctggctgtcacacaactgcggccacagcgaagatgcaggcgtgatctgctcaggccccgagtcatccttggcccttcggctggttaatgggggcgaccgctgccaaggaagagtcgaagtcctttatcggggatcctgggggactgtgtgtgatgattcctgggacaccaatgatgcaaatgtagtctgtagacaattaggctgcgggtgggctacctctgccccagggaatgcacgcttcggacagggcagcggccctatcgtccttgatgacgtcaggtgttccggacatgagagttatctgtggtcctgccccaacaatggttggctcagccataactgcgggcaccatgaagatgctggagtcatctgtagtgccgcgcagagcaggagtacccccagacctgacaccctgagcacaattacactccctccgagtactgtgggtagtgaatcatcactcactctgcggctggttaatggctctgaccgctgccagggcagggtggaggtgttatacagaggctcttggggcactgtttgtgatgactcatgggatacaaatgacgccaatgtcgtgtgcaggcagctcggttgtggctgggccactagcgcgcccggaaatgccaggttcggccagggatcaggacctatagtgctggacgatgtgcgttgtagcgggcatgaaagttacttgtggtcatgtccccacaacgggtggctgtcccacaattgtgggcaccacgaagatgcgggtgtcatttgtagtgtttcccagtccagaccaaccccatccccagacacatggccaaccagccacgcctcaacagccgggccagaatcttcactcgccttgcggttagttaacgggggcgaccgctgccaaggccgagtggaggtgctttatcgtgggtcctggggcaccgtctgcgatgatagctgggacacatccgacgcaaatgtggtttgccgacagttagggtgcggatgggccacctccgctccaggcaatgcaagatttgggcagggcagtggtccaatcgtactcgatgacgtccgttgctctgggtacgagtcttacctctggtcttgcccacacaacgggtggctgtcacataattgccagcactccgaggatgcaggagtgatctgttcagcggcccacagttggtcaacaccttcccccgacactctgccgacaatcaccctgccggccagcacagtgggatccgaatcgtccctcgccctgcgtttagtgaacgggggggaccgctgtcaaggaagagtggaagtgctctatcagggcagctggggcaccgtctgcgatgacagttgggatacgaacgacgcaaacgttgtctgcagacaactgggctgcggttgggccatgtctgcgccaggaaatgcacgttttggccagggatctggccccattgttcttgatgatgttaggtgttctggccatgagagctacctctggagctgtccacataatggatggctgtctcataattgcggacacagcgaagatgctggcgtcatctgcagcgctagccaatcccggcctacaccatcccccgatacgtggcctaccagccatgcaagcaccgcaggctccgagagcagcctggctctaagactcgtgaatggaggagatagatgccagggccgcgtggaagtactttaccgcggatcatggggaactgtttgcgacgattattgggacactaacgacgccaatgtggtgtgccgtcaactgggctgcggctgggctatgagcgcaccggggaacgcacgctttggacagggctcaggtcccatcgtgctggacgatgtcaggtgtagtgggcatgaatcgtatttgtggagttgtccacacaatgggtggctctcccacaattgtggccatcacgaagatgccggggtgatctgttctgctagccaatcccagcccactccctctcccgacacatggccgacttctcatgccagcacagctggatctgagagcagtctggccttaaggctggttaacggcggcgatcggtgccaggggcgagtcgaggtactctaccggggttcctgggggactgtgtgtgatgattattgggacactaatgatgccaatgtcgtgtgcaggcagctcggctgtgggtgggcaacctccgccccggggaatgcaagatttggacaagggagcgggcctatagtgctggacgatgtgcgatgctcaggtcatgagagctacctgtggtcatgccctcacaatgggtggttgtcccataactgtggacaccacgaggacgcaggtgtaatctgttctgcctctcagtcacagccaacccccagccctgacacctggcctacatctcacgcttctactgccggcagtgagtcttccctggctttgcgcttggtaaatggaggcgacaggtgtcagggacgagtggaggtgctgtaccgcggatcttggggcacggtttgcgacgattattgggataccaacgacgccaacgtcgtctgtagacagctgggctgcggttgggcgacatccgctcctggcaatgctcgctttggacagggatccggacccatagtactggacgatgtgcggtgcagtgggcatgagagttatctctggtcatgtccccataatggctggttatctcacaattgtggccatcatgaggacgccggggttatttgttccgcatcacagtctcaaccgactccttcacctgatacctggcctactagcagggcctctactgccggttccgagagcacactcgccttgagactggttaacggtggagacagatgtagaggcagagtagaagtcttgtatcaggggtcgtgggggacagtttgcgacgattactgggacacaaatgatgcaaatgtcgtgtgtagacaactcggatgcggatgggccatgagcgccccaggaaacgcgcaatttggccaaggaagtgggcctatcgtcctggatgacgttcggtgcagcgggcatgagtcctacctgtggtcctgtccacataacggctggctctcacacaattgcggccatcatgaggatgccggggtgatctgttctgccgcacaaagtcagtcaaccccacggcccgacacatggttgacaacaaatctgccagctctgaccgtagggtctgaatctagtctcgctctgaggctcgtcaatggtggagatcgatgcaggggcagggttgaggtcctctataggggaagctgggggacagtgtgcgacgattcctgggatacaaatgacgccaacgtggtttgtagacagctcggatgcggctgggcaatgagcgccccaggcaacgcgcgtttcggacaagggtctggaccgattgtgctggatgacgtgcgctgcagcggcaacgagagctacctgtggtcgtgccctcataaaggctggcttacgcacaactgtggccatcacgaggatgctggtgttatctgtagcgccactcagatcaactcgacaacaacagactggtggcatcccaccacaaccactacagccagacccagctcaaattgtggaggattcttgttctacgccagtggcactttctcatccccatcttatcctgcatactatccgaataacgcaaaatgcgtgtgggagattgaggtcaattccggctacaggattaatttgggcttttccaatttaaaattggaagctcatcataattgcagtttcgactacgtagagatttttgatggaagtttgaattccagcttgctgctgggcaaaatctgcaacgatacccggcagatttttacctcatcctacaataggatgaccattcacttccgaagcgacatctccttccaaaatactgggttcctggcgtggtacaactcctttccatctgatgctacattgcggctcgtgaatttgaactcatcctatggcctttgcgccggacgggtggaaatataccacggcggcacctggggcacagtgtgcgacgactcttggaccatccaggaggccgaggtggtgtgcaggcagttagggtgcggccgcgcagttagtgctttggggaatgcttacttcgggtctggtagtggacccataacgctggacgatgtagagtgtagcggcactgagagcaccctgtggcagtgcagaaaccgagggtggttctcacataactgcaaccatagagaggatgccggcgttatctgttctggaaaccacctgtcaacccctgcaccttttcttaacattacccggccgaacaccgactacagctgcggaggttttctgtcacagccaagtggagatttctccagcccattctatccaggaaactatcccaataatgcaaaatgtgtctgggatatcgaggtgcaaaacaactaccgggtcaccgtgattttcagggacgtccagctggaagggggatgtaactacgattacattgaagtgtttgacggcccctaccggtccagcccactgatcgctagagtgtgcgatggcgctagggggtcattcacgtcttcttccaattttatgtccatcaggtttatcagcgaccatagtatcacccggaggggatttcgtgcagagtattactcctccccaagtaacgattctactaacctgctatgcttgcctaatcatatgcaggcctccgtgtcaagaagctaccttcaatccctggggttctctgcctctgacctggttatcagcacgtggaacggatattacgaatgtaggcctcagattacccctaatctcgtcatctttactattccctattctgggtgcgggactttcaagcaagccgacaatgatactatcgattacagcaactttctgacagcggcagtgagtggcggaatcatcaagcgcagaacagacctgagaattcatgtgagctgtagaatgctgcaaaacacttgggtggatacaatgtacatcgcaaatgacaccattcacgtggccaataacactatccaagtagaggaagtgcagtacggcaatttcgatgttaacattagcttttacacaagcagctcatttctttaccccgtgacatcacgaccatattatgtcgatctgaatcaagatctgtacgtgcaagcggagatcttgcactcagacgcggtgctgacactgtttgtcgacacttgtgtggcatccccgtacagcaatgattttacaagcctgacatacgaccttatcagaagcggctgcgttagagacgatacttacggcccatattcttcaccgtcattgagaattgcccgttttaggtttcgagcgttccatttcctcaacaggttcccaagcgtatatctgcgctgcaaaatggtggtttgccgggcatatgatcctagttccaggtgctaccgcgggtgtgtcctcagatctaagcgcgatgtagggagctatcaggaaaaagtcgacgtcgtgttagggcccattcaactgcagacaccaccacggcgcgaagaggagccgaggtag

SEQ ID NO: 335251 - DNA, 7242 bp, Artificial Sequence
  derived and/or modified sequence
atgggcatcagcaccgtgatcctggagatgtgcctgctgtggggccaggtgctatctactggtggttggatcccccgcacaacagactacgcgtctctgatcccctccgaagtgccactggatcctactgtggcagaagggagccccttcccatcagagtccaccctggagtcaacagtcgccgaaggctccccaatctctttagagtcaaccctggaaagtaccgtggctgagggttcactgattccatctgaatctaccttggaatccacggttgccgaagggtctgatagcggactggcgctgagactggttaacggagatggtcgctgccagggccgggtggaaatactctatagaggatcctggggcacagtctgcgacgatagctgggacactaacgatgccaacgtagtctgtcgccagttgggatgtggatgggccatgtccgcccctggcaacgcctggtttggtcagggctccggccctattgcacttgacgacgtgcgatgtagcggccacgaaagctacttgtggagctgtccacataatggatggctttcacataactgcggacacggcgaggatgctggagtcatttgctccgcagctcagccacagtccaccctgcgccccgagtcgtggcccgtgagaatatccccccctgtccctaccgagggctctgaaagctcacttgcactgagactcgtgaacgggggagatagatgccggggccgggtagaggtcctatatcgaggcagctggggcaccgtgtgtgacgactattgggataccaatgacgccaacgtggtatgtagacagcttggttgcggatgggctatgagcgctccggggaatgcccagtttggccagggcagcggacccatagttctggatgatgttaggtgttccggacatgaaagctacctgtggagctgcccacacaatggttggttgacccacaactgcggacattctgaggatgctggggtcatttgttctgcacctcaatctcgaccaacccccagtccggacacttggcctacttcccatgctagcactgcagggcccgaaagcagcttggcacttcgattagtcaatgggggggataggtgccagggcagggtggaggtgttatatcgcggcagctggggcacagtgtgcgacgatagttgggatacctctgatgctaacgttgtatgccggcagttgggatgcgggtgggcgacctctgcccccggcaacgcccgattcggacaaggcagtgggcccattgtgctcgacgatgtccggtgtagcgggtacgaatcctacctgtggtcgtgcccccataacggttggctatcacacaactgccagcattccgaagacgccggagtgatctgctccgccgcacattcttggagcaccccctccccagacactctaccaacgatcactttgcctgctagtactgtgggatccgagagctccctggccctaaggctggtcaacggaggggaccgctgtcaagggagagtagaggttctgtatcgaggtagttgggggaccgtatgcgacgatagctgggacactaacgatgcaaacgtcgtttgtagacaactcgggtgtgggtgggcgatgctcgcccccgggaatgccaggttcggacaagggtccggccctatcgtgctggacgacgtcaggtgttctggcaatgagtcctatctgtggtcctgtcctcataatgggtggctgtcccacaactgcggacactccgaggacgccggcgttatatgttccggaccagagtcatccttggccctgcggctggtcaacgggggggacagatgccaggggagagttgaagttttgtaccgcgggtcatgggggacggtttgtgatgattcctgggacaccaacgacgcgaatgtagtgtgtcggcagctcggttgtgggtgggctactagcgcacctgggaacgctagatttggtcagggtagcggacccattgtcctagacgacgttcggtgctcaggacacgaaagctatctatggtcatgtccaaacaatgggtggctttctcacaattgcggccaccatgaggatgcaggcgtgatctgctcagccgcgcagtcacgcagcaccccacgtccagatactttatcgaccattacgttgccacccagcaccgttggttctgagagtagccttaccctcaggctggtcaacggatcggatcgctgtcagggaagggtcgaggtattgtaccgagggtcttgggggaccgtgtgcgacgactcgtgggataccaatgacgcaaacgtagtatgccggcaacttgggtgcgggtgggctacgtcagccccaggaaatgccaggttcgggcagggctcaggcccaatcgtcctggacgacgttcgctgcagtggtcacgagagttatctgtggtcctgtccccacaacggatggctgtcacacaactgtggccaccacgaggatgcaggtgtgatttgctcagtgtcccagtcacgccccacaccaagccccgacacctggcctacatctcacgcctctactgcaggccccgaatcgtcactggctcttagactggtcaacgggggcgatcgatgtcaagggagagtcgaggttctgtaccgaggctcctggggtaccgtctgcgatgactcatgggatacctccgacgcgaacgttgtgtgtagacaactgggatgcgggtgggcgacgtcagcccccgggaatgcaaggtttggacaggggagcgggcccatcgtgctggatgatgtgaggtgctctgggtacgagagctatttgtggagctgtcctcataacggatggttgtcccataactgtcagcacagcgaagacgctggcgtgatctgctctgcagcacatagctggtctaccccaagtcctgataccctgcctacgattacactgccagcatcaacagttggcagcgagagctccctggctctgaggctggtgaacggcggagaccggtgtcagggaagagttgaggtgctataccagggatcctgggggaccgtgtgcgacgactcctgggatacgaatgatgctaacgttgtctgccgacaactcggctgcggctgggcgatgagtgccccaggaaatgctcgctttgggcaggggagcggccctatcgtgctggacgacgtccggtgttccggacacgaatcatatctgtggagctgccctcacaacggatggctgtcacataattgcggtcactcagaggacgcaggggtcatatgcagcgcttctcaatcgagacccaccccatctccggatacctggcccacaagccacgcaagcaccgccggcagtgagtccagcctggctctgcgattggtcaatggaggggataggtgccagggaagagtggaggtcctttatcggggcagttggggaacagtgtgcgatgattactgggataccaatgacgcaaacgtagtgtgtaggcagcttggctgcggatgggccatgagtgcccccggaaacgcccggtttggtcagggcagcgggccgattgtcctcgacgatgtgagatgtagtggccatgaatcttatttatggagctgcccacataatggttggctgtcgcacaattgcgggcatcacgaggacgctggagttatatgctctgcttcccagagtcaacccactccgtcccctgatacctggccaacctcacatgctagtaccgcgggctcagaatcttctctggctctgcgcctggttaacggtggcgaccgatgtcagggaagagtggaggttctataccggggtagttgggggacagtgtgtgatgactactgggataccaatgatgctaacgtcgtatgtaggcagctcggctgcggatgggccacaagcgcaccagggaatgcccgtttcggacagggaagcggacccattgtcttggatgatgtgagatgcagcggtcatgagtcgtacctgtggtcctgcccacacaacggatggctttctcacaactgcggccaccacgaggacgcgggggtgatatgcagtgcatcacaatctcagcccacgccttcccctgacacctggcctacttcacacgcctcaacagccggttctgagtcaagccttgcccttcgtctggtcaacggcggcgacaggtgccaggggcgcgtcgaggtgctctaccgcggaagctggggaacagtgtgtgacgattattgggacaccaatgacgccaatgtggtgtgccgacagttggggtgcggatgggctacgtcagcacccgggaatgcaaggttcggacagggctccgggcctatcgttctcgacgatgtaaggtgctctggacatgagtcttacctttggtcctgtccacacaacggttggctgagccataactgtggtcaccacgaggatgctggagtcatatgtagcgcctcccagagtcagcccacccctagccccgatacctggcccacatctcgagcttctactgccggctcggagtctaccctagccttacgcctagtgaatggaggagatcgctgtcgaggcagagtcgaagttctctatcaggggtcttggggaacggtttgtgacgattattgggacaccaatgacgcaaatgtggtttgtaggcagctaggctgtggatgggcaatgtccgcacctggaaacgcacagtttggtcagggttccgggcctatcgttctagacgacgtcaggtgtagcggtcatgaatcctatctctggagttgccctcataatggttggctgtcgcacaattgtgggcatcatgaagacgctggtgtcatatgcagtgccgcccagagtcaaagtacaccccggcctgatacttggctgaccaccaacctgcccgccctgacagtgggttcggagtcctcccttgctttgaggctggttaacggaggagaccgctgtagaggtagggtcgaagtcctgtatagaggatcctggggtacggtgtgtgacgattcatgggatacaaatgacgccaacgtagtgtgccgtcagctgggttgtgggtgggccatgtcagccccagggaacgcgcgattcggtcaggggagcgggcctatcgtgctcgacgatgtgcggtgttcaggcaacgagtcctacctgtggtcttgcccccacaaaggatggctgacccacaattgcggacatcatgaggacgccggggtgatctgtagcgcaactcagattaactctactaccactgattggtggcaccccacaactacaaccactgcacgccccagctcaaattgtggtggttttctgttttacgccagtggaacattctcgtcaccgtcgtaccccgcttactatcctaacaacgccaaatgcgtgtgggagatcgaagtgaatagcggatatcgaatcaatctcggcttctccaaccttaagctggaggcgcaccacaattgttctttcgactatgtcgagattttcgacgggtccctaaattcctctctgttgttgggtaaaatctgtaatgacactaggcagatatttacttccagttacaataggatgaccatccattttcgctccgatataagttttcaaaatactggcttcctggcatggtacaatagtttcccgtcagatgccacgttaagactcgtcaacttgaatagcagctacggtctgtgcgccggtagagttgagatctaccatgggggtacctggggaaccgtgtgtgatgattcatggacaatccaggaggcggaagtggtgtgccgtcagctagggtgcgggcgggcagtgtcagctctgggtaatgcatactttggatccggaagcggacctatcacccttgatgatgttgagtgctctggcaccgagtcgactctgtggcagtgccgtaatagaggttggttcagccacaattgtaatcatagagaggatgcgggggtgatatgctcaggaaatcatctctctaccccagcccccttcctcaacatcactcgaccgaataccgactatagttgcggcggtttcctgtcccagccgagcggggacttttcctctcccttctatcccggaaattaccctaacaacgctaagtgtgtctgggacatagaagtgcagaacaattacagagttacggtcatctttagagatgtacagctcgaaggagggtgcaactatgattacatcgaggtttttgatggtccatacagatccagccctctgattgcacgagtttgcgatggcgcccgcgggagcttcacttctagctctaactttatgtccattcgttttatttccgatcatagtatcacccgacgaggatttagagccgagtattattcctctccatctaatgattccactaatctgctctgcctccctaatcatatgcaggccagtgtgagccgaagctacttgcagtcactgggtttctctgcttctgacctggtcatctcaacatggaacgggtactatgagtgccgaccacagattacccctaatttggtgatcttcaccattccttacagtggatgtggaacctttaaacaggctgataatgataccattgattattctaactttttaaccgcagctgttagcggtggcattatcaagcggcgcaccgatctgcgtattcacgttagttgtcgcatgctgcagaacacttgggttgacacgatgtatattgcaaatgacaccattcacgttgccaacaatactatacaggtggaggaggtgcagtatggcaactttgatgtcaacattagtttttatacatcctcaagtttcttgtatccagtcacctctcgtccttactacgtagacctcaaccaggacttatacgtccaggcagagatccttcattcagatgcggtactgacactgtttgtcgacacttgcgttgctagcccctatagcaatgacttcacttcactcacctacgaccttatacgctctgggtgcgtgagggacgatacctacgggccttatagctccccaagtctgcggattgcccgtttccgttttcgcgccttccacttcctgaatcgcttcccaagcgtctatttgcggtgcaaaatggtggtgtgcagggcatatgatccttcctccaggtgctatagggggtgcgtccttcgctctaaaagggatgttggttcttatcaggagaaggtggatgtggtcctgggccctatccagttgcagacccccccaagaagagaggaagagccgagatag

SEQ ID NO: 335252 - DNA, 7242 bp, Artificial Sequence
  derived and/or modified sequence
atgggcatcagcaccgtgatcctggagatgtgcctgctgtggggccaggtgttgagcaccggcgggtggatcccgcgaaccactgactatgcttccttgattcccagcgaggttccccttgaccctacggtagcggagggctctccctttcctagtgaaagcacccttgagagcaccgtcgctgagggaagcccaattagcctggagtctactctcgagagcacggtcgccgaaggtagtcttataccttcagagtccacactcgagagcaccgttgcagagggttctgactccgggctggcactacggctggtgaacggagacggacggtgtcagggccgggtggaaatactgtaccgggggagttggggcacagtttgtgacgactcctgggacacgaacgacgccaacgtggtgtgtagacagttggggtgcgggtgggccatgagcgcgcccggcaacgcctggttcggtcagggctctggcccgatcgctctggatgatgtccgctgtagtggacatgagtcctacctgtggtcctgcccgcacaatggatggctgagtcataactgtgggcacggtgaagatgcgggtgtgatctgcagcgccgcacagccccaatccaccctgcgacccgagtcctggcccgtgcggatctccccgccagtgccaactgagggtagtgagtcttcacttgccctgcggctggtaaatgggggggacagatgtcgtgggagggtggaggtcctatatcgcggatcgtggggtactgtgtgcgacgactattgggatactaacgatgcaaacgtcgtgtgccgacaattaggctgcggttgggcaatgtcagcccctggaaatgcccaattcgggcagggcagtgggcccattgtgctggatgacgtccggtgctcggggcacgagtcttatctatggtcgtgtccccacaacggatggctgacacacaactgtggccattctgaggacgccggggttatctgttcagcgccacagagcagaccaactccctcgccggatacgtggccaactagccacgcgtctactgccggcccggagtcttcattagcactgcggttggtgaatggaggtgacaggtgccagggacgggtagaggtactatacaggggatcttgggggaccgtctgtgacgattcctgggacacctcagacgccaatgttgtttgtcggcagctgggctgtggatgggcaacctcagcgcctggtaacgctcgctttggacaggggtccggacctattgtcctcgacgacgtaagatgttccggttacgagagttatctgtggtcctgtccccacaacggttggctgtcccacaattgtcagcactcggaagatgccggcgtgatatgcagcgctgctcactcctggtcaacccctagtcctgatacacttccaaccattacgttaccagctagtaccgtgggctccgagagtagcctggccctgcgactggtcaacggcggagaccgctgccagggacgcgtggaagttttgtaccgcggatcctgggggacagtatgtgacgattcttgggacacaaacgacgccaatgtcgtttgcaggcagctgggatgcggatgggccatgctggccccaggaaacgctcgattcggacagggatcaggtcccatagtcctagatgacgttcgctgctctgggaatgaatcttacctttggtcttgtccacataatggatggctgagccacaactgcggtcacagtgaggatgccggggtgatctgcagcggccctgaaagcagcctagccctccgactggtcaatggcggcgacagatgtcaggggcgggtggaggtgctttatagaggatcctggggcaccgtgtgcgatgatagctgggatacgaacgatgctaacgtagtgtgccgacagctgggttgcggctgggccacaagtgcccctgggaacgctaggtttggtcagggttccggccctatagtgttggacgacgtacgatgttcaggccatgagtcttacttgtggagttgcccgaataacggctggctctcccacaactgcgggcaccacgaggacgcgggcgtaatttgttctgctgcacagtcccgttcaactccacggcctgatacattaagtacaataaccctccccccttctaccgttggcagtgagtcaagcttgacattgagactcgtgaacggatccgaccgctgccagggccgggtcgaagtcctgtatagaggctcttggggaacagtgtgtgacgacagctgggacacgaatgacgcaaacgtggtgtgcagacagttaggttgcgggtgggcaaccagtgcgccaggaaatgcaagattcggacaggggtctggcccaatcgtgctcgacgacgtgaggtgttctggacacgaatcttacctgtggtcctgcccccacaatggatggttgtctcacaactgcgggcatcacgaagacgccggtgtcatttgcagtgtgtcgcaatctcgccccactcctagtccagacacttggccgacaagccatgcttctaccgccgggcctgaatcgtcgctcgcactgcggctcgtaaatggaggcgacaggtgtcagggtcgcgtggaagtgctctaccgcgggagctggggcacagtatgcgacgattcttgggacacatctgatgctaacgtggtgtgtcgtcagctggggtgcggctgggcgacaagtgccccgggcaacgccagatttggtcagggcagcggcccaatagttctggatgatgtacggtgttcaggatacgagagctacttgtggtcctgtccacacaacggctggctttcccacaattgtcagcactctgaagatgcaggagtgatttgttctgccgctcacagttggtccaccccttcacctgatacactgcctacaatcacacttcctgcctctaccgtaggctcagagtcctccctggctctccgtttggtgaatggaggtgaccggtgtcaagggcgcgtggaggtgttgtaccaagggtcctgggggaccgtttgcgacgatagttgggacacgaacgatgctaatgtggtatgccgccaactgggctgcggctgggctatgtcagcacctggtaatgctcggtttggccagggcagtgggcccatcgttctggacgacgtgagatgctctggacacgaatcttacctgtggagctgcccgcataacggatggctctctcacaactgcggtcactccgaagatgctggcgttatctgttctgcgtcccagagtcggcctaccccttcccccgacacatggcctacctcccatgcttcaacggccggcagcgaatcctctttggcactcaggcttgtgaatggtggtgatagatgtcagggccgagtcgaggtgctctaccgaggcagctggggcactgtctgcgatgattattgggatacaaacgatgctaacgtggtctgtcggcagctgggatgtggttgggctatgagtgccccagggaacgcacgcttcgggcagggctcaggccctatcgtgttggatgacgtccgatgtagtgggcacgaaagttacctctggagttgcccccataatggatggctgagccataactgtggccatcatgaggacgctggggtgatctgttccgctagtcagtctcaacctacccctagccctgacacctggccgaccagtcacgcctctaccgcaggctctgaaagctctttggccctgagacttgtgaacggcggagaccggtgtcaaggtagggttgaagtcctttaccgaggaagctggggaaccgtctgcgacgactactgggacactaacgatgcaaacgtagtgtgccggcagctgggttgtgggtgggcaacaagcgccccgggcaacgcacggtttggccagggttctggcccgattgtgttagatgatgtccggtgttctggccacgaatcctacttgtggagctgcccacataacggttggttgtcacacaattgtgggcatcacgaggacgcaggggttatatgttccgctagccagagccagcccaccccaagcccagatacgtggccgacttcgcacgcttccacggctgggtcagaatcatccctggcccttagactcgtcaacggtggggatagatgccaaggtcgagttgaggttctgtaccgcggatcatggggtaccgtgtgtgatgactattgggatactaatgatgccaatgtcgtctgtcgccaactgggctgcggttgggccacaagcgcaccggggaatgcaagatttggtcagggatccggacccatcgtgttagacgacgtcaggtgctctggacatgagtcttacctgtggtcctgcccacacaatgggtggttgagccacaactgcggtcaccatgaggatgctggcgtaatctgctccgcatcacagtcacagcccacccccagcccagatacctggcctacgtcgagggctagcactgcaggatccgagagcacactcgcccttaggctggtcaatggcggcgataggtgccggggaagggtagaagtactctatcaaggatcctgggggacagtttgcgatgactattgggatactaacgacgccaacgtggtgtgcaggcagttgggctgcggttgggccatgtcagccccagggaacgctcaatttggacagggaagcgggcccatagttttggacgacgttaggtgctctggtcatgagtcttatctttggtcttgtccccataacggctggctgtcacataattgtggccaccatgaagatgccggtgtgatctgctccgccgcacagagccaaagcactcctcgaccagacacttggttaaccacaaacctgccagcactgacagtggggtcggaatcctcccttgccttgcggcttgtgaacggaggcgatcgatgtcgggggagagtggaggtcctttacagaggtagttggggaaccgtttgtgacgacagctgggacaccaacgatgccaacgtggtttgtagacaactggggtgtgggtgggcgatgtccgcccccgggaacgcccggttcggccagggctctggtcctatcgtcctggacgacgtgcggtgcagcgggaatgagagctacctttggtcatgtcctcataaggggtggctgacgcacaattgtggccaccatgaggacgctggtgttatatgctctgccacccagataaattccacaaccactgactggtggcaccctaccactactactacagcgaggcccagctcaaattgcggtggtttcttgttttacgccagcgggacattttcatccccttcatatcctgcctactaccccaataacgccaagtgtgtgtgggagattgaagtgaattctggataccgaatcaatctgggcttctcgaatctgaagttggaagcgcaccataactgctctttcgactacgtggagatatttgacggatccctgaattcctcgcttctcctggggaaaatttgcaacgacacacggcaaatctttacgagctcttacaataggatgacaattcacttcaggtcagatatctccttccagaataccggattcttggcttggtacaactcatttccaagcgacgcaactctgaggttggtcaacctcaattcctcttacggtctgtgcgcgggccgagtcgagatctatcatggtggaacgtgggggacggtgtgtgatgattcctggaccattcaggaggccgaagtggtatgccgccaattaggttgcggtagagccgtgtctgcactcggaaatgcttacttcggctccggcagcggaccgattacactcgatgacgtagagtgctccggcacagagtccacgttgtggcagtgtaggaatcggggctggttttctcacaactgtaatcatcgggaggacgctggcgtgatttgttccggaaatcacctttcgacgcccgctccatttttgaatatcacccgaccgaacaccgactactcttgcggtggctttctgtcccaaccatccggggacttctcatcaccattttatcccgggaattaccctaacaatgccaagtgtgtctgggacatcgaggtgcagaataactatagggtgacagtgatctttcgcgacgtacagctggaaggaggctgcaactacgattacatcgaagtttttgacggtccctacaggagctcccctcttatcgctcgtgtgtgcgatggcgctcgcggtagctttacatctagcagtaattttatgtctattagatttatttcagatcacagcatcacccgtagggggttcagggctgaatactacagttcaccttccaatgattccacgaacctcctgtgcctacccaaccacatgcaagcctcggtcagccgatcatacttgcaatccctcggcttctcagcctccgacctcgtcatttcaacctggaacggctactatgagtgtagaccacagatcactcctaatctggtcatctttactatcccctatagcgggtgcgggacatttaaacaagccgacaatgacacgatcgactattctaactttctgaccgcggcagtgagtggagggatcataaagcgcaggacagatctgcgcatccatgtgtcatgcaggatgctccagaatacttgggttgatactatgtacattgccaatgacacgatccatgttgcaaacaacactattcaggtggaggaagtgcagtacggcaacttcgacgtgaacatcagcttttacacgtcatccagtttcctgtacccggtgacaagcagaccctactatgtggacctgaatcaagatctgtacgtgcaggctgagattctacactccgatgccgtcctgacactctttgtcgacacctgcgtggcctccccttacagcaacgatttcacctctttgacctacgatctgatccgatcaggctgtgtccgcgatgatacatacgggccatactcctcaccttctctccgtatcgccagattccgcttcagggcatttcatttcctgaacagattccctagtgtctacctgaggtgcaagatggtcgtatgccgtgcatacgatccaagcagtcgctgctaccgcggctgcgttctgagaagcaaacgcgacgtcggctcctaccaagaaaaggtcgacgtggtcctcggacccatccagctacagacaccgccgcgaagggaagaggaacctagatag

SEQ ID NO: 335253 - DNA, 7241 bp, Artificial Sequence
  derived and/or modified sequence
atgggtatatccacggtcatactggagatgtgtctcctgtggggtcaggtgctcagtactgggggatggataccaagaacaaccgactacgcgtccctgatcccaagtgaagtacctctggacccaactgttgccgaaggttcaccatttcccagtgagagtacactcgaatcaactgtggcggagggcagcccaattagcctggagtccactctggaatctaccgtggcggaaggaagcctcattccttcagagtccacactcgagtctacggtggccgagggttccgactctggtcttgccttgcggctcgtcaacggggacggccgttgtcagggcagagtcgagattctctacagaggctcatggggaactgtttgcgatgattcctgggatacgaatgatgcaaacgtggtctgccgccagcttggctgtggttgggcgatgagcgcccctggcaacgcttggttcggccagggaagcggtccaatagcattggatgacgtgcgttgctccggacatgagagttacctgtggtcctgccctcacaatggctggctgtcacacaattgcggtcatggcgaggacgccggtgtgatctgctctgcggctcagccccagtctaccctgaggcccgagagctggcccgtccgaatttctccgcctgtgccaacagagggtagcgaaagctctttggcccttcgtctggttaacggcggagataggtgccgaggcagggtagaagtcttatatagaggatcatggggaaccgtctgtgatgactattgggataccaatgacgcaaacgtcgtgtgtcgccagctgggctgtgggtgggcaatgtccgccccagggaacgcgcagttcggacagggaagtggtcccatagttctcgacgatgtaaggtgcagcggacatgaaagttacctgtggtcttgccctcacaatggttggctgacacacaactgcggccatagcgaagacgccggagttatatgtagcgctcctcaatcacgtccaacccccagccctgatacatggccaacaagccatgcctcaacagccggaccagagagtagtctggccctgaggctggtcaatggaggcgatcgttgtcagggccgagtcgaggtgctatatagaggatcctggggaactgtgtgcgacgactcttgggacaccagcgatgccaacgttgtctgtagacagctgggatgcggctgggccaccagtgcccctggcaatgccagatttggccaggggtccggccctatcgtgctggatgacgtgcgctgcagcggctacgagtcttacctttggagttgtccacacaatgggtggctttctcataattgccagcatagcgaagacgcaggggtaatctgttctgctgcccatagttggtccacacctagccccgacactctgcccaccatcacattacccgctagtactgtagggagcgaatcctccctcgcattgcgactagtcaacggaggagatcgatgccagggtcgggtggaagttctgtatagaggcagctgggggacagtctgcgatgactcctgggacaccaatgatgccaacgtcgtctgtcgccagctggggtgtggatgggccatgctggctccaggcaatgcacgctttggacaagggtctgggcctatcgttctcgatgacgtacgttgcagtggaaacgagagctacctgtggagctgcccacacaatggatggctgagtcataattgcggccacagtgaggacgccggagttatctgttctggccctgagagttctctggctctgcggctggttaacggaggggatcgctgtcaggggagagtggaggttctgtaccgagggtcatggggaaccgtctgcgatgattcatgggatactaatgatgccaacgtggtgtgcagacagctgggctgcgggtgggcaacatccgcgccagggaacgcccgattcgggcaagggtccgggccaatcgtgttggacgatgtgcgatgctccgggcatgagagctacctatggagttgccctaataatgggtggctttcacataactgcggtcatcacgaggatgctggagtaatttgctcggctgcgcagagtaggagcacgcctaggcctgacactttgtcaacaatcactctgcccccaagtactgtgggatctgaatcaagtctgactctgcggctggtcaatggcagcgaccgctgtcagggaagggtagaggtgttgtacaggggatcctgggggacagtttgcgatgactcctgggataccaacgacgcaaacgtcgtctgtagacagctcggctgtggttgggctacttccgcccctggcaacgccagattcggacaaggctctggacctatagttctcgatgatgtccggtgcagcgggcatgaaagctacctctggtcgtgtcctcacaacggctggctctcccacaactgcggtcatcacgaagatgcgggagtgatatgctctgtgtctcaatcccggcctacccccagcccagacacctggcccacctctcacgcgagtacggcgggacccgaatccagcctggccttgaggctggtgaatggcggagatcggtgtcagggaagagtggaggtgctctaccggggttcatggggtaccgtttgtgacgattcttgggatacgagcgatgcgaatgtagtttgccggcagctgggctgtggttgggccacctccgctcccggaaacgccagattcggacaaggatccgggcctatagtgctggacgatgtccgttgcagcgggtatgaaagctacctctggtcttgtcctcacaacggatggcttagccataactgtcagcatagtgaagacgccggagtgatctgttcagctgctcactcgtggagcactccatcgccagataccctgccaaccattacactccctgccagtaccgtgggaagtgagtccagcctggccctccgactcgtgaatgggggagatcgttgccagggaagagttgaagtgctttatcagggcagttgggggacagtgtgcgacgactcttgggacacaaatgacgccaacgtcgtttgtcgtcagctggggtgcggctgggctatgagtgcacccggtaacgccagatttggacaggggtccgggcctatcgtccttgatgatgtccgctgttccggccacgaaagttacctctggagctgcccacataacgggtggctgtcccataattgcggtcacagcgaagacgccggagtcatctgtagcgccagtcagtcccgccctacaccttcaccagacacctggcctacgagccacgctagcaccgctggctcggaatcctccttggcactccgattggtgaacggtggagacagatgccaaggccgtgttgaggtgttgtatcggggatcctggggcaccgtgtgtgatgactattgggatactaatgatgcaaacgtcgtgtgtcggcagctggggtgtggatgggccatgtctgctccagggaatgcaaggtttggtcaggggtccggaccaattgtgcttgatgatgttcgatgttcaggacacgagtcctacctctggtcatgtccccataatggctggttgagccacaattgtgggcaccacgaggacgctggcgttatctgttcagctagccagtctcagcctaccccatcccctgatacatggccgacaagtcatgctagtaccgcaggtagcgagtcctctctggccttacggttggtgaacggcggagatagatgtcagggcagagtagaagtcctttatcggggtagctgggggacggtttgtgatgattactgggacaccaatgacgctaacgttgtgtgcaggcagttgggctgtggctgggcgacatctgccccaggaaatgcacgtttcgggcaggggtccgggcctatcgtcctggatgacgtacggtgcagtggtcatgaatcatacctatggtcatgcccacataatggatggctgtcacataactgcgggcatcacgaggatgctggggtgatttgttctgcaagtcagagtcagcccaccccctccccagatacatggcccacatctcacgcctcaactgcaggatcagagagcagtctcgccctcagactggtgaacggcggtgataggtgccaggggagagtggaggtgctgtaccggggttcatgggggacagtgtgtgatgactattgggataccaatgacgcaaacgtagtctgtaggcagctcggatgcgggtgggctacttccgctcccggaaacgcgcgttttggccagggttcgggaccaattgtcctggatgacgtgcggtgctccgggcacgagagctatctgtggtcttgcccccataatggatggctcagccataactgtggtcaccatgaggatgccggtgttatctgtagcgcttcccaatctcagcctaccccaagccccgatacgtggcccacgagtagggcctccacggcgggatccgaatccaccctggctctgagactcgtaaatggcggagatcgatgtcgtggcagggtcgaagtgctctatcagggctcctggggcaccgtatgcgacgactattgggacaccaatgacgccaacgtggtgtgccggcaactggggtgtggctgggccatgagtgcccctggtaacgcccaatttggccaaggctcgggtcccattgtattagatgatgtgagatgcagtggccacgagtcatacctgtggagttgccctcataacgggtggcttagtcataattgcggccatcatgaggatgctggagtgatctgtagcgcagctcagtcccagagcacgccccgtcctgacacatggctgaccactaacttgcccgcactgaccgttggcagcgaaagctccttggcccttaggcttgtcaacggaggcgatcggtgtcgcggacgggtcgaggtgttgtatcggggatcctgggggaccgtttgtgatgattcgtgggacacaaacgatgcaaacgtggtgtgtcggcagttgggctgtgggtgggcaatgagtgctcctggcaatgccaggtttggtcaaggcagcgggcctattgtcctggatgatgtgaggtgcagtgggaacgagagctatttatggtcttgcccccacaagggctggctcacccacaattgtggtcatcatgaggatgctggggtgatctgttctgccacacagattaactcgaccactactgattggtggcaccccactactaccaccaccgcaaggccatccagcaattgcggcggttttctcttttacgcttcagggaccttttcctccccaagctaccccgcatactatcctaacaacgcgaaatgcgtttgggagatagaggttaattctggataccggatcaacttgggattttccaaccttaaactggaggcacatcacaactgctcgtttgactatgtggagattttcgacggttccctgaatagctctttgctgctgggaaaaatctgcaacgacaccaggcagatttttacatcctcatataatcggatgaccattcatttccgcagcgatatctcctttcagaacacagggtttctggcatggtacaacagcttcccctccgacgctacacttcgtctcgtgaatctcaatagctcctatggcctgtgtgccggtagggttgagatttaccacggtggaacctggggtacggtgtgcgatgattcctggacaattcaggaagctgaagttgtgtgtcgccagctagggtgcgggagggctgtgagcgccctgggaaacgcctacttcggaagcgggtcaggacctataactctcgatgacgtagagtgttccggcaccgaaagcacattgtggcaatgtaggaaccgcggatggttctcacataactgtaaccatagagaggacgcaggggtgatttgcagtggaaatcatctgagtacaccagctccatttctgaacatcaccaggcccaacaccgactactcatgtggaggtttcctgagtcagccatcaggcgattttagtagtcctttttatcccggaaactatcctaacaatgcaaaatgcgtctgggacattgaggtgcagaacaattatagggtgaccgtgatctttagggatgtgcagctcgaggggggatgtaactatgactacatcgaggtgttcgacgggccatataggtcttctcccttaatcgctcgggtttgtgacggagcaagaggatcttttacgtcctcaagtaatttcatgagcattcgttttatcagtgatcacagcatcaccagacgcggtttccgggcagaatactactcatccccatctaatgattcaactaacctgttatgtctgcccaaccatatgcaggccagcgtgagcagaagttatttgcagtctctgggtttcagtgcgagcgatctggtaattagcacttggaatggctattatgagtgtcgcccacagattaccccaaatctggtcatttttaccataccctattcaggctgtggaacttttaaacaggctgataacgacacgatagattactcgaatttcttgaccgccgctgtgagtggcggtatcatcaaaaggaggaccgatcttaggattcacgtgagctgccgaatgctccagaacacatgggtggacacaatgtacatcgcaaacgacacgattcatgtggcaaataacactatacaggtggaggaagtgcagtatgggaacttcgacgtgaacatctcattctacaccagcagtagctttctctacccagtaacatctcggccatactacgtggatctcaaccaggatctgtatgttcaggccgaaattcttcactctgacgctgtcctgacactgtttgtggatacctgtgttgcatcaccctattccaatgacttcaccagccttacttacgatttgatccgtagcggctgcgtccgggacgacacctacggaccctactcctctccctccttgaggattgcccgatttcgcttccgagcgttccatttcctgaatcgttttccatcagtctatttgagatgcaaaatggtagtctgccgtgcttacgatccctcttcccgctgctatcggggttgcgtgctgaggtcgaagcgggatgtgggcagctatcaggagaaggtggatgtggtgcttggccctattcagctccagacaccgccaaggcgggaggaagagccacgcta

SEQ ID NO: 335254 - DNA, 7241 bp, Artificial Sequence
  derived and/or modified sequence
atgggtattagtacggtcatcctggaaatgtgtctgctgtggggccaggtactaagtacgggagggtggatccctcgcacaactgactatgcatctctaattccaagtgaggtccccttggaccccaccgttgccgaaggcagtcccttcccatccgagtcgaccctggagagtacggtagctgagggttcacctataagtctagaatctacgctggagagtacagtcgcagaggggtcccttatcccgagcgagtcaacgttggagtccaccgtcgccgaaggttctgacagtgggctggctctgaggctggtgaacggcgatggacgttgccagggtagggtggagatcctttatagaggctcttgggggacagtgtgcgacgattcctgggatactaacgacgcaaatgtggtttgccggcagctgggctgtggatgggccatgagcgccccaggaaacgcctggttcggacagggctctgggccaatcgctctggatgatgtgcgttgctccggccacgagtcttacttgtggtcctgtccccacaatggctggcttagtcataactgcggccacggtgaggacgctggcgtgatctgctctgctgctcagcctcagtccacactgaggcccgagtcctggcccgttaggatatcaccgccagtccctactgaggggtccgagtcttctcttgcactgaggcttgttaacgggggtgatcgatgccgtgggcgagtggaagtgctttatcgtggttcgtgggggaccgtctgtgacgactactgggacacaaacgacgccaacgtggtgtgccgtcagctggggtgcggatgggctatgtctgctcctgggaacgctcaattcggacaaggctctgggccaatcgtcctcgacgatgtgcggtgttccggacacgagtcttatttatggtcctgcccgcacaacgggtggctgacccacaactgtgggcattccgaggatgcaggagtgatttgctcagccccacagagtcggcctacccctagcccagacacatggcccaccagccatgccagcaccgcaggccctgagtcaagcctggctcttcgtctggtaaatgggggagaccggtgccagggcagagttgaggttttatacagaggttcatggggcacggtctgtgatgactcgtgggatactagtgacgcaaatgttgtgtgtcgccagctgggttgtggatgggctacgagtgcacctggaaacgcccgattcggacagggaagcggcccaattgttctcgatgacgttcggtgctccggatacgaatcatacctctggtcttgcccacataacgggtggctatcgcataattgtcagcactcagaagacgcaggcgtaatatgcagcgcagcacactcttggagcaccccatctccagacactctgccaactatcaccctgcccgcaagcaccgtcggttctgaaagcagtcttgcattgcggctagttaacgggggtgataggtgccagggacgtgttgaagtgctctatagaggctcatggggaacagtgtgcgacgatagttgggacactaacgacgctaatgtggtatgccgtcaactgggctgcggctgggccatgctggctcccggtaacgctagattcgggcagggctccggaccaatcgtgctagacgacgtccgttgcagtggtaatgaaagctacctctggtcctgcccacacaacggctggctgtcccacaactgcgggcatagcgaggacgccggagtaatttgcagcggccctgaaagcagccttgccctgcggctggtcaacggcggagaccggtgtcagggccgagtagaagtcctttatcgcggatcgtggggcaccgtttgtgatgactcttgggacaccaacgacgcaaatgtggtgtgccgccaattggggtgcggctgggctacttcagcgcctgggaacgctcgcttcggtcagggctctggaccaatcgtcttagacgatgttcgctgcagtggacatgaaagttatctgtggtcatgccctaataacgggtggctctcgcataactgtgggcatcatgaagatgccggagtaatttgctctgccgctcagtctcggagcactccacggcctgatacactgagcactatcacactgccgcctagcactgtcggctccgaaagttctctgacgttgcgcctggtaaatggtagcgaccggtgtcagggccgtgttgaagtgctctaccggggatcttggggcaccgtgtgcgacgactcgtgggacaccaacgatgcgaatgtggtgtgcagacagctggggtgtggttgggctacgtcagccccaggcaacgcacggttcggccagggttctggccctatcgtccttgatgacgtgcgatgctcaggacacgaatcatacctctggtcttgcccccataatgggtggctctcacataattgcggccatcacgaggacgccggagtcatctgcagcgtgagccagtctcggccaacccccagccccgacacatggcctacatcccacgcatccacggccggtcccgaaagctcactggcactccggttggtgaatggaggagacaggtgtcagggaagagtcgaggtgctgtatagagggtcatggggtaccgtgtgcgacgattcttgggacacaagcgacgctaatgtggtatgccgtcagctcggctgtggatgggctactagcgccccaggaaacgcaaggttcggtcagggcagcggtcctattgtgcttgatgacgtccggtgtagcgggtacgaatcctatctctggtcatgtccccataacggctggctgtcccataattgccagcatagcgaggatgcaggcgtgatctgcagcgccgctcactcgtggtctactccctcaccagacactctaccaaccataacattgcctgcatctacagtgggaagtgagagttcattggccctccgccttgttaacggcggagaccggtgccaagggcgagtggaggtgctctaccagggaagctgggggactgtatgcgacgacagctgggatacaaatgacgctaatgtcgtctgtcgccagctcggctgtggttgggcgatgtcagcccctggcaatgccagattcggtcaggggtccggacctatcgttcttgacgatgtcagatgcagtggtcacgaaagctatttatggtcatgcccacacaacggatggctaagtcataattgtgggcactctgaagacgccggagtgatttgctcagcctctcagagccgtccgacaccatctccagacacgtggccaacctcccacgcatccaccgccggaagtgaatcatcccttgcgctgcgattagtcaacgggggtgatagatgtcagggacgggtggaagtcctgtacagggggtcatgggggaccgtgtgcgacgattattgggacacaaatgatgccaatgtagtgtgtcgccagctgggttgcggctgggcaatgagtgcaccaggcaacgctcgcttcggacagggaagcgggccaattgtcttggacgatgtgcgttgcagcggccacgagagttatctgtggtcgtgtccacacaacggctggcttagccacaattgcgggcaccacgaagacgccggtgtcatctgctcagctagccagtcccagcctaccccatcccctgacacatggccaacatcacacgctagcaccgctggatccgaaagcagtctggccctgcgcctggtaaatggtggcgaccggtgtcaagggagagttgaagtgctttaccggggtagctgggggactgtgtgcgacgattattgggatacgaacgacgccaacgtggtgtgccggcagctcggttgcggatgggctacttccgcccctggcaatgcacggttcggacaggggagtggacccattgtgctggatgacgtccgctgttcaggacacgagagctatctgtggagctgtccccacaatggatggctatcccacaactgtggacatcacgaggatgccggagtcatttgttccgcatcacagagtcagccaaccccgtcacccgacacatggcccacaagccacgcctccaccgctggtagcgaatcgtcactcgcactacggttggtgaatgggggtgatcggtgccaagggagagtggaagtgctgtatcgtggaagctggggcacagtgtgcgacgactactgggatactaatgatgccaacgtggtgtgtaggcagctgggctgtggctgggcaacttccgcgccaggcaacgctcggtttggacagggtagtggccctatcgtactggatgatgtgcggtgctctgggcacgaatcttacctctggtcatgtccacacaacggctggttgtcccataattgtggccaccacgaggacgcaggtgtcatttgttctgcatctcagtcgcagcccactccctcccctgatacatggccaacaagccgggcatcgaccgccggtagcgaatctactctggcgttgcgacttgtgaacggtggagatcggtgccgtggtcgggtcgaagtcctgtaccaaggcagttggggcactgtttgtgatgattattgggacactaatgatgccaacgtcgtctgtcgccagctgggctgcggctgggccatgtccgcgccaggcaacgcccaattcggacagggttcaggccctatagtgttagacgacgtcaggtgtagcggccacgagagctatctctggtcttgtccacataacggctggctttcacataattgcggacaccacgaggacgcaggtgtgatctgttcagcagctcagtcccagagtacacctagacctgatacttggctgactactaatttacccgctttgaccgtgggttctgaaagtagcttggctcttcggctcgtgaacgggggtgacagatgcagagggcgtgttgaggtgctctaccggggaagctggggcaccgtgtgcgatgattcctgggatacaaacgacgccaatgtggtgtgtagacagttaggttgcggttgggcaatgagtgccccaggaaacgccagatttgggcaagggtcaggcccaatcgtgctggacgacgtccggtgcagcggaaatgagtcatacctgtggtcgtgcccccataagggatggttaactcataattgcggccaccacgaagatgcaggcgtgatctgctccgcaacgcagatcaatagtacaacaactgattggtggcaccctaccacgaccacgacagcccgtccatcatccaactgtgggggattcctgttttacgcctctggcaccttctctagtccttcgtacccagcgtattatccaaacaacgcgaagtgtgtttgggagattgaagttaattctggttatcgaatcaatctcggcttctctaaccttaaactggaagcacatcacaactgtagctttgattacgtggagatctttgacgggagtctgaacagctctctgctcctcgggaagatttgcaacgatacacgacagatcttcacgagttcctacaacaggatgaccatccacttcaggtcagacatatccttccagaacactggattcctggcttggtataatagctttccttccgatgctacactacgactggtgaacctcaactcctcttacgggctgtgtgcaggacgggttgagatctaccacggaggcacctggggcacggtctgtgatgactcttggactattcaagaggccgaggtcgtctgcaggcaattaggatgcgggagagccgtgtcagcactaggcaacgcctattttggaagcgggtccggacccattacgctggatgacgtggagtgtagtggcacagagtcaaccttgtggcaatgtcgtaacaggggctggttctctcacaattgcaaccatcgtgaagacgccggagtgatctgttctggcaaccacctaagcactcccgctcctttcctgaatatcactagacctaacactgattattcttgcggaggatttctctcccagccaagtggtgatttctcctccccattttacccaggaaactatcccaacaacgctaagtgcgtctgggacattgaggtgcaaaacaactacagagtgaccgtcatctttagagacgtgcagttagaaggtggctgtaactatgactacattgaagtgttcgacggaccatacaggtcatcccctttaatcgcgcgagtttgtgatggagcgagaggcagctttacgagctcaagcaattttatgtcaatccggtttatctcggatcactccattactaggagaggcttccgcgctgagtactactcctcaccatcaaacgattcaactaatctgctttgtcttccaaatcatatgcaggcatcagtctcccgctcctaccttcagtccctcggattttccgcttccgacctcgtcatttcaacctggaacggatattacgagtgtcgccctcagataacgcctaacctcgtgatcttcacaatcccatactccggctgtggcaccttcaagcaagcagacaacgacacaatcgactacagtaactttctcaccgcagctgtctccggcggaattataaaaaggcgaaccgacttaagaatacacgtcagctgtaggatgctccagaatacatgggtagataccatgtacattgcaaacgacacaatccacgtggctaacaacacaatccaggtggaagaggttcagtacgggaactttgatgtaaacattagtttctacacttccagctcttttctgtatcccgtcacatctcgcccttactacgtggacctcaaccaagacctgtatgttcaagccgaaatcctgcactctgatgctgtgttgacgctcttcgtggacacttgtgtcgctagcccgtacagcaatgattttactagtctgacgtatgacttaattcggtctggatgcgtgagggacgatacctatgggccatattcctccccttcattaagaatcgccagattccgcttcagggccttccactttctgaataggtttcccagtgtttatttgcggtgtaaaatggtggtgtgccgggcatatgacccatctagccgctgttatagggggtgtgtgctgaggtctaaaagagatgtgggctcgtaccaagagaaagtcgacgttgtactcggtcctatccagttgcagacccctccgaggcgcgaggaggaacctcggta

SEQ ID NO: 335255 - DNA, 7241 bp, Artificial Sequence
  derived and/or modified sequence
atgggaatctccactgtgattttggaaatgtgccttctgtggggacaggtgttgagcactggaggttggatcccacgtactacagactacgccagtttaatacccagcgaggttccattagaccccacagttgccgagggtagcccattccctagtgagtcgacgttggaaagtaccgtcgccgagggtagccccatatctctggagagtaccttggagagcaccgtggccgaaggctctctgatccctagcgagtcaacactagagtcgactgtcgcagaaggaagcgattcaggcctggcactgaggcttgtcaatggtgatggacgttgtcagggcagggttgaaattctttatagagggtcctggggcacagtgtgcgatgactcttgggacactaatgatgccaatgtcgtctgcaggcaactcggctgcgggtgggctatgtcggctccaggaaatgcatggtttggccaggggagcggaccgattgccctcgatgacgttcgctgtagtgggcatgaatcgtacttgtggtcctgccctcacaacggctggctgtcgcacaattgtggtcatggcgaggacgctggagtaatatgttccgccgctcagccccagtccacactgaggccagaaagctggcctgttagaatctccccaccagtcccaactgaggggtctgaatccagtcttgcccttcgcctcgtcaacgggggtgatcgatgtcgaggacgggtcgaggttctgtatcggggatcctggggaaccgtttgcgacgattactgggataccaacgacgcaaatgtggtgtgtaggcaactcggctgcgggtgggcgatgtccgcccctggaaacgcccagtttggtcaggggtccggtccgatagtgctggacgacgtgcgatgtagtgggcatgaatcctacttgtggagttgcccacataacggttggcttactcacaattgtggacattctgaagacgctggggtgatatgctcagcacctcaatcaagacctactcctagccctgatacatggccaactagtcacgcctccacggcaggccctgagagctctctagccctgagactggtcaatgggggagatcggtgtcagggcagggtggaagtgctttatcgcggtagctggggcacagtttgcgacgattcttgggatacctctgatgccaatgtagtttgtaggcagctcggatgcgggtgggctacatccgctcctggcaatgctcgatttggccaaggatcggggccaatcgtccttgacgatgtcagatgcagcggttacgaatcttacctgtggtcttgcccacataatggctggctctcccataattgccagcactctgaagatgctggcgttatttgctctgcagcacactcttggagtacaccctcccctgacaccctgccgactatcacactgcccgctagcaccgtcggatctgagtctagcctagctttaaggttagtcaacggtggggaccgttgtcaagggagggtggaggtgctgtacagagggtcctgggggaccgtttgtgatgactcatgggatacaaacgacgccaatgtagtctgccgccagctgggatgtggatgggccatgctcgctccaggaaacgcccgttttggccagggatctgggcctatcgtgctcgacgatgtccggtgttctggaaatgagagctacctatggtcttgccctcataacggatggctctcacataattgcggacatagtgaagacgctggggttatttgctcaggtccagaatcatccctggcccttcgtctggtaaacgggggagataggtgtcaaggtcgtgtcgaagtgctgtatagggggagctggggaacagtctgtgatgactcttgggatactaatgatgccaatgttgtctgtaggcaactgggctgtggctgggctacctctgcacccggtaatgcccgattcggtcaggggtccgggcctatcgttttggacgacgtgcgatgctcagggcacgaaagctatctttggagttgccccaacaacggatggctttctcacaattgtggccaccatgaagacgcaggagtcatctgcagtgcagcccagtcgaggagtacgcctcggcctgatacactcagcacaattacactgccccctagtactgtggggtccgaatcatctctgacgctgaggcttgttaatggatccgatcgctgtcagggtcgtgttgaggtcctttataggggctcctggggaaccgtgtgtgacgatagttgggataccaacgacgcaaacgtggtctgtagacaactggggtgcggatgggcaacttccgctccgggaaatgccaggtttggccagggatccggcccaatcgtgttggatgacgtaaggtgctccggacacgagagttatctctggtcctgcccacacaatggatggctgtcacacaactgcggtcatcatgaggacgcaggagttatctgtagcgttagccagtctaggcccactccatcccctgatacatggcccacgtcacacgccagtacagcaggcccagagtcaagcttagccctcaggcttgtaaatggaggagatagatgtcagggacgagttgaagtgctatatagagggtcttggggcactgtttgcgacgattcatgggatacttctgacgccaacgttgtatgtcgccagcttggttgtggctgggctactagcgccccaggaaatgccagattcggacaggggtccggccctatcgttctggacgacgtgcggtgtagcggctatgaatcatacctgtggtcatgtcctcacaacggctggctctctcacaattgccaacactcagaagatgcaggtgtaatatgtagtgccgctcatagttggtctactccctcacccgatacgctgcctaccatcaccctccctgcatcaaccgtcggaagtgagtcctctctcgcactgagactggttaacgggggtgataggtgccagggcagagtggaggttctctaccagggatcatggggcactgtctgcgatgattcttgggatactaacgacgctaatgtggtgtgccgccaattggggtgcgggtgggcaatgtcagctcccggtaacgccaggttcggccagggcagcggccctatcgtgctggatgatgtgcggtgtagtgggcatgaatcctatctctggtcatgtccccacaacggctggctgtcccacaactgcgggcactctgaagacgccggtgtcatttgttctgcttcccagtctaggccaacccctagtcctgatacatggccaacctctcacgcatcaacagccggttcagaaagtagccttgcacttaggctggtgaacgggggagatcgatgtcagggtagggtggaggtgctctataggggatcatggggcaccgtctgcgacgactactgggacactaatgatgcgaatgtcgtttgtagacagcttggctgcggatgggcgatgtccgcgcctggcaacgccagattcggccaggggtcgggacctattgtgctggacgatgttcgttgtagcggacacgaatcctacctctggtcctgtccccataacggttggctgtctcacaactgcggacaccatgaagacgcgggagtcatctgcagcgctagccagtcacagccgaccccgagccccgatacctggccaacctctcacgcttccaccgctggcagcgagagctccctcgcattacggctggtcaacggaggcgacaggtgtcagggacgcgtggaagtgttgtaccgtgggtcttgggggacggtttgtgacgactactgggataccaacgatgccaacgttgtgtgccgccagcttggatgtgggtgggccaccagcgccccaggaaacgccagatttggccaaggatccgggccaatcgtactggatgacgtgcgatgctccgggcatgagtcttacttgtggtcatgtccccacaatggatggctgtcccacaactgcggccaccacgaagatgcaggtgtaatttgctctgcatctcagagtcagcctacgccaagcccggatacatggcccacatctcatgccagcacggcaggcagcgaatcgtccttagcactgcggcttgtcaatgggggtgacagatgccagggcagagtggaggtgctctacagggggagctgggggacagtctgcgatgattattgggacaccaatgacgccaacgtggtctgcagacagctgggctgcggttgggctacttccgccccagggaatgctaggtttgggcaagggtccgggccaatagttctggacgacgtgcggtgctctggccacgaatcttatctttggtcctgcccccataatggatggctttcccataactgcggacaccacgaggacgccggagtaatttgttccgccagccagtctcaacctacccccagtccggatacctggccgacgtcaagagcctcaactgcagggtccgaatccactctggccctccgactggttaacgggggagatcggtgtagagggcgagtggaagtgctttaccaaggcagttgggggacggtgtgcgacgactactgggacactaacgacgctaatgtggtgtgccgacagctgggttgtggctgggcgatgagtgcccctggtaatgcgcaatttggccaggggagcgggccaatcgttctggacgacgtaagatgctccggtcatgagagttatctgtggtcttgcccccacaatggctggttaagccacaactgtggccatcatgaggacgcgggagttatctgctcagctgcgcagtcccaaagtacaccaaggcccgatacgtggcttacaaccaaccttccagcattaacagtgggctctgaatccagcttggccctaaggttagtgaatggaggggatagatgtcgagggagagtggaggtcttgtacagaggcagctgggggactgtatgcgacgactcgtgggatacgaacgatgctaatgttgtttgccgccagttaggatgcggctgggccatgagtgctcctggtaacgcacgatttggacagggaagtgggccaatcgtcttagacgatgtgaggtgttccggaaatgagagttacctctggtcatgtcctcacaaaggatggctgacccacaactgcggacaccacgaagacgccggagtcatctgttccgccacccagatcaatagtaccacgactgattggtggcatcccaccaccactactactgccaggcccagcagcaactgtggcggattcctcttctacgcttcgggaactttttcttctccctcatatcctgcctattatcctaataacgccaagtgtgtgtgggagatcgaagtgaacagcggctatcgcatcaatctgggcttttccaacctgaaattggaggcccatcataattgctccttcgactatgtggagattttcgatggctcactgaacagcagcttactcttggggaagatctgcaatgatacccgccaaatcttcacctccagctacaacagaatgactattcacttcaggtctgacatcagtttccagaacacaggattcttagcctggtataacagctttcctagcgatgcgacacttaggcttgtgaatttgaactcttcctacggcctgtgcgccggaagagtcgagatctaccatggtggaacttggggcactgtctgcgatgactcatggacaatccaggaggcagaggtggtttgtagacagctcggatgtggccgagctgtatccgctctgggcaatgcgtacttcggcagtggtagtgggcctatcacactagacgatgtggaatgctccgggacagagagtactctgtggcagtgccgcaacagggggtggtttagccataattgtaaccatagggaggatgccggagtgatttgctcgggaaatcacctgtccaccccagctccattcctcaacatcactcgtcccaacacagactattcgtgcggcggattcttgtcacagccttcaggagacttctcttctccgttctatccaggcaactatcctaataacgccaaatgcgtatgggacatcgaagtgcagaataactatcgtgttacagtgatctttagggatgtacaactggaaggtggttgtaactatgactacatcgaagtgttcgacggcccttacaggtccagtcccctgatagccagagtatgtgatggtgctagagggagcttcacgtcttcttctaacttcatgtctatccgtttcataagcgaccatagtataacgcgtagaggatttagagcagaatactattcatctccctctaacgacagtactaacctgctatgtctgccaaatcacatgcaagccagcgtgagtcgttcttacctacagtcgctgggctttagtgcttccgacctagtgatcagcacttggaacggctactatgaatgtaggccgcaaattacacccaatctggtgatttttacaattccttactcagggtgtggcaccttcaaacaggccgacaacgataccatagattactccaatttccttaccgccgcagtgagcggtggaattattaaacggagaacagacctcagaatccacgtttcctgtagaatgctccagaacacctgggttgataccatgtacatagccaacgataccatacatgtggccaataatacaattcaagtcgaagaggtccagtatggtaactttgatgttaacattagtttctacaccagctcgtcttttctgtaccccgtcacctccaggccctactatgtcgatctgaaccaggatctctacgtgcaggccgaaattctacacagcgatgcagtcttgacgctgttcgtcgacacgtgcgtggcaagcccgtactctaacgacttcacctctctgacgtacgacctgatccgctccggatgtgtgcgggacgacacctatggaccctatagctccccttcactcagaatcgctcgatttaggtttagggcatttcatttcctgaatcggtttccttccgtgtacctccgctgtaagatggtcgtctgtcgcgcatacgatccctctagtcggtgttataggggttgtgtgctaaggtcaaagcgagatgtaggctcttatcaggaaaaagtcgatgtcgtgcttggaccgatccagctgcagacacccccacgccgagaagaggagcctagata

SEQ ID NO: 335256 - DNA, 7241 bp, Artificial Sequence
  derived and/or modified sequence
atggggatctccaccgttattctggaaatgtgtctgctctggggccaggtgctttcgactggcggatggatcccccgtacaaccgactacgcgagcctgataccttcagaggttccccttgacccaactgtcgccgaaggttcaccatttccatctgaaagcacattagagagtaccgtcgccgagggatctcccatatctcttgaatctacactggagtctaccgtcgcagagggctccctcattcccagcgagtcaactctcgaaagtactgtcgccgaagggtccgactcaggcctggccttaagactagtgaacggggatggacgctgtcagggccgtgtcgagatcctgtatagagggagttggggtactgtgtgcgacgacagctgggacactaatgacgccaacgtggtctgcaggcagctgggctgtgggtgggctatgagtgctcctggaaacgcctggtttggccagggctctgggcctatcgccctcgatgatgtccggtgcagcggacacgaaagctacctgtggtcatgcccccacaatgggtggctgtcccataactgtggccatggtgaggacgcaggcgtcatttgctccgccgctcagccccaaagcaccctcaggcccgaaagctggcccgtccgtatctcgccaccagtgccgaccgaagggagcgagagttctcttgctcttcgcctagtgaatggtggggaccgatgccggggaagggtggaggtgttgtacagagggtcctgggggacagtgtgcgatgattactgggacactaacgatgcaaatgtggtttgtagacagctcggctgtgggtgggctatgagcgcaccaggaaatgcccaatttggacagggttctggtcctatcgttctggacgacgtcagatgttctggccatgaatcttacctctggagttgtccacataacggatggctcacacacaactgtggccacagcgaagatgccggagtaatctgtagtgcccctcagagtcgcccaactccttcccctgatacctggcctacttcccacgcgtccactgctgggccagaatctagcctggccctgcggctcgttaacggtggggatcgctgtcagggacgcgtagaggtactgtaccggggtagctggggcacagtttgtgacgactcttgggatacaagcgatgccaatgtggtgtgtcgacaacttggatgcggatgggccacatcagctccgggtaacgcacgctttggccagggaagcggaccaattgttctggatgatgttcggtgttccggatacgagagctacctgtggagttgccctcacaacggctggttatcccataactgtcaacacagcgaggacgccggtgtgatatgctccgcagcccacagctggagcaccccctcacccgatactcttccaacgatcaccctgcctgcctccactgtgggctctgaaagtagcctggccctgaggctggtgaacggcggtgatcgatgccaaggtcgagtggaggtcctctatagaggttcatggggcaccgtatgtgacgactcatgggacactaatgacgccaacgttgtctgccgccagcttgggtgtggatgggctatgctcgccccagggaatgcccgattcgggcagggctccggtcctatcgttcttgatgatgtcagatgctcaggaaacgagtcctacctgtggtcatgtccacataacggttggctaagtcataactgcgggcactccgaggatgccggtgtcatttgttctggtcccgaaagctccctggccttgagactcgttaacgggggagataggtgtcaagggagggtggaggttctttacaggggctcgtggggcacagtctgtgacgactcctgggacaccaatgacgccaatgttgtatgtcgacagctgggatgcggttgggccactagtgcgccagggaacgctaggttcggccaggggtctggtcctatcgtgttagacgatgtcaggtgctccggccatgaatcgtacctatggtcctgccccaataatgggtggttatctcataactgcgggcatcacgaggacgccggagtcatttgttctgcggcacagtctcgaagcacaccacgacctgatactctgtctactataaccttacctccatcaaccgtgggatcggaaagttccctgacccttaggctggtgaatggtagcgataggtgtcaaggtagggtggaagtcctgtaccggggtagctggggtactgtgtgcgacgactcttgggatacgaatgatgccaacgtagtctgccgccagctcggatgtggatgggccacctcggctccaggcaatgcgcgattcggacaaggatccggacccattgtgttggacgacgttaggtgctccggccacgagtcctatttatggtcgtgcccccacaatgggtggctcagccacaattgtggacaccatgaggatgcgggagtaatttgctcggtgtcccagtcccgcccaaccccatctcctgatacctggccaacctctcacgcctctaccgcagggcctgaatcatcactggccctgcgtctcgttaacggaggcgataggtgccagggtagggttgaagttttgtacagagggagctgggggacggtgtgcgatgacagttgggatacttctgacgcaaatgttgtctgccgacagctcggctgcgggtgggctaccagtgctccagggaatgcccgattcggacaaggctcgggccctatagttttggatgatgtgcggtgcagcggctacgaatcttacctctggtcatgcccccacaatgggtggttgtctcataattgccagcattcagaggatgccggagtgatttgttcagcggcacattcctggtctacccccagccccgacacgctgcccactatcacactgccggcatctacagtggggtcagaatcttcactggcgctaagactagtcaacgggggagatcggtgccaggggagagtggaggtcctgtaccagggatcctgggggaccgtatgtgatgactcctgggatactaatgatgcgaacgtcgtctgccgccagctggggtgtgggtgggccatgtccgccccaggaaacgcgagattcggacaaggaagcggccctattgtgttggacgacgtgcgttgcagcgggcacgagagttacttatggagttgcccacacaatggatggctatctcacaattgcggacattccgaagacgcgggagtaatttgctctgcgagccagtctaggcctactcccagcccagatacctggccaacatcacatgcctccacagctggaagcgagagctccctggccctccgccttgttaatggcggagaccgatgccaagggagggtggaggtgctctatcgaggatcctgggggaccgtgtgcgatgactattgggacactaacgacgctaacgtcgtctgtaggcagctggggtgtggatgggctatgtccgcaccaggtaatgcgaggtttgggcaagggtccggaccgatcgtccttgacgatgtgcgatgtagtgggcacgaatcttatttgtggtcctgcccccataatggctggcttagccataattgtgggcaccatgaggacgcgggagtaatctgtagcgcttcccagtctcagcctactcctagcccagacacctggccaacgtcccacgcttccacagctggtagcgaatcctctctggctctgaggctagtaaatggaggggacagatgccaaggcagagtggaagtactgtacagggggtcatggggtacagtctgtgatgactattgggatacaaacgacgccaatgttgtgtgcaggcaactagggtgcgggtgggctacttccgctcctggtaacgcacgcttcggacaggggagcgggcctatcgtgctcgatgacgttaggtgctccgggcacgaatcctatctgtggtcttgcccccacaatggctggctgagccataattgcggccatcatgaggatgcaggggtaatttgctccgcctcccagtcccagcccaccccctctcccgatacctggcctacttctcatgctagcaccgctgggagtgagtcttcattggctctgcgcttggtgaatgggggagatagatgccaggggcgtgtcgaggtactttatagaggttcatggggtacagtctgcgacgattattgggatactaacgacgctaatgtcgtttgcagacagctcggatgcggttgggctacaagcgcccctggaaacgccaggttcggtcaggggtctggtcccatcgtccttgatgacgttagatgttcagggcatgagagctatctctggtcttgtccacataacgggtggttgagccacaattgcgggcatcacgaagacgccggtgtgatatgttctgcatcacaatcacagcccactcccagccctgacacctggcctacctcacgggcttccacagctggctctgagtccactcttgcattgcgactggtaaatggcggtgacaggtgtagggggagggtcgaagtcttgtaccagggctcctggggcactgtctgtgatgattattgggatacaaacgacgcaaacgttgtctgccgacagctcggctgcggatgggccatgagcgcccctggcaatgcccaatttggacagggctctggccctattgtcttggacgatgtaaggtgtagtggacacgagagctatttgtggtcctgtccacacaacgggtggctgtcacacaactgtgggcatcatgaagacgctggtgtgatctgtagcgccgcacagagccaatcaacgccaaggcccgatacctggttaaccacgaatctgcccgctttgaccgttgggtccgagagctctctggctcttcggttggtaaacgggggagataggtgtagagggcgtgtggaagttttgtatcgaggctcctggggtactgtgtgtgatgattcctgggacaccaacgacgctaatgtggtctgccgtcagctgggctgcgggtgggcgatgtccgccccaggaaacgcccgattcggtcagggcagcggaccaatcgtactcgacgatgtgcgctgtagcggtaatgagtcgtacctctggtcctgtccacacaaaggctggcttactcataattgcggacatcacgaagacgccggagtcatttgctccgctactcagattaacagcaccaccaccgactggtggcaccccactaccactactacagcaaggccttcttctaactgcgggggttttcttttctatgcctctggcacgttcagttcccccagctatcccgcatactaccctaacaacgccaagtgtgtatgggagatcgaggtgaacagtggatatcggattaacctgggcttcagtaacctaaagttggaggctcatcataactgtagttttgattacgtggagatctttgatggttccctaaattcatctctactgctggggaagatttgcaatgataccagacagatcttcacatcttcctataatcgcatgaccatacacttccgcagcgacatcagctttcagaacacggggttcctcgcatggtataatagcttcccttcagatgcaaccctgcgcttggtcaaccttaactcttcatatggattgtgcgccggtagagttgagatctaccatgggggaacctggggcacagtctgtgacgatagttggaccatacaggaagccgaagttgtatgtagacagctaggctgtggcagggctgtgtccgcccttggcaacgcgtatttcggttcaggatcaggtcccatcaccctggatgacgtggaatgctccggcactgagtcaacgctgtggcagtgtaggaatagaggatggtttagccataactgcaaccatagggaggatgctggcgtgatttgttctggcaaccatttgtcaactccagctccatttttgaacatcactaggcccaacacggattacagctgtggcggtttcctttctcagccatccggagatttcagttcccccttctaccccggaaactatcccaataatgcaaagtgcgtgtgggacatcgaggtgcagaataactaccgggtgaccgtgatattcagggatgtgcaactggaggggggatgtaattacgactacatcgaggtgttcgacggaccctaccgttcatctcctctcattgctcgggtatgcgacggagctagggggtcctttactagctcttccaattttatgtctattcgctttattagcgaccacagcataaccaggcggggtttcagggctgagtattacagcagcccgagtaatgactccacgaatctgctgtgtctgcccaatcatatgcaggctagcgtcagccggagttaccttcagtctttggggtttagtgcttcagatctcgtcatctcaacatggaacgggtactacgagtgcagaccccaaatcacaccaaatctcgtgattttcacaattccctattctggctgtggcactttcaagcaggccgataatgatactatcgactattcaaatttcctgaccgctgccgtgtctggaggcatcatcaagagaagaacggatctgagaatacacgtgagttgccgcatgcttcaaaatacctgggtggacaccatgtacatagcgaatgatacaattcacgtggcaaacaacactatccaggtcgaagaggttcaatacggtaatttcgatgtgaacatttctttctatacctctagttccttcctgtatccagtgacatcccggccatactacgtcgacctcaaccaggatctttatgtacaagctgaaatcttgcacagtgacgcagtcctgacgttattcgttgacacttgcgtcgccagcccctactcaaacgactttacctcattgacatacgatcttatccggagcggatgcgtgcgggatgatacatacgggccttatagctccccttcactcagaatcgccagattccggtttcgggcatttcatttcctgaatcggtttccttcagtctatctgcggtgtaaaatggtggtgtgcagagcttacgatccaagtagcaggtgctatagaggatgtgtactgcgcagcaaaagagatgtcggctcttaccaggagaaagtggacgtcgttcttggcccaattcagcttcaaacgcctccaagaagggaggaagaaccacgata

SEQ ID NO: 335257 - DNA, 7241 bp, Artificial Sequence
  derived and/or modified sequence
atgggtatttccaccgtaattctggaaatgtgtctgttgtgggggcaggtgctgtccaccgggggatggatccccaggaccactgactacgcatcactgattccttcagaggtccctctggaccccaccgttgcggagggatcccccttcccaagcgaatctactctcgagagtacggtggcagagggcagccccataagtttagaaagcacactggagagtaccgtcgctgaaggatctctgattccttcagaatcgaccctggagtcaactgtagctgagggatccgattccggccttgccttgcgactggtgaacggtgatggcagatgccagggacgcgttgagattctttaccggggttcctggggcaccgtgtgtgatgactcatgggacaccaacgacgccaacgtggtttgtcgccagttaggttgcggctgggccatgtcagcccctggcaacgcttggtttggacagggctcaggaccaatcgctcttgatgacgtccggtgtagcgggcatgagagttatctgtggtcctgtcctcataacggctggttgtcccataattgcggtcatggagaagatgctggcgtgatctgctccgcggcacagccccaaagtacgctcagacctgagtcctggccagtaagaatcagccccccagttcccaccgaagggagcgaaagctccctggccctgcgactggtaaatggtggcgataggtgcagaggccgagttgaggttctataccggggaagctggggtaccgtgtgtgatgattactgggatactaatgacgcaaatgtagtttgtcgccaacttgggtgcggctgggcaatgtccgctccaggcaacgcccagtttggccagggctcaggaccaatagtgttggacgacgtgaggtgcagcggccacgaatcctatttatggtcttgccctcataacggatggctgacacacaactgtggtcactctgaggacgctggagttatttgctccgcaccccagagccggcctacgccctccccagatacatggccaacctcacatgccagtacggctggtcctgaatcctctttagctttgcggctggtcaatggaggcgacaggtgccaagggcgagttgaggtgttatacagaggctcttggggcacagtatgtgacgatagttgggacacaagcgatgctaacgttgtatgcagacaactgggctgcgggtgggcaacttctgcccctggaaacgctagatttggacagggatccgggccaattgtgctggatgatgttcgctgtagtgggtatgagtcttatctttggtcctgtcctcacaatggctggctctcccataattgtcagcattcggaggacgccggagtgatctgttccgctgcccatagttggtccactcctagtccagatactctgcctacaatcactctgcccgcttccacagtgggcagtgagtcctccctggctctgcggttggttaatggaggcgacagatgccagggacgcgttgaggtgctttatcggggatcatgggggaccgtgtgtgatgattcatgggacactaatgacgctaatgtggtgtgtagacagttagggtgtggatgggcaatgcttgcccctggcaacgccagatttggacaagggagtgggccaatcgtgttggatgatgtcaggtgcagcggaaacgagtcgtatctgtggagttgcccccacaatggctggctgagtcacaactgtggacactctgaagatgcaggggtcatctgttccggccctgaatccagccttgccctgcgcctcgtgaacgggggagacaggtgtcagggtagggttgaagtgctgtaccgcggaagttggggaacagtgtgcgatgactcttgggacactaacgacgctaacgtcgtgtgcagacagttaggttgcggatgggctactagtgcaccagggaatgccagattcgggcaggggtccggaccgatcgtgctcgatgacgtgcgctgtagcgggcacgagtcctacctgtggagctgtcctaataacggctggctatcccacaactgtggtcaccatgaagatgctggcgttatttgctcagcagcacaatcaagaagcaccccgcgacctgacaccctttccaccatcacgctccctccttctaccgtgggcagcgagtcgagtttaaccctgcggctggtaaacgggagtgatcggtgtcaaggccgagtcgaagtactctaccggggatcctggggtacagtgtgcgacgatagctgggacaccaacgatgccaacgttgtatgtcgccagctgggttgcgggtgggccacatccgcccctgggaatgccaggtttggtcaaggctcaggcccaattgtgctggacgacgttagatgctccggccacgagtcttacctctggtcgtgcccccacaatggttggctcagccacaactgcggccatcacgaagatgcaggcgtcatatgctcggtgtcacaatcccgccctaccccctcacctgacacatggcccaccagtcacgcaagcactgcaggcccagaatccagtctagcactgaggcttgtgaacggcggtgacaggtgtcagggcagagttgaggttctctaccgagggtcttggggtacagtgtgcgatgatagctgggacacaagtgatgcgaacgtggtctgcagacagctcggctgcggatgggccacctcagcccctggcaacgctcgcttcggacaaggcagcgggcctatcgtgctggatgacgtgcggtgttccggttacgagagttacctatggtcctgtccacacaatggctggctgagccataattgccaacatagcgaagacgcaggcgtgatctgcagcgccgcacactcgtggtccaccccatctccagacacattgccgactattaccctcccagctagtaccgtgggcagtgagagctctttagctctgcggttggttaacggtggcgataggtgtcaagggcgagtggaagtcctctatcaaggcagctggggtacagtgtgcgatgactcttgggataccaacgacgccaacgtggtgtgccgccaattgggctgcggttgggccatgtcagcacccggtaacgcgaggttcgggcagggtagcggccctatcgtgctggacgacgtgagatgctcaggccatgagtcttacttgtggtcttgcccgcacaacggctggctatcccacaactgtgggcatagcgaagatgccggtgtgatttgcagcgcaagccagagtcgcccaaccccctctccggacacctggccgacatctcatgcctctaccgcaggcagtgagtcgagcctcgctttgcgactggtcaatggaggcgatagatgccaggggagggttgaggtcctatacaggggctcttggggaaccgtatgcgacgactattgggataccaacgatgccaacgtcgtgtgccggcagctgggatgtggatgggctatgtctgcaccaggtaacgccaggttcgggcagggttccggccctattgttctagacgatgttagatgctccgggcacgagagctatctctggtcatgtcctcacaacgggtggctgagccataactgtggccaccatgaggacgccggagtgatttgctcagcatctcagtcccagcctacaccgtcaccagatacttggcccacatctcacgcctcaacagcaggtagtgagagcagcctggcgctcaggcttgtcaatgggggagacagatgccagggcagagttgaagttctgtacagggggtcttgggggaccgtgtgtgacgactattgggacactaatgatgcaaatgtcgtgtgtcggcagcttgggtgcggttgggccacgagtgcaccaggcaatgctcgattcggtcaagggagcggacccatagtgttggatgacgtccgttgtagcgggcacgaatcttacctatggtcatgtccacataacggttggctaagccataactgtggtcatcacgaggacgccggagtaatttgttcggcaagtcagtctcagccaaccccaagccccgacacgtggcccactagtcacgcatcaactgctggcagtgagtcctctctggccctgcgcctggtaaacgggggagaccgctgccagggtagggtagaagtgctatataggggatcatggggtacggtgtgcgacgattattgggacacaaacgacgccaacgtcgtatgtcgacagttgggctgcgggtgggctacatctgctcccggaaacgccagattcggccaggggtcaggccctatagtgctggacgacgtgcgctgtagcgggcacgagtcttacctgtggagctgcccacacaacggatggctgagccataattgcggccaccacgaggacgcaggcgtcatatgtagtgcttcacagtctcaacctacaccttcccccgatacctggcctacttcccgcgcttctaccgccggttcggaaagcacacttgctctgcgattggttaatggaggggatcggtgtcgcggacgcgtggaggtcctctatcagggcagctggggcacggtttgtgatgactactgggacactaacgacgcgaacgttgtgtgccgacagctggggtgcggatgggcaatgagtgcgccaggaaatgcccagttcggacagggttcagggcctatcgtgttggacgacgtgcggtgctccgggcacgaaagttatctttggtcgtgccctcacaacggatggctgtcccacaactgtgggcaccatgaggacgctggtgtgatttgcagcgccgctcagagtcagagtacccctcggccagacacctggctaacaacaaatctacccgcactgacagtgggaagtgagagcagtctggccttgcggctggtcaatggcggtgaccgttgcaggggccgagtcgaggtgctgtacaggggatcttggggcacggtctgcgatgacagttgggataccaacgatgcaaacgttgtgtgccgccagcttggctgtgggtgggctatgtcggcccctggcaacgctaggtttggacagggctcagggccaatcgtgcttgatgacgtgcgctgctcagggaacgagtcatatctgtggagctgtccccacaaaggatggttgacccataattgtggacatcacgaggatgctggcgtgatctgctccgcaacgcagattaatagcacaaccacagattggtggcaccccactacaactaccacagccaggccgtccagcaattgtgggggtttcctgttctatgccagcggcacatttagcagtccatcctaccctgcctattatcctaataacgccaagtgcgtctgggaaatagaagttaatagcggatatcgaatcaatctcggattcagtaaccttaaactggaggctcaccacaattgcagcttcgattatgtcgaaatttttgatgggtcccttaattcctccctacttcttggcaaaatctgtaatgacactaggcaaatttttacttctagctacaacaggatgacaattcattttcgctctgatatcagtttccagaatacaggattcttggcctggtacaactctttccctagcgatgctactctgcggttggtgaatctgaactccagctacggcttgtgtgccggtagggtcgagatttatcatggaggaacctggggaaccgtgtgcgacgatagctggaccatccaggaggcagaggttgtgtgtaggcagctggggtgtgggagggccgtgagcgcactaggtaatgcgtatttcggctcgggctctgggcctattactctcgacgacgttgaatgttcagggaccgagtctaccctctggcagtgtcggaaccgcggatggttttcacacaactgtaatcaccgagaagatgcaggagtgatatgctcaggaaatcacctaagtactccggctcctttcctgaatattacacgccctaacactgattacagctgtggaggatttctgagccagcccagtggcgatttcagctcaccattttaccccggaaactatcctaataatgccaagtgcgtttgggatatcgaggttcaaaacaactatagagtcaccgtaatctttagggacgtgcagctcgaaggcggatgcaattatgactatatcgaagtgtttgatggtccctacagatcttcgcctctgatcgctagagtatgtgacggtgcacgcggaagctttaccagcagttcaaacttcatgtctatccggtttatctccgatcacagcattacccggcgtggcttcagagctgagtattatagttcacccagcaatgactccaccaacctgttgtgcttaccaaaccacatgcaggcatcagtaagccgttcatacctgcagagccttggattctcagcaagcgatttggttattagtacgtggaacggatattatgagtgcaggcctcagattacacccaaccttgtcatctttactatcccctactcaggatgcggaaccttcaagcaggccgacaacgacactatcgactacagtaactttctcaccgcggctgtcagtggtggcatcatcaagagaaggaccgacttgcggatccacgtgtcttgccggatgctgcagaatacctgggtggatacaatgtatatagctaacgatacgatccatgttgccaacaacacgattcaggtggaagaggtacagtatggcaatttcgacgtgaatatatccttttatacctcaagctccttcctgtatcctgtcacatctaggccgtattatgtcgatttgaatcaggatctgtatgtgcaggcggaaatactgcattctgacgccgtccttactctgttcgtggatacatgtgtggccagtccttactcgaacgatttcacctcactgacctacgatttaatccggagtggctgtgtcagagacgatacctatgggccttacagtagtccctctctgagaattgccagatttcgttttcgggcatttcacttcttaaatagattcccaagcgtgtacctgagatgcaagatggtggtgtgccgcgcttacgatccgtcaagccggtgttaccggggatgtgtgctcaggtctaagcgggatgtcggctcttatcaagaaaaggtcgacgtggtcctcggccctattcagctccagaccccccctaggagggaagaagagccacggta

SEQ ID NO: 335258 - protein, 2412 aa, Artificial Sequence
  derived and/or modified sequence
MGISTVILEMCLLWGQVLSTGGWIPRTTDYASLIPSEVPLDPTVAEGSPFPSESTLESTVAEGSPISLESTLESTVAEGSLIPSESTLESTVAEGSDSGLALRLVNGDGRCQGRVEILYRGSWGTVCDDSWDTNDANVVCRQLGCGWAMSAPGNAWFGQGSGPIALDDVRCSGHESYLWSCPHNGWLSHNCGHGEDAGVICSAAQPQSTLRPESWPVRISPPVPTEGSESSLALRLVNGGDRCRGRVEVLYRGSWGTVCDDYWDTNDANVVCRQLGCGWAMSAPGNAQFGQGSGPIVLDDVRCSGHESYLWSCPHNGWLTHNCGHSEDAGVICSAPQSRPTPSPDTWPTSHASTAGPESSLALRLVNGGDRCQGRVEVLYRGSWGTVCDDSWDTSDANVVCRQLGCGWATSAPGNARFGQGSGPIVLDDVRCSGYESYLWSCPHNGWLSHNCQHSEDAGVICSAAHSWSTPSPDTLPTITLPASTVGSESSLALRLVNGGDRCQGRVEVLYRGSWGTVCDDSWDTNDANVVCRQLGCGWAMLAPGNARFGQGSGPIVLDDVRCSGNESYLWSCPHNGWLSHNCGHSEDAGVICSGPESSLALRLVNGGDRCQGRVEVLYRGSWGTVCDDSWDTNDANVVCRQLGCGWATSAPGNARFGQGSGPIVLDDVRCSGHESYLWSCPNNGWLSHNCGHHEDAGVICSAAQSRSTPRPDTLSTITLPPSTVGSESSLTLRLVNGSDRCQGRVEVLYRGSWGTVCDDSWDTNDANVVCRQLGCGWATSAPGNARFGQGSGPIVLDDVRCSGHESYLWSCPHNGWLSHNCGHHEDAGVICSVSQSRPTPSPDTWPTSHASTAGPESSLALRLVNGGDRCQGRVEVLYRGSWGTVCDDSWDTSDANVVCRQLGCGWATSAPGNARFGQGSGPIVLDDVRCSGYESYLWSCPHNGWLSHNCQHSEDAGVICSAAHSWSTPSPDTLPTITLPASTVGSESSLALRLVNGGDRCQGRVEVLYQGSWGTVCDDSWDTNDANVVCRQLGCGWAMSAPGNARFGQGSGPIVLDDVRCSGHESYLWSCPHNGWLSHNCGHSEDAGVICSASQSRPTPSPDTWPTSHASTAGSESSLALRLVNGGDRCQGRVEVLYRGSWGTVCDDYWDTNDANVVCRQLGCGWAMSAPGNARFGQGSGPIVLDDVRCSGHESYLWSCPHNGWLSHNCGHHEDAGVICSASQSQPTPSPDTWPTSHASTAGSESSLALRLVNGGDRCQGRVEVLYRGSWGTVCDDYWDTNDANVVCRQLGCGWATSAPGNARFGQGSGPIVLDDVRCSGHESYLWSCPHNGWLSHNCGHHEDAGVICSASQSQPTPSPDTWPTSHASTAGSESSLALRLVNGGDRCQGRVEVLYRGSWGTVCDDYWDTNDANVVCRQLGCGWATSAPGNARFGQGSGPIVLDDVRCSGHESYLWSCPHNGWLSHNCGHHEDAGVICSASQSQPTPSPDTWPTSRASTAGSESTLALRLVNGGDRCRGRVEVLYQGSWGTVCDDYWDTNDANVVCRQLGCGWAMSAPGNAQFGQGSGPIVLDDVRCSGHESYLWSCPHNGWLSHNCGHHEDAGVICSAAQSQSTPRPDTWLTTNLPALTVGSESSLALRLVNGGDRCRGRVEVLYRGSWGTVCDDSWDTNDANVVCRQLGCGWAMSAPGNARFGQGSGPIVLDDVRCSGNESYLWSCPHKGWLTHNCGHHEDAGVICSATQINSTTTDWWHPTTTTTARPSSNCGGFLFYASGTFSSPSYPAYYPNNAKCVWEIEVNSGYRINLGFSNLKLEAHHNCSFDYVEIFDGSLNSSLLLGKICNDTRQIFTSSYNRMTIHFRSDISFQNTGFLAWYNSFPSDATLRLVNLNSSYGLCAGRVEIYHGGTWGTVCDDSWTIQEAEVVCRQLGCGRAVSALGNAYFGSGSGPITLDDVECSGTESTLWQCRNRGWFSHNCNHREDAGVICSGNHLSTPAPFLNITRPNNYSCGGFLSQPSGDFSSPFYPGNYPNNAKCVWDIEVQNNYRVTVIFRDVQLEGGCNYDYIEVFDGPYRSSPLIARVCDGARGSFTSSSNFMSIRFISDHSITRRGFRAEYYSSPSNDSTNLLCLPNHMQASVSRSYLQSLGFSASDLVISTWNGYYECRPQITPNLVIFTIPYSGCGTFKQADNDTIDYSNFLTAAVSGGIIKRRTDLRIHVSCRMLQNTWVDTMYIANDTIHVANNTIQVEEVQYGNFDVNISFYTSSSFLYPVTSRPYYVDLNQDLYVQAEILHSDAVLTLFVDTCVASPYSNDFTSLTYDLIRSGCVRDDTYGPYSSPSLRIARFRFRAFHFLNRFPSVYLRCKMVVCRAYDPSSRCYRGCVLRSKRDVGSYQEKVDVVLGPIQLQTPPRREEEPR

SEQ ID NO: 335259 - DNA, 7239 bp, Artificial Sequence
  derived and/or modified sequence
atgggcatcagcaccgtgatcctggagatgtgcctgctgtggggccaggtgctgagcaccggcggctggatccccagaaccaccgactacgccagcctgatccccagcgaggtgcccctggaccccaccgtggccgagggcagccccttccccagcgagagcaccctggagagcaccgtggccgagggcagccccatcagcctggagagcaccctggagagcaccgtggccgagggcagcctgatccccagcgagagcaccctggagagcaccgtggccgagggcagcgacagcggcctggccctgagactggtgaacggcgacggcagatgccagggcagagtggagatcctgtacagaggcagctggggcaccgtgtgcgacgacagctgggacaccaacgacgccaacgtggtgtgcagacagctgggctgcggctgggccatgagcgcccccggcaacgcctggttcggccagggcagcggccccatcgccctggacgacgtgagatgcagcggccacgagagctacctgtggagctgcccccacaacggctggctgagccacaactgcggccacggcgaggacgccggcgtgatctgcagcgccgcccagccccagagcaccctgagacccgagagctggcccgtgagaatcagcccccccgtgcccaccgagggcagcgagagcagcctggccctgagactggtgaacggcggcgacagatgcagaggcagagtggaggtgctgtacagaggcagctggggcaccgtgtgcgacgactactgggacaccaacgacgccaacgtggtgtgcagacagctgggctgcggctgggccatgagcgcccccggcaacgcccagttcggccagggcagcggccccatcgtgctggacgacgtgagatgcagcggccacgagagctacctgtggagctgcccccacaacggctggctgacccacaactgcggccacagcgaggacgccggcgtgatctgcagcgccccccagagcagacccacccccagccccgacacctggcccaccagccacgccagcaccgccggccccgagagcagcctggccctgagactggtgaacggcggcgacagatgccagggcagagtggaggtgctgtacagaggcagctggggcaccgtgtgcgacgacagctgggacaccagcgacgccaacgtggtgtgcagacagctgggctgcggctgggccaccagcgcccccggcaacgccagattcggccagggcagcggccccatcgtgctggacgacgtgagatgcagcggctacgagagctacctgtggagctgcccccacaacggctggctgagccacaactgccagcacagcgaggacgccggcgtgatctgcagcgccgcccacagctggagcacccccagccccgacaccctgcccaccatcaccctgcccgccagcaccgtgggcagcgagagcagcctggccctgagactggtgaacggcggcgacagatgccagggcagagtggaggtgctgtacagaggcagctggggcaccgtgtgcgacgacagctgggacaccaacgacgccaacgtggtgtgcagacagctgggctgcggctgggccatgctggcccccggcaacgccagattcggccagggcagcggccccatcgtgctggacgacgtgagatgcagcggcaacgagagctacctgtggagctgcccccacaacggctggctgagccacaactgcggccacagcgaggacgccggcgtgatctgcagcggccccgagagcagcctggccctgagactggtgaacggcggcgacagatgccagggcagagtggaggtgctgtacagaggcagctggggcaccgtgtgcgacgacagctgggacaccaacgacgccaacgtggtgtgcagacagctgggctgcggctgggccaccagcgcccccggcaacgccagattcggccagggcagcggccccatcgtgctggacgacgtgagatgcagcggccacgagagctacctgtggagctgccccaacaacggctggctgagccacaactgcggccaccacgaggacgccggcgtgatctgcagcgccgcccagagcagaagcacccccagacccgacaccctgagcaccatcaccctgccccccagcaccgtgggcagcgagagcagcctgaccctgagactggtgaacggcagcgacagatgccagggcagagtggaggtgctgtacagaggcagctggggcaccgtgtgcgacgacagctgggacaccaacgacgccaacgtggtgtgcagacagctgggctgcggctgggccaccagcgcccccggcaacgccagattcggccagggcagcggccccatcgtgctggacgacgtgagatgcagcggccacgagagctacctgtggagctgcccccacaacggctggctgagccacaactgcggccaccacgaggacgccggcgtgatctgcagcgtgagccagagcagacccacccccagccccgacacctggcccaccagccacgccagcaccgccggccccgagagcagcctggccctgagactggtgaacggcggcgacagatgccagggcagagtggaggtgctgtacagaggcagctggggcaccgtgtgcgacgacagctgggacaccagcgacgccaacgtggtgtgcagacagctgggctgcggctgggccaccagcgcccccggcaacgccagattcggccagggcagcggccccatcgtgctggacgacgtgagatgcagcggctacgagagctacctgtggagctgcccccacaacggctggctgagccacaactgccagcacagcgaggacgccggcgtgatctgcagcgccgcccacagctggagcacccccagccccgacaccctgcccaccatcaccctgcccgccagcaccgtgggcagcgagagcagcctggccctgagactggtgaacggcggcgacagatgccagggcagagtggaggtgctgtaccagggcagctggggcaccgtgtgcgacgacagctgggacaccaacgacgccaacgtggtgtgcagacagctgggctgcggctgggccatgagcgcccccggcaacgccagattcggccagggcagcggccccatcgtgctggacgacgtgagatgcagcggccacgagagctacctgtggagctgcccccacaacggctggctgagccacaactgcggccacagcgaggacgccggcgtgatctgcagcgccagccagagcagacccacccccagccccgacacctggcccaccagccacgccagcaccgccggcagcgagagcagcctggccctgagactggtgaacggcggcgacagatgccagggcagagtggaggtgctgtacagaggcagctggggcaccgtgtgcgacgactactgggacaccaacgacgccaacgtggtgtgcagacagctgggctgcggctgggccatgagcgcccccggcaacgccagattcggccagggcagcggccccatcgtgctggacgacgtgagatgcagcggccacgagagctacctgtggagctgcccccacaacggctggctgagccacaactgcggccaccacgaggacgccggcgtgatctgcagcgccagccagagccagcccacccccagccccgacacctggcccaccagccacgccagcaccgccggcagcgagagcagcctggccctgagactggtgaacggcggcgacagatgccagggcagagtggaggtgctgtacagaggcagctggggcaccgtgtgcgacgactactgggacaccaacgacgccaacgtggtgtgcagacagctgggctgcggctgggccaccagcgcccccggcaacgccagattcggccagggcagcggccccatcgtgctggacgacgtgagatgcagcggccacgagagctacctgtggagctgcccccacaacggctggctgagccacaactgcggccaccacgaggacgccggcgtgatctgcagcgccagccagagccagcccacccccagccccgacacctggcccaccagccacgccagcaccgccggcagcgagagcagcctggccctgagactggtgaacggcggcgacagatgccagggcagagtggaggtgctgtacagaggcagctggggcaccgtgtgcgacgactactgggacaccaacgacgccaacgtggtgtgcagacagctgggctgcggctgggccaccagcgcccccggcaacgccagattcggccagggcagcggccccatcgtgctggacgacgtgagatgcagcggccacgagagctacctgtggagctgcccccacaacggctggctgagccacaactgcggccaccacgaggacgccggcgtgatctgcagcgccagccagagccagcccacccccagccccgacacctggcccaccagcagagccagcaccgccggcagcgagagcaccctggccctgagactggtgaacggcggcgacagatgcagaggcagagtggaggtgctgtaccagggcagctggggcaccgtgtgcgacgactactgggacaccaacgacgccaacgtggtgtgcagacagctgggctgcggctgggccatgagcgcccccggcaacgcccagttcggccagggcagcggccccatcgtgctggacgacgtgagatgcagcggccacgagagctacctgtggagctgcccccacaacggctggctgagccacaactgcggccaccacgaggacgccggcgtgatctgcagcgccgcccagagccagagcacccccagacccgacacctggctgaccaccaacctgcccgccctgaccgtgggcagcgagagcagcctggccctgagactggtgaacggcggcgacagatgcagaggcagagtggaggtgctgtacagaggcagctggggcaccgtgtgcgacgacagctgggacaccaacgacgccaacgtggtgtgcagacagctgggctgcggctgggccatgagcgcccccggcaacgccagattcggccagggcagcggccccatcgtgctggacgacgtgagatgcagcggcaacgagagctacctgtggagctgcccccacaagggctggctgacccacaactgcggccaccacgaggacgccggcgtgatctgcagcgccacccagatcaacagcaccaccaccgactggtggcaccccaccaccaccaccaccgccagacccagcagcaactgcggcggcttcctgttctacgccagcggcaccttcagcagccccagctaccccgcctactaccccaacaacgccaagtgcgtgtgggagatcgaggtgaacagcggctacagaatcaacctgggcttcagcaacctgaagctggaggcccaccacaactgcagcttcgactacgtggagatcttcgacggcagcctgaacagcagcctgctgctgggcaagatctgcaacgacaccagacagatcttcaccagcagctacaacagaatgaccatccacttcagaagcgacatcagcttccagaacaccggcttcctggcctggtacaacagcttccccagcgacgccaccctgagactggtgaacctgaacagcagctacggcctgtgcgccggcagagtggagatctaccacggcggcacctggggcaccgtgtgcgacgacagctggaccatccaggaggccgaggtggtgtgcagacagctgggctgcggcagagccgtgagcgccctgggcaacgcctacttcggcagcggcagcggccccatcaccctggacgacgtggagtgcagcggcaccgagagcaccctgtggcagtgcagaaacagaggctggttcagccacaactgcaaccacagagaggacgccggcgtgatctgcagcggcaaccacctgagcacccccgcccccttcctgaacatcaccagacccaacaactacagctgcggcggcttcctgagccagcccagcggcgacttcagcagccccttctaccccggcaactaccccaacaacgccaagtgcgtgtgggacatcgaggtgcagaacaactacagagtgaccgtgatcttcagagacgtgcagctggagggcggctgcaactacgactacatcgaggtgttcgacggcccctacagaagcagccccctgatcgccagagtgtgcgacggcgccagaggcagcttcaccagcagcagcaacttcatgagcatcagattcatcagcgaccacagcatcaccagaagaggcttcagagccgagtactacagcagccccagcaacgacagcaccaacctgctgtgcctgcccaaccacatgcaggccagcgtgagcagaagctacctgcagagcctgggcttcagcgccagcgacctggtgatcagcacctggaacggctactacgagtgcagaccccagatcacccccaacctggtgatcttcaccatcccctacagcggctgcggcaccttcaagcaggccgacaacgacaccatcgactacagcaacttcctgaccgccgccgtgagcggcggcatcatcaagagaagaaccgacctgagaatccacgtgagctgcagaatgctgcagaacacctgggtggacaccatgtacatcgccaacgacaccatccacgtggccaacaacaccatccaggtggaggaggtgcagtacggcaacttcgacgtgaacatcagcttctacaccagcagcagcttcctgtaccccgtgaccagcagaccctactacgtggacctgaaccaggacctgtacgtgcaggccgagatcctgcacagcgacgccgtgctgaccctgttcgtggacacctgcgtggccagcccctacagcaacgacttcaccagcctgacctacgacctgatcagaagcggctgcgtgagagacgacacctacggcccctacagcagccccagcctgagaatcgccagattcagattcagagccttccacttcctgaacagattccccagcgtgtacctgagatgcaagatggtggtgtgcagagcctacgaccccagcagcagatgctacagaggctgcgtgctgagaagcaagagagacgtgggcagctaccaggagaaggtggacgtggtgctgggccccatccagctgcagaccccccccagaagagaggaggagcccagatag

SEQ ID NO: 335260 - DNA, 7683 bp, Artificial Sequence
  derived and/or modified sequence
tttatagcagcagtagaaatataccaccctagaggacacacctccttttagctaggtacctataaatgtccaggattttctattcaattgagaagaacccagcaaaatggggatctccacagtcatccttgaaatgtgtcttttatggggacaagttctatctacaggtgggtggatcccaaggactacagactacgcttcactgattccctcggaggtgcccttggatccaactgtagcagaaggttctccatttccctcggagtcgaccctggagtcaactgtagcagaaggttctccgatttccttggagtcaaccctggagtcaaccgtagcagaaggttctctgattccctcagagtcaaccctggagtcaactgtagcagaaggatctgattctggtttggccctgaggctggtgaatggagatggcaggtgtcagggccgagtggagatcctataccgaggctcctggggcaccgtgtgtgatgacagctgggacaccaatgatgccaacgtggtctgtaggcagctgggttgtggctgggccatgtcagctccaggaaatgcctggtttggccagggctcaggacccattgccctggatgatgtgcgctgctcaggacacgaatcctacctgtggagctgcccccacaatggctggctctcccataactgtggccatggtgaagatgctggtgttatctgctcagctgcccagcctcagtcaacactcaggccagaaagttggcctgtcaggatatcaccacctgtacccacagaaggatctgaatccagtttggccctgaggctggtgaatggaggcgacaggtgtcgaggccgagtggaggtcctataccgaggctcctggggcaccgtgtgtgatgactactgggacaccaatgatgccaatgtggtctgcaggcagctgggctgtggctgggccatgtcagccccaggaaatgcccagtttggccagggctcaggacccattgtcctggatgatgtgcgctgctcaggacatgagtcctacctgtggagctgcccccacaatggctggctcacccacaactgtggccatagtgaagacgctggtgtcatctgctcagctccccagtcccggccgacacccagcccagatacttggccgacctcacatgcatcaacagcaggacctgaatccagtttggccctgaggctggtgaatggaggtgacaggtgtcagggccgagtggaggtcctataccgaggctcctggggcaccgtgtgtgatgatagctgggacaccagtgacgccaatgtggtctgccggcagctgggctgtggctgggccacgtcagccccaggaaatgcccggtttggccagggttcaggacccattgtcctggatgacgtgcgctgctcaggctatgagtcctacctgtggagctgcccccacaatggctggctctcccataactgtcagcacagtgaagacgctggtgtcatctgctcagctgcccactcctggtcgacgcccagtccagacacgttgccgaccatcaccttacctgcatcgacagtaggatctgaatccagtttggccctgaggctggtgaatggaggtgacaggtgtcagggccgagtggaggtcctataccgaggctcctggggcaccgtgtgtgatgacagctgggacaccaatgatgccaatgtggtctgcaggcagctgggctgtggctgggccatgttggccccaggaaatgcccggtttggtcagggctcaggacccattgtcctggatgacgtgcgctgctcagggaatgagtcctacttgtggagctgcccccacaatggctggctctcccataactgtggccatagtgaagacgctggtgtcatctgctcaggacctgaatccagtttggccctgaggctggtgaatggaggtgacaggtgtcagggccgagtggaggtcctataccgaggctcttggggcaccgtgtgtgatgacagctgggacaccaatgatgccaatgtggtctgcaggcagctgggctgtggctgggccacgtcagccccaggaaatgcccggtttggtcagggctcaggacccattgtcctggatgatgtgcgctgctcaggacatgagtcctacctgtggagctgccccaacaatggctggctctcccacaactgtggccatcatgaagatgctggtgtcatctgctcagctgcccagtcccggtcgacgcccaggccagacacgttgtcgaccatcacgttacctccatcgacagtaggatctgaatccagtttgaccctgaggctggtgaatggaagtgacaggtgtcagggccgagtagaggtcctataccgaggctcctggggcaccgtgtgtgatgacagctgggataccaatgatgccaatgtggtctgcaggcagctgggctgtggctgggccacgtcggccccaggaaatgcccggtttggccagggctcaggacccattgttctggatgatgtgcgctgctcaggacacgagtcctacctgtggagctgcccccacaatggctggctctcccacaactgtggccatcatgaagatgctggtgtcatctgctcagtttcccagtcccggccgacacccagtccagatacttggccgacctcacatgcatcaacagcaggacctgaatccagtttggccctgaggctggtgaatggaggtgacaggtgtcagggccgagtggaggtcctataccgaggctcctggggcaccgtgtgtgatgatagctgggacaccagtgacgccaatgtggtctgccggcagctgggctgtggctgggccacgtcagccccaggaaatgcccggtttggccagggttcaggacccattgtcctggatgacgtgcgctgctcaggctatgagtcctacctgtggagctgcccccacaatggctggctctcccataactgtcagcacagtgaagacgctggtgtcatctgctcagctgcccactcctggtcgacgcccagtccagacacattgccgaccatcaccttgcctgcatcgacagtaggatctgaatccagtttggccctgaggctggtgaatggaggtgacaggtgtcagggccgagtggaggtcctataccaaggctcctggggcaccgtgtgcgatgacagctgggacaccaatgatgccaatgtcgtctgcaggcaactgggctgtggctgggccatgtcagccccaggaaatgcccggtttggtcagggctcaggacccattgtcctggatgatgtgcgctgctcaggacacgagtcttacctgtggagctgcccccacaatggctggctctcccacaactgtggccatagtgaagacgctggtgtcatctgctcagcttcccagtcccggccaacacctagtccagacacttggccaacctcacatgcatcaacagcaggatctgaatccagtttggccctgaggctggtgaatggaggtgacaggtgtcagggccgagtggaggtcctataccgaggctcctggggcaccgtgtgtgatgactactgggacaccaatgatgccaatgtggtttgcaggcagctgggctgtggctgggccatgtcagccccaggaaatgcccggtttggccagggttcaggacccattgtcctggatgatgtgcgctgctcaggacatgagtcctatctgtggagctgcccccacaatggctggctctcccacaactgtggccatcatgaagacgctggtgtcatctgctcagcttcccagtcccagccgacacccagcccagacacttggccaacctcacatgcatcaacagcaggatctgaatccagtttggccctgaggctggtgaatggaggtgacaggtgtcagggccgagtggaggtcctataccgaggctcctggggcaccgtgtgtgatgactactgggacaccaatgatgccaatgtggtttgcaggcagctgggctgtggctgggccacgtcagccccaggaaatgcccggtttggccagggttcaggacccattgtcctggatgatgtgcgctgctcaggacatgagtcctatctgtggagctgcccccacaatggctggctctcccacaactgtggccatcatgaagacgctggtgtcatctgctcagcttcccagtcccagccgacacccagcccagacacttggccaacctcacatgcatcaacagcaggatctgaatccagtttggccctgaggctggtgaatggaggtgacaggtgtcagggccgagtggaggtcctataccgaggctcctggggcaccgtgtgtgatgactactgggacaccaatgatgccaatgtggtttgcaggcagctgggctgtggctgggccacgtcagccccaggaaatgcccggtttggccagggttcaggacccattgtcctggatgatgtgcgctgctcaggacatgagtcctatctgtggagctgcccccacaatggctggctctcccacaactgtggccatcatgaagacgctggtgtcatctgctcagcttcccagtcccagccgacacccagcccagacacttggccaacctctcgtgcatcaacagcaggatctgaatccactttggccctgagactggtgaatggaggtgacaggtgtcgaggccgagtggaggtcctataccaaggctcctggggcaccgtgtgtgatgactactgggacaccaatgatgccaacgtggtctgcaggcagctgggctgtggctgggccatgtcagccccaggaaatgcccagtttggccagggctcaggacccattgtcctggatgatgtgcgctgctcaggacacgagtcttacctgtggagctgcccccacaatggctggctctcccacaactgtggccatcatgaagatgctggtgtcatctgctcagctgctcagtcccagtcaacgcccaggccagatacttggctgaccaccaacttaccggcattgacagtaggatctgaatccagtttggctctgaggctggtgaatggaggtgacaggtgtcgaggccgagtggaggtcctgtatcgaggctcctggggaaccgtgtgtgatgacagctgggacaccaatgatgccaatgtggtctgcaggcagctgggctgtggctgggccatgtcggccccaggaaatgcccggtttggccagggctcaggacccattgtcctggatgatgtgcgctgctcagggaatgagtcctacctgtggagctgcccccacaaaggctggctcacccacaactgtggccatcacgaagacgctggtgtcatctgctcagccacccaaataaattctactacgacagattggtggcatccaacaactacaaccactgcaagaccctcttcaaattgtggtggcttcttattctatgccagtgggacattctccagcccatcctaccctgcatactaccccaacaatgctaagtgtgtttgggaaatagaagtgaattctggttatcgcataaacctgggcttcagtaatctgaaattggaggcacaccataactgcagttttgattatgttgaaatctttgatggatcattgaatagcagtctcctgctggggaaaatctgtaatgataccaggcaaatatttacatcttcttacaaccgaatgaccattcactttcgaagtgacatcagtttccaaaacactggctttttggcttggtataactccttcccaagcgatgccaccttgaggttggtcaatttaaattcatcctatggtctatgtgccgggcgtgtagaaatttaccatggtggcacctgggggacagtttgtgatgactcctggaccattcaggaagctgaggtggtctgcagacagctagggtgtggacgtgcagtttcagcccttggaaatgcatattttggctctggctctggccccatcaccctggacgatgtagagtgctcagggacggaatccactctctggcagtgccggaaccgaggctggttctcccacaactgtaatcatcgtgaagatgctggtgtcatctgctcaggaaaccatctatcgacacctgctccttttctcaacatcacccgtccaaacaattattcctgcggaggcttcctatcccaaccatcaggggacttttccagcccattctatcccgggaactatccaaacaatgccaagtgtgtgtgggacattgaggtgcaaaacaactaccgtgtgactgtgatcttcagagatgtccagcttgaaggtggctgcaactatgattatattgaagttttcgatggcccctaccgcagttcccctctcattgctcgagtttgtgatggggccagaggctccttcacttcttcctccaacttcatgtccattcgcttcatcagtgaccacagcatcacaaggagagggttccgggctgagtactactccagtccctccaatgacagcaccaacctgctctgtctgccaaatcacatgcaagccagtgtgagcaggagctatctccaatccttgggcttttctgccagtgaccttgtcatttccacctggaatggatactacgagtgtcggccccagataacgccgaacctggtgatattcacaattccctactcaggctgcggcaccttcaagcaggcagacaatgacaccatcgactattccaacttcctcacagcagctgtctcaggtggcatcatcaagaggaggacagacctccgtattcacgtcagctgcagaatgcttcagaacacctgggtcgacaccatgtacattgctaatgacaccatccacgttgctaataacaccatccaggtcgaggaagtccagtatggcaattttgacgtgaacatttccttttatacttcctcatctttcttgtatcctgtgaccagccgcccttactacgtggacctgaaccaggacttgtacgttcaggctgaaatcctccattctgatgctgtactgaccttgtttgtggacacctgcgtggcatcaccatactccaatgacttcacgtctttgacttatgatctaatccggagtggatgcgtgagggatgacacctacggaccctactcctcgccatctcttcgcattgcccgcttccggttcagggccttccacttcctgaaccgcttcccctccgtgtacctgcgttgtaaaatggtggtgtgcagagcgtatgacccctcttcccgctgctaccgaggctgtgtgttgaggtcgaagagggatgtgggctcctaccaggaaaaggtggacgtcgtcctgggtcccatccagctgcagacccccccacgccgagaagaggagcctcggtaggtggtcgctctcagaccccactgtccaccggggcgcagacccctgactcggggacttgggatgttcctcttggtgtcatattccaactcagattgagccctacattgtgctgcacctggtcatacggagttgaatcagacctggttcccgcctcccccaaggctcatggtccttggaggacccgttgcagggtgaggtcaagagagttctgacctggatggcccatagacctgacgtcccagaatccatgcttctcatctgcaaaatgaaaatgtcaatacttacttcttagcactgttgagagggttacttacataaaggaattttggtgaaactgc

SEQ ID NO: 335261 - DNA, 7239 bp, Artificial Sequence
  derived and/or modified sequence
atgggaatcagtacagtcatcctcgaaatgtgtctgctgtggggtcaggtcctgtccacaggtggctggataccacgcactactgactatgcatccctgataccatcagaagttcccttagatccaacggttgccgagggctcacctttcccatccgaatcaacacttgagagcacagttgccgaaggctcacccatctcactggagagtactctcgagtccacagttgcagagggcagtctgatacctagtgaatcgacactggaaagcaccgtggccgagggctctgacagtgggttggccctgagactggtcaacggagacggacggtgtcagggcagggttgaaatcctgtataggggaagttgggggacggtgtgtgacgacagctgggatacaaatgatgccaatgtggtatgtagacagctgggctgcgggtgggcgatgtctgcccccggcaacgcctggtttggccagggcagcggcccaattgctttggacgatgtgcgctgtagcgggcacgagagctacctgtggtcatgcccacataatgggtggctatcccataactgtggccatggagaagacgcaggagttatttgctctgcagcccagccgcagagcacactgcggccggaatcatggccagtgcggatcagtccacctgtgcccacggaaggaagcgagtctagtttggctctgagactggtgaacggtggtgacagatgccgggggagggtagaagtcttgtatagaggctcatgggggactgtctgtgacgactattgggatacaaatgacgcgaatgtcgtgtgccgacagctcgggtgtggttgggctatgtccgctcccggcaacgcccagtttggccagggatctggcccaatcgtgctggacgatgtccggtgtagcggacacgaatcctacttgtggtcatgtcctcacaatgggtggcttacccataattgtgggcactctgaagacgccggagttatctgctctgccccccagagccgccccactccatcacctgacacttggccaaccagccatgcgagtaccgccggccccgagtcttctttggcgctgcggctggtgaacggcggagataggtgccagggacgcgtggaagttctctacaggggcagctgggggaccgtttgtgacgatagctgggatacatccgacgctaatgtggtgtgccggcaactcggatgcggatgggctacctcggcacctggaaacgccaggtttggacaagggtcggggccaatagtactggacgatgtgagatgctccgggtatgaaagctacctttggagctgcccacataacggatggctgtcgcacaactgccagcacagtgaagacgctggtgtcatctgttccgctgcacactcttggtctaccccctcaccagataccctgccaactattaccttacccgcgtccacggtcggcagcgaaagcagtctcgctctgcgtcttgtcaacgggggcgaccggtgtcagggtagagtagaggtcctatatcggggttcttggggcacggtgtgcgatgatagctgggatacgaatgatgctaatgtggtatgtcgacagctgggctgcggttgggccatgctcgcaccagggaatgctaggttcggacagggttctggtcctatcgtcctggatgatgtgcgctgcagtggtaacgagagctacctgtggtcctgccctcataacggctggttaagtcataattgtggccatagtgaagatgctggtgtgatttgctccggtccagagtcttctctggccctgaggctcgttaatgggggtgacagatgtcaggggagagtagaagtgctttatcgcggaagttggggaacagtttgtgacgactcttgggacaccaacgacgcaaacgtggtatgtcggcagcttggctgcggatgggctaccagcgctccaggaaacgccagattcggacaaggatcaggtccaattgtcctggatgatgtcagatgcagcggacacgagtcctacctctggtcgtgccccaataatgggtggctgagtcacaattgcgggcatcacgaggatgcaggagtgatatgctccgcagctcagagtcgctctactcctagacccgacactctgagcactatcacactgccgccgtcaaccgtgggctccgaatcatcgcttactctccgtctggtgaacggcagcgatagatgccaaggaagagtggaagtcttatatcgagggagctggggaactgtttgcgacgacagctgggacactaacgatgctaacgtagtatgtaggcaactgggatgtggatgggctactagcgcaccaggcaacgctaggtttgggcagggctctgggccaatagtgctggacgatgttcgttgcagcggccatgagagctacctgtggtcttgcccccacaacgggtggctttcccataattgcggacatcatgaagatgccggcgtcatttgttcagtctcccagagccggccaactccaagcccggacacatggccaacttcacacgccagcaccgctggacctgagtcctcactggcacttcggttggtgaatggaggcgatcggtgtcagggccgagtggaggtgctgtacagggggagctggggaacagtctgcgacgactcttgggatacctcagacgccaacgtagtctgtcggcagcttggttgcggctgggctacgtcggctccagggaatgcccggttcggccagggcagtggtcctattgttcttgacgacgtgagatgctctgggtatgagtcatacctgtggtcctgtccccacaatggatggctttcacataactgccagcacagcgaagacgccggggtgatctgcagtgcagctcattcttggtccacccccagtccagataccctgcccaccattacattgcctgccagcaccgtcggctctgaaagtagcttggcattgcggcttgtgaacggcggggaccgatgtcaggggcgggtcgaggtgctataccagggttcctggggcacagtgtgtgacgactcctgggacactaatgacgccaacgttgtgtgtagacaactgggatgcgggtgggcaatgtctgcccctgggaacgcaaggtttgggcaaggcagtgggcctattgtcctcgacgatgtcaggtgctccggccacgagagctatctatggagctgtcctcataacggctggctatcacataattgtggccactccgaggatgccggagtcatctgttcggcttcccagtcgcggcccacaccatctcccgacacttggcccaccagccacgcctctactgccggctctgaatcctcacttgcattacgcctggtgaacggtggtgaccgatgtcagggacgagtcgaagtgctgtatcgaggatcatggggcactgtttgtgacgattattgggacaccaacgacgcgaacgttgtctgtagacagctcggctgtggttgggccatgtcagcccccggcaacgccagattcggtcagggaagtggaccaattgtgttagacgatgtgcgctgctcgggtcacgaatcctacctgtggtcctgtcctcataatggttggctgagtcataactgcggacatcatgaagatgctggagttatctgctctgcatcccagagtcaacccactccatctcccgatacatggccgacgtcgcatgcgagtactgctggaagcgaaagctcgcttgccctgaggctcgttaacggcggtgatcgctgtcagggtcgggtagaagtcctttacagggggagctgggggacagtatgcgacgattattgggacacaaacgacgctaatgtggtatgccgacagctggggtgtggctgggccaccagcgccccaggaaacgcacgttttggccaggggagtggccctatcgtcttggatgacgtaaggtgtagcggccacgaatcctacctttggtcttgtccgcacaacggctggctctcacataactgcgggcaccatgaagatgctggggttatctgctccgcctctcaaagccagccaactccctctccagatacatggcctacctcccacgcatctactgccggaagtgaatcttccctggccctgcgcttagtgaatggcggcgatagatgtcagggcagagtagaggtgctttaccgagggtcttggggaacagtgtgcgacgattactgggacaccaacgatgctaacgtggtatgtagacagctgggctgcggatgggccacaagcgctccaggaaatgcccgtttcggtcaaggaagcggacctatcgtgcttgatgatgtgcgatgttctggccacgagagctacctgtggtcttgtccccataacggttggcttagtcacaactgtggccatcatgaagacgccggggtaatttgcagcgcctcacagtcgcaaccaacaccgagtccagacacgtggccaacgagcagagccagcactgccgggagcgaatccacacttgcgcttcgcctggtgaatggtggcgacagatgcaggggccgggtcgaagtgttgtaccagggcagttggggcaccgtgtgtgatgactactgggatactaacgacgcaaacgtggtgtgccgacagctgggatgcggatgggctatgtccgcgcccggtaacgcccagtttggacaaggctccggacccatcgtcctcgacgacgtgagatgtagtgggcatgaatcctacctgtggtcgtgcccacacaatggatggttgagccataactgtggccatcacgaagacgcaggagttatctgttccgcagcccagagtcaatccactcctagaccagatacgtggttgactacgaacctgcctgccctgaccgttggcagtgagtctagtctagcactgcggctcgtcaacggcggcgacagatgtaggggtcgggtcgaagtgctgtaccgtggctcttggggcaccgtttgtgatgatagttgggacactaacgatgccaacgtggtatgccgccaacttggttgcgggtgggccatgagtgcacctggaaatgccagattcgggcaaggcagcggccctattgttctggatgatgtaagatgctcaggcaacgagagctacttatggtcatgccctcacaaaggatggctgacacacaattgcggtcatcacgaagacgctggcgtgatatgcagtgccacccagatcaatagcactaccaccgattggtggcatcctaccaccaccacaacagccaggccgtcctctaattgcggggggttcttattctacgcgagtggcaccttctcgagtccttcctatccggcctactatcctaacaacgccaaatgtgtgtgggagattgaagtgaattccggttaccggattaatctggggtttagcaacctcaaactggaggcgcatcacaattgttccttcgattacgtggaaatcttcgacggctccctaaattcttcactgcttctgggcaagatctgtaatgacacaaggcagatcttcacctcatcgtacaaccggatgaccatccactttagatcagatatctctttccagaacacagggttcctggcttggtacaatagtttcccctccgacgccaccctgcgactggtcaatctaaactcatcctatgggctgtgtgccggccgggtggagatttatcacgggggcacctggggcactgtctgcgacgatagctggacaatacaggaagccgaggtggtgtgtcgccagctggggtgtgggcgggcagtgagcgcgctaggaaatgcatacttcggaagcggatccggcccaattacactggatgacgtcgaatgttcaggaactgagtcaacattatggcagtgtagaaacagggggtggttttcccataattgtaatcacagagaggatgctggagtgatatgcagcggaaatcacctctccacacctgccccttttttaaacattacaaggcccaacaattacagttgcgggggttttctgagtcagccttccggcgacttctctagccccttctaccctgggaactacccaaataacgcaaagtgtgtatgggatattgaagtacagaacaattaccgtgtcacagtgatatttagggacgtccagcttgaaggggggtgcaattatgactatatcgaagttttcgacggaccataccggagctccccactaatcgcacgggtctgtgatggggcacggggctcctttactagtagttccaactttatgagcattaggttcatttccgaccacagcatcactcgtcggggctttagggcagaatactatagtagcccttccaatgacagtactaacctgctgtgtctacctaaccatatgcaggcatctgtgtctaggagctacctgcagagcctcggtttctcggcttcagatctggtgattagtacctggaacggctactatgaatgcaggcctcagattacccctaacctggtgatctttacaattccctactctggttgtggcacttttaaacaggccgacaatgatactatcgactactctaacttcctcaccgccgctgtgagtggaggaatcatcaaacgccggaccgaccttaggatccatgtcagctgtagaatgttgcaaaacacctgggtggataccatgtatattgccaacgacacgatccatgtggcaaacaatacgattcaggtggaagaagtgcagtacggtaattttgatgtcaatatctccttctatacatccagctcattcttgtaccctgttacctctagaccctactacgtggatctcaatcaggacctctacgtacaagccgagatcctgcactcagatgccgtccttaccctcttcgtcgacacgtgcgtggcaagtccctatagcaacgactttacctcacttacgtatgacctgatccgaagtggctgcgtgcgcgacgacacatacgggccctactcttcaccgtcattaaggatagcacgcttccggttccgggccttccactttctcaacagatttccgtctgtttaccttagatgcaaaatggtggtgtgtcgggcctacgatccatccagccgttgctatcgaggctgtgtcctcagaagcaagagggacgtgggcagctatcaggagaaggtagacgtggttctggggcctatccagctccagacgccccccagacgtgaggaggagccccgctag

SEQ ID NO: 335262 - DNA, 7239 bp, Artificial Sequence
  derived and/or modified sequence
atgggcatcagcaccgtcatcctggagatgtgcctgctgtggggccaggtgctgagcactggaggctggatccccaggaccacagattatgccagcctcatccccagcgaggtgcccctggaccccaccgtggccgagggcagccccttccccagcgagagcaccctggagagcacagtggccgagggcagccccatcagcctggagagcaccctggagagcacagtggccgagggcagcctcatccccagcgagagcaccctggagagcacagtggccgagggcagtgacagcggcctggccctgcggctggtgaatggagatggccgctgccagggccgggtggagatcctgtaccggggctcctggggcaccgtgtgtgatgacagctgggacaccaatgatgccaacgtggtgtgccggcagctgggctgcggctgggccatgtctgcccctggaaatgcctggtttggccagggcagcggccccatcgccctggatgatgtgcgctgcagcggccacgagagctacctgtggagctgcccccacaacggctggctgagccacaactgtggccatggagaagatgctggggtcatctgcagcgctgcccagccccagagcaccctgcggcctgagagctggcctgtgcgcatcagcccccctgtgcccacagagggcagcgagagcagcctggccctgcggctggtgaatggaggagaccgctgccggggccgggtggaggtgctgtaccggggctcctggggcaccgtgtgtgatgactactgggacaccaatgatgccaacgtggtgtgccggcagctgggctgcggctgggccatgtctgcccctggaaatgcccagtttggccagggcagcggccccatcgtgctggatgatgtgcgctgcagcggccacgagagctacctgtggagctgcccccacaacggctggctgacccacaactgtggccacagtgaagatgctggggtcatctgcagcgccccccagagccggcccacccccagcccagacacctggcccaccagccacgccagcacagctggccctgagagcagcctggccctgcggctggtgaatggaggagaccgctgccagggccgggtggaggtgctgtaccggggctcctggggcaccgtgtgtgatgacagctgggacaccagtgatgccaacgtggtgtgccggcagctgggctgcggctgggccaccagcgcccctggaaatgcccgcttcggccagggcagcggccccatcgtgctggatgatgtgcgctgcagcggctatgagagctacctgtggagctgcccccacaacggctggctgagccacaactgccagcacagtgaagatgctggggtcatctgcagcgctgcccacagctggagcacccccagcccagacaccctgcccaccatcaccctgcctgccagcacagtgggcagcgagagcagcctggccctgcggctggtgaatggaggagaccgctgccagggccgggtggaggtgctgtaccggggctcctggggcaccgtgtgtgatgacagctgggacaccaatgatgccaacgtggtgtgccggcagctgggctgcggctgggccatgctggcccctggaaatgccaggtttggccagggcagcggccccatcgtgctggatgatgtgcgctgcagcggaaatgaaagctacctgtggagctgcccccacaacggctggctgagccacaactgtggccacagtgaagatgctggggtcatctgcagcggccctgagagcagcctggccctgcggctggtgaatggaggagaccgctgccagggccgggtggaggtgctgtaccggggctcctggggcaccgtgtgtgatgacagctgggacaccaatgatgccaacgtggtgtgccggcagctgggctgcggctgggccaccagcgcccctggaaatgccaggtttggccagggcagcggccccatcgtgctggatgatgtgcgctgcagcggccacgagagctacctgtggagctgccccaacaacggctggctgagccacaactgtggccaccatgaagatgctggggtcatctgcagcgctgcccagagccgcagcacccccaggccagacaccctgagcaccatcaccctgccccccagcacagtgggcagcgagagcagcctgaccctgcggctggtgaatggaagtgaccgctgccagggccgggtggaggtgctgtaccggggctcctggggcaccgtgtgtgatgacagctgggacaccaatgatgccaacgtggtgtgccggcagctgggctgcggctgggccaccagcgcccctggaaatgcccgcttcggccagggcagcggccccatcgtgctggatgatgtgcgctgcagcggccacgagagctacctgtggagctgcccccacaacggctggctgagccacaactgtggccaccatgaagatgctggggtcatctgcagcgtgtcccagagccggcccacccccagcccagacacctggcccaccagccacgccagcacagctggccctgagagcagcctggccctgcggctggtgaatggaggagaccgctgccagggccgggtggaggtgctgtaccggggctcctggggcaccgtgtgtgatgacagctgggacaccagtgatgccaacgtggtgtgccggcagctgggctgcggctgggccaccagcgcccctggaaatgccaggtttggccagggcagcggccccatcgtgctggatgatgtgcgctgcagcggctatgagagctacctgtggagctgcccccacaacggctggctgagccacaactgccagcacagtgaagatgctggggtcatctgcagcgctgcccacagctggagcacccccagcccagacaccctgcccaccatcaccctgcctgccagcacagtgggcagcgagagcagcctggccctgcggctggtgaatggaggagaccgctgccagggccgggtggaggtgctgtaccagggctcctggggcaccgtgtgtgatgacagctgggacaccaatgatgccaacgtggtgtgccggcagctgggctgcggctgggccatgtctgcccctggaaatgcccgcttcggccagggcagcggccccatcgtgctggatgatgtgcgctgcagcggccacgagagctacctgtggagctgcccccacaacggctggctgagccacaactgtggccacagtgaagatgctggggtcatctgcagcgccagccagagccggcccacccccagcccagacacctggcccaccagccacgccagcacagctggcagcgagagcagcctggccctgcggctggtgaatggaggagaccgctgccagggccgggtggaggtgctgtaccggggctcctggggcaccgtgtgtgatgactactgggacaccaatgatgccaacgtggtgtgccggcagctgggctgcggctgggccatgtctgcccctggaaatgccaggtttggccagggcagcggccccatcgtgctggatgatgtgcgctgcagcggccacgagagctacctgtggagctgcccccacaacggctggctgagccacaactgtggccaccatgaagatgctggggtcatctgcagcgccagccagagccagcccacccccagcccagacacctggcccaccagccacgccagcacagctggcagcgagagcagcctggccctgcggctggtgaatggaggagaccgctgccagggccgggtggaggtgctgtaccggggctcctggggcaccgtgtgtgatgactactgggacaccaatgatgccaacgtggtgtgccggcagctgggctgcggctgggccaccagcgcccctggaaatgcccgcttcggccagggcagcggccccatcgtgctggatgatgtgcgctgcagcggccacgagagctacctgtggagctgcccccacaacggctggctgagccacaactgtggccaccatgaagatgctggggtcatctgcagcgccagccagagccagcccacccccagcccagacacctggcccaccagccacgccagcacagctggcagcgagagcagcctggccctgcggctggtgaatggaggagaccgctgccagggccgggtggaggtgctgtaccggggctcctggggcaccgtgtgtgatgactactgggacaccaatgatgccaacgtggtgtgccggcagctgggctgcggctgggccaccagcgcccctggaaatgccaggtttggccagggcagcggccccatcgtgctggatgatgtgcgctgcagcggccacgagagctacctgtggagctgcccccacaacggctggctgagccacaactgtggccaccatgaagatgctggggtcatctgcagcgccagccagagccagcccacccccagcccagacacctggcccaccagccgggccagcacagctggcagcgagagcaccctggccctgcggctggtgaatggaggagaccgctgccggggccgggtggaggtgctgtaccagggctcctggggcaccgtgtgtgatgactactgggacaccaatgatgccaacgtggtgtgccggcagctgggctgcggctgggccatgtctgcccctggaaatgcccagtttggccagggcagcggccccatcgtgctggatgatgtgcgctgcagcggccacgagagctacctgtggagctgcccccacaacggctggctgagccacaactgtggccaccatgaagatgctggggtcatctgcagcgctgcccagagccagagcacccccaggccagacacctggctgaccaccaacctgcctgccctgactgtgggcagcgagagcagcctggccctgcggctggtgaatggaggagaccgctgccggggccgggtggaggtgctgtaccggggctcctggggcaccgtgtgtgatgacagctgggacaccaatgatgccaacgtggtgtgccggcagctgggctgcggctgggccatgtctgcccctggaaatgccaggtttggccagggcagcggccccatcgtgctggatgatgtgcgctgcagcggaaatgaaagctacctgtggagctgcccccacaagggctggctgacccacaactgtggccaccatgaagatgctggggtcatctgcagcgccacccagatcaacagcaccaccacagactggtggcaccccaccaccaccaccacagcccggcccagcagcaactgtggcggcttcctgttctacgccagcggcaccttcagcagccccagctacccagcctactaccccaacaatgccaagtgtgtgtgggagattgaggtgaacagcggctaccgcatcaacctgggcttcagcaacctgaagctggaggcccaccacaactgcagctttgattatgtggagatctttgatggcagcctgaacagcagcctgctgctgggcaagatctgcaatgacacccggcagatcttcaccagcagctacaacaggatgaccatccacttcagaagtgacatctccttccagaacacaggcttcctggcctggtacaacagcttccccagtgatgccaccctgcggctggtgaacctgaacagcagctatggcctgtgtgccggccgggtggagatctaccatggaggcacctggggcaccgtgtgtgatgacagctggaccatccaggaggccgaggtggtgtgccggcagctgggctgcggccgggctgtgtctgccctgggcaatgcctactttggaagtggcagcggccccatcaccctggatgatgtggagtgcagcggcacagagagcaccctgtggcagtgcaggaacagaggctggttcagccacaactgcaaccacagagaagatgctggggtcatctgcagcggcaaccacctgagcaccccagcccccttcctgaacatcacccggcccaacaactacagctgtggcggcttcctgagccagcccagcggggacttcagcagccccttctacccaggcaactaccccaacaatgccaagtgtgtgtgggacatcgaggtgcagaacaactacagagtgaccgtcatcttcagagatgtgcagctggagggcggctgcaactatgactacatcgaggtgtttgatggcccctaccgcagcagccccctcatcgcccgggtgtgtgatggagcccggggcagcttcaccagcagcagcaacttcatgagcatccgcttcatcagtgaccacagcatcacccggcggggcttccgggcagagtactacagcagccccagcaatgacagcaccaacctgctgtgcctgcccaaccacatgcaggcctctgtgagccgcagctacctgcagagcctgggcttcagcgccagtgacctggtgatcagcacctggaatggctactatgagtgccggccccagatcacccccaacctggtgatcttcaccatcccctacagcggctgcggcaccttcaagcaggccgacaatgacaccatcgactacagcaacttcctgacagctgctgtgtctgggggcatcatcaagagaagaacagacctgcgcatccacgtgtcctgcaggatgctgcagaacacctgggtggacaccatgtacatcgccaatgacaccatccacgtggccaacaacaccatccaggtggaggaggtgcagtatggcaactttgatgtgaacatctccttctacaccagcagcagcttcctgtaccctgtgaccagccggccctactacgtggacctgaaccaggacctgtatgtgcaggccgagatcctgcacagtgatgctgtgctgaccctgtttgtggacacctgtgtggccagcccctacagcaatgacttcaccagcctgacctatgacctgatccgcagcggctgtgtgagagatgacacctacggcccctacagcagccccagcctgcgcatcgcccgcttccgcttccgggccttccacttcctgaaccgcttccccagcgtgtacctgcgctgcaagatggtggtgtgccgggcctatgaccccagcagccgctgctaccggggctgtgtgctgcggagcaagagagatgtgggcagctaccaggagaaggtggatgtggtgctgggccccatccagctgcagaccccaccccggcgggaggaggagcccaggtag

SEQ ID NO: 335263 - DNA, 7239 bp, Artificial Sequence
  derived and/or modified sequence
atgggcatcagcaccgtgatcctggagatgtgcctgctgtggggccaggtcctgtctactgggggttggataccccggaccaccgactatgcctcccttatcccctccgaggtacctcttgatcccactgtggctgagggcagtccctttccttcggagagcacactcgagtctaccgttgccgagggatccccaatctctctcgagtctactttagagagcactgtcgccgaggggagcctcatcccaagtgaatcaaccttggagtccacggtagcagagggttctgactcaggcctggcactgcgtctagtgaatggtgatggcaggtgtcagggcagggtcgagatcctttatcggggatcctggggtactgtttgtgatgactcttgggacaccaacgatgccaatgtggtctgtcggcagctggggtgcggatgggccatgagcgcccccggtaacgcttggtttggacagggttccggcccaatcgcactcgacgatgtgcggtgtagtgggcacgagtcttacctgtggtcttgccctcataacggatggttgtcccataattgtgggcatggggaggacgctggcgtgatttgctctgccgcccagccccagagcacgttgcggccagagagttggccagtgagaatcagcccacccgttccgacagagggcagcgagagctcactggctttgaggcttgtcaatgggggtgacaggtgtcggggccgcgttgaagtcctgtatcgcgggtcttggggcaccgtatgcgacgactattgggacaccaacgacgcgaacgtcgtgtgtcggcagctgggatgcggttgggctatgtccgctcccggaaatgcacagttcgggcagggctctggtcctattgttctagacgatgttcgttgctccggacatgaatcgtatctgtggtcttgccctcacaacggttggttgacccacaactgtggccactccgaagacgcgggagtgatttgcagtgccccccagtccaggccaactccttccccagacacatggcccacctctcatgcctccacagccggtcccgaatcttccctggcattgagattagtcaacggtggtgaccgttgtcaggggcgggtcgaagtgctgtacagaggctcttggggaacagtgtgcgacgattcatgggacacatccgacgcgaatgtcgtttgccgccagttgggttgcggatgggctactagcgcccctggcaatgctcgcttcggccagggatcgggccccatcgtgttagatgatgttcggtgcagtggatacgaatcctacctgtggagctgtcctcacaatggctggttgtcacataattgccaacactcagaagatgccggcgtaatctgctcagcagcccactcatggagcactccttcgccggatactctacccaccataacactgcccgctagcaccgtcggaagcgaatcaagtctggccttgcggctggtaaatggaggagataggtgccaggggcgggtagaagtgctgtatcggggatcatggggcactgtttgcgatgactcgtgggacactaatgacgcaaacgtggtttgccggcagctgggttgtggttgggctatgttggcacccggaaatgcgaggtttggacaaggctctgggcccattgttttggatgatgtgcgctgtagcggcaacgagagctacctgtggagttgtccccacaatggctggcttagtcacaattgcgggcactcagaggacgcaggagtgatttgcagtggccctgaatcttctctggctctgagacttgtgaatggcggcgaccgctgtcagggacgcgtggaggttctctaccggggttcctggggcacagtgtgcgacgactcttgggacacgaacgatgcgaatgttgtctgtaggcaactgggctgcgggtgggcgacatcggctcccgggaacgcacgctttggccagggctctggtccgatcgttcttgacgacgtgcggtgttctggacacgagagctatctttggtcctgtcctaataacggctggcttagccacaactgcgggcatcatgaagatgccggcgtgatctgttcagccgcccagtctaggagtactccacgcccagacacactgagcaccatcacactgccaccttcaaccgtggggtccgagtcctccctgaccctgagactggtcaatggaagtgacagatgtcagggcagagttgaagtgttataccggggcagctggggtaccgtgtgcgatgattcatgggatacaaacgacgccaatgtggtatgccgacagttaggctgcggatgggcaacctcagcgcccggcaacgcccggtttgggcaggggtccggccctatcgttctcgatgatgtgagatgtagcggacacgagagctacctatggagctgcccacataatggttggctaagtcacaattgtggacaccacgaggacgctggcgtaatctgtagcgtgtcacagagccgcccaaccccctcccccgatacttggcccacaagtcacgcctctaccgcagggccagaatcctcactcgctttacggctggttaacggtggagatcgctgccaaggtcgggttgaagtcctatatcggggtagctgggggaccgtctgcgatgactcctgggacacttccgacgcgaacgtcgtatgtcgtcagctgggctgcggctgggcaaccagtgcccctgggaacgcccgtttcggccagggtagcggcccaatcgtactcgatgatgtcaggtgctctgggtatgaatcatacctgtggagttgtccccataacggctggctgtcccacaattgtcagcactcggaagacgcaggtgtgatttgtagtgccgcacactcttggtctacaccctcaccagacactctgcccacaatcacattgcctgcatctactgtcggctctgaatcttctctcgctcttaggctggtgaatgggggggatcgttgtcagggtagagtcgaggttttgtatcaaggctcctggggtacagtgtgcgacgactcctgggatacaaatgatgccaacgtggtgtgccgacaactggggtgtggctgggcaatgtcagccccagggaacgcacggttcggtcaagggagcggcccaattgtgctggatgatgtgaggtgctccggacacgaatcatacttgtggagttgccctcacaatggctggttatcacacaattgcgggcatagcgaggacgcaggtgtgatctgctcggcctctcagtcccggcctaccccctcaccagatacgtggcccacaagtcacgcttcaactgcaggctctgagagtagcttggctctgcggctcgttaacggaggagataggtgtcagggaagagtggaggtgctgtatcgggggtcctggggaactgtatgcgatgattactgggacacgaacgacgcgaatgttgtttgccgccagcttggctgcggttgggccatgtctgctccgggaaacgctaggttcggccagggaagcggccccatcgtgctggacgacgtcaggtgtagtggacacgaaagctacttgtggtcgtgccctcacaatgggtggctcagccacaactgcggtcatcacgaagacgctggcgtgatttgttccgccagtcagtcacaaccgacccctagcccagacacgtggccaacttcacacgcctccacggctggcagcgagtctagcttagctcttcggctagttaatgggggcgatcggtgtcaagggcgagtggaggtgctgtacagaggcagctggggcactgtgtgtgatgactattgggacactaatgacgctaacgtggtttgcaggcaactggggtgtgggtgggcaacgagtgcccccggcaatgcccgtttcggccagggcagcgggcctatcgtccttgatgacgtgagatgcagcggacacgagtcttacctgtggagttgtccccacaacggctggctgtcccacaactgcgggcaccatgaggatgcgggagtaatctgttccgcctcacagagccaaccaacacctagcccagatacatggcccactagccacgctagcacagcaggcagtgagagcagcctggccctcaggctcgtaaatggtggcgaccgatgtcagggtcgtgtggaagtactttatagaggtagctggggcaccgtatgcgacgactactgggacaccaatgacgcaaatgtagtatgcaggcaactcggctgtggatgggcaacgagtgctcctggcaacgcccggttcggccaggggagcggtcctatcgtgctggatgacgtgagatgctctggacatgagagctatctctggagctgccctcataatggctggcttagtcacaactgcgggcaccatgaagacgctggtgtcatttgttccgcatcgcagtcacagcccactcctagccctgacacttggcctacctcacgggccagcacagctggatcagaatcgacgcttgccctcaggttagtgaacggcggcgatcgatgccgtggccgagtggaagtgctttatcagggtagctgggggacagtctgcgacgactattgggacactaacgatgcaaacgttgtgtgcaggcagttagggtgtggatgggccatgtctgctcctggtaatgcacagttcgggcagggaagcgggcccattgtgttagatgacgtgcgctgctccggccacgagagctacctctggagttgcccccacaatggctggctgagtcataattgtggccaccatgaggatgctggcgtcatctgcagcgccgcccaaagccagtcaacaccccgccccgacacctggttgacaaccaacctccctgcattgacagtgggttctgagtcctcccttgccctgcgtcttgttaatggaggagatcgatgcagaggacgggtggaagtgctttaccgtggatcttggggcaccgtctgcgatgattcatgggataccaatgacgcgaacgtagtgtgccgacagctcggttgcggctgggcaatgtcagcccccggtaatgcccgcttcggtcagggctccggccccatcgtccttgacgatgtgcggtgtagtggcaatgagagctacctgtggtcttgcccccataagggttggctgacgcataactgcggccaccatgaggacgcgggtgttatatgcagcgctactcagatcaatagcacaactacagactggtggcatcctacgaccaccacaaccgctagacccagctcaaattgcggcggctttttattctacgcctccgggaccttcagctctccttcatatcctgcatactaccctaacaatgccaagtgcgtctgggaaatcgaagtcaactccggatacaggatcaatctggggttctctaatctgaagctggaagctcaccacaattgctctttcgactatgttgagatctttgatggatccttgaatagttcattactacttggcaagatatgtaacgacacaaggcagatcttcacttcatcctacaaccgtatgactattcattttagaagcgacatcagcttccaaaacacaggcttcctcgcctggtacaatagcttccctagcgacgccacacttaggcttgtgaatctaaactcctcttacgggctgtgcgccggcagagtagagatctatcatgggggaacgtggggtacagtctgcgatgattcttggacaatccaagaggccgaagtggtgtgccgacagttggggtgtgggcgggctgtgtctgcccttggtaacgcgtactttggctctggatcgggacctatcaccctagacgatgtggagtgtagtggaaccgagagcactctgtggcaatgccgaaaccggggctggttttcccacaactgcaatcaccgcgaggatgcaggagtgatttgctcaggcaatcatctgtccacccctgctccctttcttaatataactcggccaaacaactactcctgcggcggatttttaagccagccgtctggggacttttccagtcccttctatcccggcaactaccctaataatgcaaaatgtgtctgggacatcgaagtccaaaataattatcgcgttaccgtgattttcagggacgtgcagctggagggcggctgcaactatgactacattgaggtattcgatggcccataccgcagcagtccactaatcgcccgtgtgtgtgatggcgcacgaggaagctttacatcatctagcaattttatgagcatccggttcatatcagaccattccatcacccgccggggttttcgcgccgagtactacagcagtcctagtaatgatagtacaaatcttctttgtcttcccaatcatatgcaggcaagtgtttccaggagctatcttcagagtctggggttctcagcctcagatctggttatcagtacatggaacggctactatgagtgccggccgcagatcacccctaacctggtgatcttcactataccatatagcgggtgtggcacattcaagcaggctgacaatgacacgattgactactcaaattttttaaccgcggccgtgtcaggtggcatcataaaaagaaggactgacctcagaattcatgtctcatgtcgaatgctacagaacacttgggtagacaccatgtacattgctaatgatactatccacgttgctaataatacaatccaggttgaggaagtgcagtacgggaattttgatgtcaatatctccttctacaccagttccagtttcctgtatccagtgacctccaggccatattacgtagaccttaatcaggacttgtacgtgcaggctgagattttacatagtgacgcggtgctgactctcttcgtggatacctgtgtcgccagcccctattctaatgactttacatcccttacgtatgacctgatcaggagcggatgtgttcgagacgacacatacgggccttatagctctccatctctgaggatcgctcgattccgtttcagagcattccactttctgaacaggttcccatccgtgtatctccgatgtaaaatggtggtgtgtcgggcatatgaccctagcagccgctgttacaggggatgcgtgttacggagtaaacgagacgtggggagttaccaggagaaggtggatgtggtccttgggcctatccaacttcaaacacctcctagaagggaggaagaaccgagatag

SEQ ID NO: 335264 - DNA, 7238 bp, Artificial Sequence
  derived and/or modified sequence
atgggtatctctacagttattctcgagatgtgccttctttggggccaagtcctttctacggggggttggatccccaggactacagactacgcctcgctaatccccagcgaagtgcccctcgacccgacagtcgctgaaggcagcccgttcccatcggaatcaacattggagagcaccgtggccgagggcagccccatctcgctcgagtccactttagaatctacagtggccgagggctcccttattcctagcgaatctaccctggagtccactgtcgccgaaggctctgacagcggactggccttaagacttgttaacggtgacgggaggtgccagggccgagtcgagatcctgtacagggggagttgggggacagtgtgcgacgatagctgggacaccaacgatgcaaatgtggtctgtagacaactgggctgcggatgggccatgtctgctccaggaaatgcctggttcggccaggggagcggccctatcgcactagacgacgtgcgctgttctggacatgagtcttacttgtggtcgtgccctcataatgggtggctcagtcacaactgtggccacggcgaggacgccggtgtcatatgctccgcggctcagccacagagcactctccggcctgaaagttggccagtgagaatttccccccctgtccctactgaaggaagcgagagtagcctggcgctgcgcctcgttaacggaggagacagatgccggggaagagtggaagtcttataccggggaagttggggaaccgtgtgcgatgattactgggatacaaacgacgccaacgtggtctgcaggcaattggggtgcggatgggccatgtctgctcctggtaacgcccagtttggtcagggatccggccctatagtgcttgacgacgtgagatgttcaggccatgaatcttatctctggtcttgtccccataatgggtggctaacacataactgcggccattcagaagatgccggagtgatctgcagcgcacctcagagtcggccaactcctagtcccgacacgtggccaacctcccacgcttccactgctggacccgagtcgtctctggctctgaggctagtcaatggcggtgatcgctgtcagggcagggtggaggtcctatacagaggcagctggggcacagtgtgcgacgattcctgggacacctcagatgcaaatgttgtgtgccgccagctggggtgtggttgggccacgagtgcccctggcaatgccagatttggacagggatctggccctattgtacttgacgatgtcagatgttctggctatgagtcttatctgtggtcttgcccgcataatgggtggttatctcacaactgtcagcattcggaggatgccggtgttatctgctctgccgctcacagttggtccacccctagcccagatactctgcccaccattactctgccggcttctacggtcgggtctgagagctccctggcactccgtctcgtcaacggcggtgatcggtgccaggggagggtggaggttctgtacagagggtcttggggtaccgtgtgcgacgactcctgggataccaatgacgccaatgtggtttgtcgacagctcgggtgcggttgggctatgctggctcctggaaacgctcgtttcggccaaggtagtggcccaatcgttctggatgatgtgaggtgcagtggcaatgagtcgtatttgtggagctgtccccataatggctggttgagtcacaactgcggccattccgaggacgctggggtgatctgcagtggtcccgagtcctccttggccctgaggctggtgaatggaggagaccgatgtcagggccgagtggaggtgctatataggggatcctggggcacagtgtgtgacgacagctgggataccaatgacgccaacgtggtttgtcgacagctgggctgtggatgggcgacttccgccccaggaaacgcacgtttcggtcaggggagtggacccattgtgctcgacgacgttcgttgctccggacacgagagttacctctggtcgtgcccgaataacggttggctcagccacaattgcggccatcatgaggacgccggtgtgatctgttccgccgctcagagtcggagcaccccccgaccggacacactcagcaccatcactctgccccctagcaccgtgggatctgaatcctcgctgacactgaggctggtgaacggatcagacaggtgtcagggtcgggtcgaagtcctgtaccgcggtagctggggaactgtatgcgacgatagctgggacacgaacgacgccaatgtggtgtgcaggcaactcggctgcgggtgggcaacgagcgcgccaggtaatgctcggttcggacaggggtctggacctatcgtgttggacgacgtacggtgctctgggcatgaatcttatctgtggtcttgtccccacaacggatggctgtcccacaactgtgggcaccatgaagatgccggtgtgatatgtagcgtgagccagagccgtcccacaccttccccggatacctggcctacgtctcatgcatctacagctggtcctgaatcatctttggccctgcgcctggttaacggaggggacaggtgccagggaagagttgaggtgctgtacagaggatcctggggaaccgtatgcgacgactcctgggacacatctgacgcaaatgtcgtatgtcgacagctcgggtgcgggtgggcaactagtgctcccggtaacgcccgatttggccagggatctggcccaatagtgctggacgatgtgcggtgcagtggatatgaaagttacttgtggtcttgtccccataacggctggcttagccacaattgtcaacactcagaggacgccggagtaatttgttcagccgctcactcttggagtacccccagcccagacaccctgcccacaattaccctgcctgcatccacggtcgggtcagagtcctctttggccctacgcctcgtcaatggtggagaccgctgtcagggcagagtcgaggtattgtaccagggctcatggggcacagtgtgtgacgactcatgggacaccaacgacgctaatgtggtttgccggcagcttggttgtggctgggccatgagcgcgcctgggaacgcaaggttcggccaaggaagcggccctatcgttttggatgatgtcagatgctcgggtcacgaatcatacctgtggtcttgtccacataacggctggctgagccataattgcggccactctgaggatgctggcgtgatctgctctgcctcacagagcaggcctacgcctagcccagatacttggcccacttcgcacgcatccaccgctggatccgagagctcgctggcccttagacttgttaatggcggagatagatgccagggacgagtcgaggttctgtataggggaagctggggaacggtgtgtgatgactactgggacacgaatgatgctaatgttgtatgtaggcagttagggtgcggatgggcaatgagcgctcccggaaatgcaaggtttggccaggggagcggtcccattgtgctagacgacgtgcggtgtagtggccatgaaagctacctttggtcatgcccccataacggatggttgtcccataactgcggacatcacgaagacgccggagtgatctgctctgcttcacagagtcagccaactccttccccagatacttggcccacatcgcatgctagcaccgctgggtctgaatcctcgctcgccctaagactggtcaatggtggggatcgctgccaggggcgtgtagaagttttatacagggggagctgggggaccgtatgcgacgattattgggacactaacgacgctaatgtcgtctgcagacagcttggatgtggctgggcaacttcggcccctggaaatgccaggttcggacaaggatctggcccaatagtgctggacgacgtgaggtgttccggacatgaaagctacttgtggtcctgcccacataatggctggctctctcacaattgcggccaccacgaagatgccggtgtaatttgtagcgctagtcagtcccagccgactccatcccctgatacatggccaacgtcccacgcaagcacagctggtagcgaatcaagtctggctttgcgcctagtgaatggaggtgaccgttgccaaggaagggtagaggtactgtaccggggaagctggggaaccgtctgtgacgactattgggacactaacgatgctaatgtggtgtgtcggcagctcggctgtgggtgggccacatcggcaccgggaaacgccaggttcgggcaaggctccggcccaattgtgcttgatgacgtgagatgctccggtcatgagtcctacctatggtcttgtcctcataatgggtggctgtcgcataattgtggacaccatgaggacgctggtgtcatctgtagcgcttcacagtctcagcccacaccctctcctgacacctggccaacaagtcgggcatctaccgctggttccgagagcacactggctctgaggctcgtcaatggcggagaccggtgccgtgggagagtggaagtgctgtatcaagggtcttggggaacagtctgtgacgactattgggacaccaacgatgctaatgtggtctgtcgtcagttgggatgcgggtgggctatgtccgcacctgggaacgcccagtttgggcagggatctgggccaatcgtgctggatgacgtgcgatgttcaggtcatgagtcctatctgtggtcatgccctcataacggttggttgagtcacaactgtggccatcacgaggatgctggggtgatatgctccgcggctcagagccaatctacgcctcgtcctgacacttggctgacgaccaacctgcccgcattaacagtaggcagcgaatcgagcctcgcccttcggctggtgaacggaggagaccgttgcagaggcagagtagaggtgttataccggggaagttggggcacagtatgcgacgacagctgggacactaatgacgctaatgttgtgtgtagacagctcggttgcgggtgggctatgagcgctcccggaaatgcccgttttggtcaaggctccggccctattgtgctggatgacgtcaggtgctccgggaatgaatcttacttatggagctgcccacataagggttggttgactcacaactgcggacaccacgaggacgctggggttatctgttcggccacccagatcaatagcaccactactgactggtggcaccccacaacaacgacaacagctaggccgtcaagtaactgtgggggtttcttgttctacgccagcgggaccttctccagcccatcatatccggcatattaccctaacaatgctaaatgcgtgtgggagatcgaggtgaacagcggctaccggattaacttaggattcagcaacctaaaactggaggcccaccacaattgctcctttgattatgtggaaatcttcgatggtagtctcaattcctccctcttgctggggaaaatatgcaacgacaccaggcaaatttttacgtcatcctataacaggatgacgatacatttcaggtccgacatctcctttcagaacacaggattcttggcttggtacaatagcttcccaagtgatgctaccctccgactggtgaatctgaactcatcatacggcctctgtgccggtcgggtcgaaatctaccatggaggcacttggggcactgtgtgcgacgacagttggacaattcaggaggctgaagtcgtctgtagacagctgggctgtggaagagcagtaagcgcccttggcaacgcttattttggcagcggatcaggcccaatcaccctagatgacgttgaatgctctgggacggagtctacactctggcagtgtcgcaatcgcggatggttcagtcataattgcaatcatagggaagatgctggagtcatatgtagtgggaaccacctgtccactcctgctccctttttaaacatcacccgaccaaataactactcatgtggcggttttctctcgcagcctagcggcgatttctcttctcccttttatcccggtaactaccccaacaacgccaagtgtgtgtgggatatcgaagtgcagaataattaccgcgtgacggtcatcttcagggacgtgcagctagagggagggtgcaactatgattacattgaagtgttcgacggaccgtatagaagctcccccctaattgcgagggtctgcgacggcgctcgcggatctttcacttcatcctcgaactttatgtctattcggttcattagcgatcattccattacacggaggggctttagggccgaatactattctagcccttcgaacgatagtactaacctgctgtgtttacccaatcatatgcaggcctctgtcagccggtcctatttacagtcccttggcttttccgccagtgacctcgtgataagcacttggaacggttattacgagtgcagacctcagattacgcctaatctggtgatctttacaatcccgtattctggatgtggtactttcaagcaggcggacaatgacaccatcgactatagcaatttcctgaccgcagcagttagtggcggaattattaaaaggagaacggacttacgtatccatgtgtcatgtaggatgctgcagaatacttgggttgacaccatgtacatagccaatgacaccattcacgtcgcaaataataccatccaggtggaggaagtgcagtacggcaacttcgatgtgaacatttccttctacacttcaagctcgttcttgtaccctgtaacgagcaggccctactacgtagacttgaaccaggacttgtacgttcaggcagaaattctgcactcagacgcggtattaaccttattcgttgatacgtgcgtggcaagcccctactctaatgatttcacttcactgacgtatgacttgattaggtcaggatgtgtacgggatgacacatacggcccatatagctctccatctttaaggattgcccgttttcgcttcagggcatttcatttcttgaaccgctttccctcagtgtatctcagatgcaaaatggtcgtgtgccgcgcttacgatcctagtagtaggtgttacaggggatgcgtactcagatccaaacgcgacgttggcagctatcaggagaaggttgatgtcgtccttggacctattcagctccagacaccccctagaagggaggaggagcctaggta

SEQ ID NO: 335265 - protein, 1133 aa, Artificial Sequence
  derived and/or modified sequence
MGISTVILEMCLLWGQVLSTGGWIPRTTDYASLIPSEVPLDPTVAEGSPFPSESTLESTVAEGSPISLESTLESTVAEGSLIPSESTLESTVAEGSDSGLALRLVNGDGRCQGRVEILYRGSWGTVCDDSWDTNDANVVCRQLGCGWAMSAPGNAWFGQGSGPIALDDVRCSGHESYLWSCPHNGWLSHNCGHGEDAGVICSAPQSRPTPSPDTWPTSHASTAGSESSLALRLVNGGDRCQGRVEVLYRGSWGTVCDDYWDTNDANVVCRQLGCGWATSAPGNARFGQGSGPIVLDDVRCSGHESYLWSCPHNGWLSHNCGHHEDAGVICSASQSQPTPSPDTWPTSRASTAGSESTLALRLVNGGDRCRGRVEVLYQGSWGTVCDDYWDTNDANVVCRQLGCGWAMSAPGNAQFGQGSGPIVLDDVRCSGHESYLWSCPHNGWLSHNCGHHEDAGVICSATQINSTTTDWWHPTTTTTARPSSNCGGFLFYASGTFSSPSYPAYYPNNAKCVWEIEVNSGYRINLGFSNLKLEAHHNCSFDYVEIFDGSLNSSLLLGKICNDTRQIFTSSYNRMTIHFRSDISFQNTGFLAWYNSFPSDATLRLVNLNSSYGLCAGRVEIYHGGTWGTVCDDSWTIQEAEVVCRQLGCGRAVSALGNAYFGSGSGPITLDDVECSGTESTLWQCRNRGWFSHNCNHREDAGVICSGNHLSTPAPFLNITRPNTDYSCGGFLSQPSGDFSSPFYPGNYPNNAKCVWDIEVQNNYRVTVIFRDVQLEGGCNYDYIEVFDGPYRSSPLIARVCDGARGSFTSSSNFMSIRFISDHSITRRGFRAEYYSSPSNDSTNLLCLPNHMQASVSRSYLQSLGFSASDLVISTWNGYYECRPQITPNLVIFTIPYSGCGTFKQADNDTIDYSNFLTAAVSGGIIKRRTDLRIHVSCRMLQNTWVDTMYIANDTIHVANNTIQVEEVQYGNFDVNISFYTSSSFLYPVTSRPYYVDLNQDLYVQAEILHSDAVLTLFVDTCVASPYSNDFTSLTYDLIRSGCVRDDTYGPYSSPSLRIARFRFRAFHFLNRFPSVYLRCKMVVCRAYDPSSRCYRGCVLRSKRDVGSYQEKVDVVLGPIQLQTPPRREEEPR

SEQ ID NO: 335266 - DNA, 3402 bp, Artificial Sequence
  derived and/or modified sequence
atgggcatcagcaccgtgatcctggagatgtgcctgctgtggggccaggtgctgagcaccggcggctggatccccagaaccaccgactacgccagcctgatccccagcgaggtgcccctggaccccaccgtggccgagggcagccccttccccagcgagagcaccctggagagcaccgtggccgagggcagccccatcagcctggagagcaccctggagagcaccgtggccgagggcagcctgatccccagcgagagcaccctggagagcaccgtggccgagggcagcgacagcggcctggccctgagactggtgaacggcgacggcagatgccagggcagagtggagatcctgtacagaggcagctggggcaccgtgtgcgacgacagctgggacaccaacgacgccaacgtggtgtgcagacagctgggctgcggctgggccatgagcgcccccggcaacgcctggttcggccagggcagcggccccatcgccctggacgacgtgagatgcagcggccacgagagctacctgtggagctgcccccacaacggctggctgagccacaactgcggccacggcgaggacgccggcgtgatctgcagcgccccccagagcagacccacccccagccccgacacctggcccaccagccacgccagcaccgccggcagcgagagcagcctggccctgagactggtgaacggcggcgacagatgccagggcagagtggaggtgctgtacagaggcagctggggcaccgtgtgcgacgactactgggacaccaacgacgccaacgtggtgtgcagacagctgggctgcggctgggccaccagcgcccccggcaacgccagattcggccagggcagcggccccatcgtgctggacgacgtgagatgcagcggccacgagagctacctgtggagctgcccccacaacggctggctgagccacaactgcggccaccacgaggacgccggcgtgatctgcagcgccagccagagccagcccacccccagccccgacacctggcccaccagcagagccagcaccgccggcagcgagagcaccctggccctgagactggtgaacggcggcgacagatgcagaggcagagtggaggtgctgtaccagggcagctggggcaccgtgtgcgacgactactgggacaccaacgacgccaacgtggtgtgcagacagctgggctgcggctgggccatgagcgcccccggcaacgcccagttcggccagggcagcggccccatcgtgctggacgacgtgagatgcagcggccacgagagctacctgtggagctgcccccacaacggctggctgagccacaactgcggccaccacgaggacgccggcgtgatctgcagcgccacccagatcaacagcaccaccaccgactggtggcaccccaccaccaccaccaccgccagacccagcagcaactgcggcggcttcctgttctacgccagcggcaccttcagcagccccagctaccccgcctactaccccaacaacgccaagtgcgtgtgggagatcgaggtgaacagcggctacagaatcaacctgggcttcagcaacctgaagctggaggcccaccacaactgcagcttcgactacgtggagatcttcgacggcagcctgaacagcagcctgctgctgggcaagatctgcaacgacaccagacagatcttcaccagcagctacaacagaatgaccatccacttcagaagcgacatcagcttccagaacaccggcttcctggcctggtacaacagcttccccagcgacgccaccctgagactggtgaacctgaacagcagctacggcctgtgcgccggcagagtggagatctaccacggcggcacctggggcaccgtgtgcgacgacagctggaccatccaggaggccgaggtggtgtgcagacagctgggctgcggcagagccgtgagcgccctgggcaacgcctacttcggcagcggcagcggccccatcaccctggacgacgtggagtgcagcggcaccgagagcaccctgtggcagtgcagaaacagaggctggttcagccacaactgcaaccacagagaggacgccggcgtgatctgcagcggcaaccacctgagcacccccgcccccttcctgaacatcaccagacccaacaccgactacagctgcggcggcttcctgagccagcccagcggcgacttcagcagccccttctaccccggcaactaccccaacaacgccaagtgcgtgtgggacatcgaggtgcagaacaactacagagtgaccgtgatcttcagagacgtgcagctggagggcggctgcaactacgactacatcgaggtgttcgacggcccctacagaagcagccccctgatcgccagagtgtgcgacggcgccagaggcagcttcaccagcagcagcaacttcatgagcatcagattcatcagcgaccacagcatcaccagaagaggcttcagagccgagtactacagcagccccagcaacgacagcaccaacctgctgtgcctgcccaaccacatgcaggccagcgtgagcagaagctacctgcagagcctgggcttcagcgccagcgacctggtgatcagcacctggaacggctactacgagtgcagaccccagatcacccccaacctggtgatcttcaccatcccctacagcggctgcggcaccttcaagcaggccgacaacgacaccatcgactacagcaacttcctgaccgccgccgtgagcggcggcatcatcaagagaagaaccgacctgagaatccacgtgagctgcagaatgctgcagaacacctgggtggacaccatgtacatcgccaacgacaccatccacgtggccaacaacaccatccaggtggaggaggtgcagtacggcaacttcgacgtgaacatcagcttctacaccagcagcagcttcctgtaccccgtgaccagcagaccctactacgtggacctgaaccaggacctgtacgtgcaggccgagatcctgcacagcgacgccgtgctgaccctgttcgtggacacctgcgtggccagcccctacagcaacgacttcaccagcctgacctacgacctgatcagaagcggctgcgtgagagacgacacctacggcccctacagcagccccagcctgagaatcgccagattcagattcagagccttccacttcctgaacagattccccagcgtgtacctgagatgcaagatggtggtgtgcagagcctacgaccccagcagcagatgctacagaggctgcgtgctgagaagcaagagagacgtgggcagctaccaggagaaggtggacgtggtgctgggccccatccagctgcagaccccccccagaagagaggaggagcccagatag

SEQ ID NO: 335267 - DNA, 3826 bp, Artificial Sequence
  derived and/or modified sequence
ataccaccctagaggacacacctccttttagctaggtacctataaatgtccaggattttctattcaattgagaagaacccagcaaaatggggatctccacagtcatccttgaaatgtgtcttttatggggacaagttctatctacaggtgggtggatcccaaggactacagactacgcttcactgattccctcggaggtgcccttggatccaactgtagcagaaggttctccatttccctcggagtcgaccctggagtcaactgtagcagaaggttctccgatttccttggagtcaaccctggagtcaaccgtagcagaaggttctctgattccctcagagtcaaccctggagtcaactgtagcagaaggatctgattctggtttggccctgaggctggtgaatggagatggcaggtgtcagggccgagtggagatcctataccgaggctcctggggcaccgtgtgtgatgacagctgggacaccaatgatgccaacgtggtctgtaggcagctgggttgtggctgggccatgtcagctccaggaaatgcctggtttggccagggctcaggacccattgccctggatgatgtgcgctgctcaggacacgaatcctacctgtggagctgcccccacaatggctggctctcccataactgtggccatggtgaagatgctggtgttatctgctcagctccccagtcccggccgacacccagcccagatacttggccgacctcacatgcatcaacagcaggatctgaatccagtttggccctgaggctggtgaatggaggtgacaggtgtcagggccgagtggaggtcctataccgaggctcctggggcaccgtgtgtgatgactactgggacaccaatgatgccaatgtggtttgcaggcagctgggctgtggctgggccacgtcagccccaggaaatgcccggtttggccagggttcaggacccattgtcctggatgatgtgcgctgctcaggacatgagtcctatctgtggagctgcccccacaatggctggctctcccacaactgtggccatcatgaagacgctggtgtcatctgctcagcttcccagtcccagccgacacccagcccagacacttggccaacctctcgtgcatcaacagcaggatctgaatccactttggccctgagactggtgaatggaggtgacaggtgtcgaggccgagtggaggtcctataccaaggctcctggggcaccgtgtgtgatgactactgggacaccaatgatgccaacgtggtctgcaggcagctgggctgtggctgggccatgtcagccccaggaaatgcccagtttggccagggctcaggacccattgtcctggatgatgtgcgctgctcaggacacgagtcttacctgtggagctgcccccacaatggctggctctcccacaactgtggccatcatgaagatgctggtgtcatctgctcagccacccaaataaattctactacgacagattggtggcatccaacaactacaaccactgcaagaccctcttcaaattgtggtggcttcttattctatgccagtgggacattctccagcccatcctaccctgcatactaccccaacaatgctaagtgtgtttgggaaatagaagtgaattctggttatcgcataaacctgggcttcagtaatctgaaattggaggcacaccataactgcagttttgattatgttgaaatctttgatggatcattgaatagcagtctcctgctggggaaaatctgtaatgataccaggcaaatatttacatcttcttacaaccgaatgaccattcactttcgaagtgacatcagtttccaaaacactggctttttggcttggtataactccttcccaagcgatgccaccttgaggttggtcaatttaaattcatcctatggtctatgtgccgggcgtgtagaaatttaccatggtggcacctgggggacagtttgtgatgactcctggaccattcaggaagctgaggtggtctgcagacagctagggtgtggacgtgcagtttcagcccttggaaatgcatattttggctctggctctggccccatcaccctggacgatgtagagtgctcagggacggaatccactctctggcagtgccggaaccgaggctggttctcccacaactgtaatcatcgtgaagatgctggtgtcatctgctcaggaaaccatctatcgacacctgctccttttctcaacatcacccgtccaaacacagattattcctgcggaggcttcctatcccaaccatcaggggacttttccagcccattctatcccgggaactatccaaacaatgccaagtgtgtgtgggacattgaggtgcaaaacaactaccgtgtgactgtgatcttcagagatgtccagcttgaaggtggctgcaactatgattatattgaagttttcgatggcccctaccgcagttcccctctcattgctcgagtttgtgatggggccagaggctccttcacttcttcctccaacttcatgtccattcgcttcatcagtgaccacagcatcacaaggagagggttccgggctgagtactactccagtccctccaatgacagcaccaacctgctctgtctgccaaatcacatgcaagccagtgtgagcaggagctatctccaatccttgggcttttctgccagtgaccttgtcatttccacctggaatggatactacgagtgtcggccccagataacgccgaacctggtgatattcacaattccctactcaggctgcggcaccttcaagcaggcagacaatgacaccatcgactattccaacttcctcacagcagctgtctcaggtggcatcatcaagaggaggacagacctccgtattcacgtcagctgcagaatgcttcagaacacctgggtcgacaccatgtacattgctaatgacaccatccacgttgctaataacaccatccaggtcgaggaagtccagtatggcaattttgacgtgaacatttccttttatacttcctcatctttcttgtatcctgtgaccagccgcccttactacgtggacctgaaccaggacttgtacgttcaggctgaaatcctccattctgatgctgtactgaccttgtttgtggacacctgcgtggcatcaccatactccaatgacttcacgtctttgacttatgatctaatccggagtggatgcgtgagggatgacacctacggaccctactcctcgccatctcttcgcattgcccgcttccggttcagggccttccacttcctgaaccgcttcccctccgtgtacctgcgttgtaaaatggtggtgtgcagagcgtatgacccctcttcccgctgctaccgaggctgtgtgttgaggtcgaagagggatgtgggctcctaccaggaaaaggtggacgtcgtcctgggtcccatccagctgcagacccccccacgccgagaagaggagcctcggtaggtggtcgctctcagaccccactgtccaccggggcgcagacccctgactcggggacttgggatgttcctcttggtgtcatattccaactcagattgagccctacattgtgctgcacctggtcatacggagttgaatcagacctggttcccgcctcccccaaggctcatggtccttggaggacccgttgcagggtgaggtcaagagagttctgacctggatggcccatagacctgacgtcccagaatccatgcttctcatctgcaaaatgaaaatgtcaatacttacttcttagcactgttgagagggttacttacataaaggaattttggtgaaactgc

SEQ ID NO: 335268 - DNA, 3402 bp, Artificial Sequence
  derived and/or modified sequence
atggggataagcactgtgattctggagatgtgcctcctttgggggcaggttctgtcaaccggcggatggataccccggactacggactatgcctcgctgatcccaagcgaagtcccccttgaccccacggtagccgaaggatccccatttcctagcgaaagtacccttgaatctaccgtggccgagggtagcccaatatcattagaatccacactggaatcgaccgttgccgaggggtctcttattcccagcgaaagtacgttagagagtactgtggccgagggctctgatagcggtctggcactcagattagttaacggagacggccgttgccagggcagggttgaaattctttacaggggctcctggggtacagtgtgtgatgatagttgggacactaacgatgcgaacgttgtctgtcgtcagctgggctgtggctgggctatgtcagcacctggaaatgcttggttcgggcaggggagtggtcctatcgccctggacgatgtgcgctgtagtgggcacgaatcctacttatggtcctgcccccacaacgggtggctgagtcacaattgcggccacggggaggatgcgggcgtgatatgctcagcaccgcagagtcggcctacacccagtcccgacacgtggcctactagccacgccagcacggcaggaagcgaatcatctctcgcgctccgcttggtgaacggtggtgacaggtgccaggggcgtgttgaggttctctaccgcgggtcctggggcaccgtctgtgatgactattgggataccaatgacgccaatgtggtgtgccgacaactgggctgcgggtgggccacctcggctcctggcaacgcaaggttcggacaggggtctggtcctatcgtcctggatgacgtgcgctgcagcggtcatgaaagctatctttggtcttgcccacacaacggctggctgtctcacaactgtggacatcacgaggatgccggtgtcatttgctcagcatcccagtcccagcctacaccatccccagacacgtggccaacttctcgcgcatccaccgccggctcggagtccacattagcccttcgcttggtgaatggcggagaccgctgccgaggacgggtggaggtgctgtaccaggggagttggggaacagtatgtgatgactactgggacacgaacgacgcaaacgtcgtgtgccggcagctggggtgcggttgggcgatgtccgctcctgggaacgcccagttcggtcagggtagcggacctattgtgctggacgatgtgaggtgctcggggcatgaaagctatctgtggtcctgcccacataacggttggctttcccacaactgcgggcatcatgaagacgctggtgtgatctgtagcgcaactcagatcaacagcacaactacagattggtggcaccctacgaccaccactacagcacgccctagttctaactgcgggggctttctgttctacgctagcggcaccttctcctctccctcgtatcccgcctactaccccaataatgccaagtgcgtgtgggagatcgaggtgaactccggctataggatcaacctgggatttagcaacctaaagctggaggcacaccacaattgttctttcgactacgtggaaatatttgacggatcgctcaactcgtccctgttattaggtaagatctgcaacgacacaaggcagatttttacatccagctacaataggatgaccattcactttcgttctgacatctcatttcagaatacgggattcctggcatggtataactcctttccaagcgacgccacattgcggctggtcaacttgaattctagctatggtctctgtgctggccgcgtcgagatataccacgggggaacatggggcaccgtatgcgacgatagttggacgatccaggaagccgaggtggtctgccgccagttagggtgtggaagagctgtgtccgcattggggaacgcatactttggctccggtagtggacccataaccctcgacgacgtggaatgtagtggaacagagtctactctgtggcaatgtcgcaacagaggctggtttagtcataactgcaaccaccgcgaggatgccggagtgatttgtagcggtaatcatctgtcgactcccgcccctttcctcaacattacacgacccaacacagattactcttgcgggggctttctgagccaaccctccggcgattttagctcccctttttaccctggaaactaccccaataacgctaagtgtgtgtgggacattgaggttcagaataattatcgtgtgactgtgattttcagagatgtacagctagaagggggctgtaactacgactacatcgaagtgttcgacggcccttatagatcaagcccacttattgcgcgggtatgcgatggcgcacggggatcctttacaagcagctctaatttcatgagtatacgctttatctctgatcatagcattacgcgccgtgggttcagggctgagtattattcttctccatccaatgactctaccaatctattgtgcctgccaaaccatatgcaggccagtgtctcaagaagctatttgcagagcctgggctttagcgcctctgatctcgttataagcacctggaatgggtactatgaatgtcgcccacaaattaccccaaacctagttatcttcaccatcccctatagcggatgcggtacctttaaacaggctgacaacgatacaatcgattactccaacttcctaaccgccgcagtgtcagggggaattattaagcgcaggaccgacctgagaatccatgtcagctgtaggatgttacaaaacacatgggttgatacaatgtacattgctaatgacaccattcacgtggcaaataatacaattcaagtggaggaggtgcaatatggcaattttgatgtgaatatcagtttttatacatcatccagcttcctctaccccgtgactagcaggccctactatgtggaccttaaccaagatttatatgtgcaggctgagatcctgcatagcgacgccgtactaacgctgtttgtcgacacatgtgtggccagtccctatagtaacgatttcacttcattgacttacgatttaatcaggtcaggatgtgttcgcgatgacacctacggcccttattccagcccttcacttcgtatagctcgcttcagattcagagcctttcacttcctcaaccggtttccatccgtgtatctgagatgcaaaatggtcgtgtgcagagcctatgacccttcctcccgctgttaccggggctgtgtactacgcagtaaacgagatgtaggatcctatcaggagaaggtcgacgtggtgctgggccctatccagcttcagactccaccaagacgcgaggaagaacccaggtag

SEQ ID NO: 335269 - DNA, 3402 bp, Artificial Sequence
  derived and/or modified sequence
atgggcatcagcaccgtcatcctggagatgtgcctgctgtggggccaggtgctgagcactggaggctggatccccaggaccacagattatgccagcctcatccccagcgaggtgcccctggaccccaccgtggccgagggcagccccttccccagcgagagcaccctggagagcacagtggccgagggcagccccatcagcctggagagcaccctggagagcacagtggccgagggcagcctcatccccagcgagagcaccctggagagcacagtggccgagggcagtgacagcggcctggccctgcggctggtgaatggagatggccgctgccagggccgggtggagatcctgtaccggggctcctggggcaccgtgtgtgatgacagctgggacaccaatgatgccaacgtggtgtgccggcagctgggctgcggctgggccatgtctgcccctggaaatgcctggtttggccagggcagcggccccatcgccctggatgatgtgcgctgcagcggccacgagagctacctgtggagctgcccccacaacggctggctgagccacaactgtggccatggagaagatgctggggtcatctgcagcgccccccagagccggcccacccccagcccagacacctggcccaccagccacgccagcacagctggcagcgagagcagcctggccctgcggctggtgaatggaggagaccgctgccagggccgggtggaggtgctgtaccggggctcctggggcaccgtgtgtgatgactactgggacaccaatgatgccaacgtggtgtgccggcagctgggctgcggctgggccaccagcgcccctggaaatgcccgcttcggccagggcagcggccccatcgtgctggatgatgtgcgctgcagcggccacgagagctacctgtggagctgcccccacaacggctggctgagccacaactgtggccaccatgaagatgctggggtcatctgcagcgccagccagagccagcccacccccagcccagacacctggcccaccagccgggccagcacagctggcagcgagagcaccctggccctgcggctggtgaatggaggagaccgctgccggggccgggtggaggtgctgtaccagggctcctggggcaccgtgtgtgatgactactgggacaccaatgatgccaacgtggtgtgccggcagctgggctgcggctgggccatgtctgcccctggaaatgcccagtttggccagggcagcggccccatcgtgctggatgatgtgcgctgcagcggccacgagagctacctgtggagctgcccccacaacggctggctgagccacaactgtggccaccatgaagatgctggggtcatctgcagcgccacccagatcaacagcaccaccacagactggtggcaccccaccaccaccaccacagcccggcccagcagcaactgtggcggcttcctgttctacgccagcggcaccttcagcagccccagctacccagcctactaccccaacaatgccaagtgtgtgtgggagattgaggtgaacagcggctaccgcatcaacctgggcttcagcaacctgaagctggaggcccaccacaactgcagctttgattatgtggagatctttgatggcagcctgaacagcagcctgctgctgggcaagatctgcaatgacacccggcagatcttcaccagcagctacaacaggatgaccatccacttcagaagtgacatctccttccagaacacaggcttcctggcctggtacaacagcttccccagtgatgccaccctgcggctggtgaacctgaacagcagctatggcctgtgtgccggccgggtggagatctaccatggaggcacctggggcaccgtgtgtgatgacagctggaccatccaggaggccgaggtggtgtgccggcagctgggctgcggccgggctgtgtctgccctgggcaatgcctactttggaagtggcagcggccccatcaccctggatgatgtggagtgcagcggcacagagagcaccctgtggcagtgcaggaacagaggctggttcagccacaactgcaaccacagagaagatgctggggtcatctgcagcggcaaccacctgagcaccccagcccccttcctgaacatcacccggcccaacacagactacagctgtggcggcttcctgagccagcccagcggggacttcagcagccccttctacccaggcaactaccccaacaatgccaagtgtgtgtgggacatcgaggtgcagaacaactacagagtgaccgtcatcttcagagatgtgcagctggagggcggctgcaactatgactacatcgaggtgtttgatggcccctaccgcagcagccccctgattgcccgggtgtgtgatggagcccggggcagcttcaccagcagcagcaacttcatgagcatccgcttcatcagtgaccacagcatcacccggcggggcttccgggcagagtactacagcagccccagcaatgacagcaccaacctgctgtgcctgcccaaccacatgcaggcctctgtgagccgcagctacctgcagagcctgggcttcagcgccagtgacctggtgatcagcacctggaatggctactatgaatgtcggccccagatcacccccaacctggtgatcttcaccatcccctacagcggctgcggcaccttcaagcaggccgacaatgacaccatcgactacagcaacttcctgacagctgctgtgtctgggggcatcatcaagagaagaacagacctgcgcatccacgtgtcctgcaggatgctgcagaacacctgggtggacaccatgtacatcgccaatgacaccatccacgtggccaacaacaccatccaggtggaggaggtgcagtatggcaactttgatgtgaacatctccttctacaccagcagcagcttcctgtaccctgtgaccagccggccctactacgtggacctgaaccaggacctgtatgtgcaggccgagatcctgcacagtgatgctgtgctgaccctgtttgtggacacctgtgtggccagcccctacagcaatgacttcaccagcctgacctatgacctgatccgcagcggctgtgtgagagatgacacctacggcccctacagcagccccagcctgagaattgcccgcttccgcttccgggccttccacttcctgaaccgcttccccagcgtgtacctgcgctgcaagatggtggtgtgccgggcctatgaccccagcagccgctgctaccggggctgtgtgctgcggagcaagagagatgtgggcagctaccaggagaaggtggatgtggtgctgggccccatccagctgcagaccccaccaagaagagaggaggagcccaggtag

SEQ ID NO: 335270 - DNA, 3402 bp, Artificial Sequence
  derived and/or modified sequence
atgggcatcagcaccgtgatcctggagatgtgcctgctgtggggccaagttctgtcgacaggcgggtggataccaaggacaacagattatgcctcattgattcccagcgaagtgcccttggaccccactgtcgcggaaggttcaccctttccctcagagagtacactggaaagcaccgtagcagaaggaagccccatctcactggaaagcaccctggagtctacagttgccgagggcagccttatcccttcggagagcacactggagtcaaccgttgccgaaggatccgatagtggcctcgcgcttcggctggttaacggtgatggccggtgtcagggtagagtggaaatcttatatcggggttcctggggcaccgtgtgcgacgactcctgggatacaaatgacgcaaatgtggtctgtcgacagctcggttgtggttgggccatgtccgcacctggcaacgcctggttcggccagggtagcgggcctatcgccttggatgacgttcgctgctctggccatgaatcgtatctgtggagctgcccacacaacggctggctctctcacaactgcggccacggcgaagacgctggcgtcatttgtagcgccccacagagtcgcccaaccccgagtcccgatacatggccaacatcccacgcttccaccgccggctcagaaagcagtctcgcgctcaggctcgtcaatgggggagataggtgtcagggtcgggtggaagtgttgtacagaggttcctggggtaccgtctgcgatgactactgggacaccaatgacgccaatgtggtttgtcgacaactgggatgcggatgggccacgagtgccccagggaacgcaagatttggacaaggtagcggccctatcgtcctggatgatgttcgctgctctggacatgagagctacttatggtcgtgtccgcataatggctggctgagccacaactgcggtcaccatgaggatgcgggcgttatttgtagcgccagtcagagccagccgacaccttccccggacacttggcctacctccagagcttccaccgctggcagtgagtccacattggctctgcgcttagtgaacggaggtgacaggtgccggggtcgtgtcgaagtactgtaccagggctcctgggggaccgtctgcgacgactactgggataccaatgatgcaaacgttgtgtgccgacaactggggtgcggatgggccatgtcagcccccggtaacgcccagttcggtcagggttccggccctatagtcttggatgatgttaggtgctccggccacgaaagttatctgtggtcatgcccacataacggctggcttagtcacaactgtggccatcacgaggatgcaggcgtgatctgtagtgctacacagattaacagcactactaccgattggtggcatcccaccaccaccacaacagcacggcctagttctaattgcgggggattcttgttctatgctagtggcacgttctcatcaccatcctatccggcttactaccccaataatgccaagtgtgtgtgggaaattgaggtgaatagcgggtacaggattaacctggggttttcaaacttgaagctcgaggcgcaccataactgtagttttgattacgtagagatcttcgatggcagtctgaattcttcgctgctgttgggaaagatctgtaacgacactaggcagatctttacatcaagttacaatcgcatgactattcactttcgcagcgacatctccttccagaatactggattcctggcctggtataacagcttcccaagcgatgccaccctccggttagtgaatctgaattcctcttacgggctctgtgccgggagggtcgaaatctaccatgggggtacctggggtactgtgtgtgatgacagttggaccattcaggaagcagaggtggtctgcagacagctcggatgtgggcgagccgtttcggcactcggcaacgcttatttcggctctggtagcggccccattactcttgatgatgtggagtgttctggtactgagagcaccctttggcaatgccgcaatcggggatggttctcacacaattgtaaccaccgggaagacgcaggcgtgatttgtagtggaaaccacctaagcacgcccgctccctttttgaatataacaagaccaaatacagattattcctgcggcggttttctttcgcagccttctggggattttagcagcccgttttaccccggaaactatcccaataatgctaaatgtgtgtgggatatcgaggttcagaacaactatcgcgtcaccgttatctttagggacgtgcagctggaaggcggttgtaactatgactatatcgaggtattcgacggcccatatagaagcagccccctgatcgcacgtgtttgtgatggggccaggggaagtttcaccagctcctctaatttcatgtctatccggtttatctctgaccattctataaccagaagaggcttccgggctgaatattattcaagcccatcaaatgactccacaaacctgctgtgtctgcctaatcacatgcaggcatccgtgtcaagaagttacttacagagcctggggttttccgcatccgaccttgtcatatctacctggaatggctattatgagtgccgtcctcagataacacctaacttggttatcttcactataccttactctggatgcggaacatttaagcaagcggacaatgacactatagactattctaacttcctgaccgcggccgtgagcggcgggatcatcaagcgtcgcaccgatttgcggatccatgtgtcttgtaggatgctgcagaatacttgggtggatacaatgtatatcgccaatgacacaatacatgtggcaaacaatacaatccaagtggaggaggtgcagtacggaaacttcgacgtcaacatttcattttatacctctagtagctttttgtacccagtcaccagccggccgtattatgtcgatctcaaccaagacctctacgtgcaagccgaaattctccactccgacgctgtgctgaccctgtttgtggatacctgtgtggcctccccatacagtaatgattttacttcgctgacctatgatcttatcagatccggttgtgtgcgcgacgacacatacgggccgtactctagtcccagtctgcgcattgcgagattcagattccgcgcatttcatttcttaaataggttcccctccgtatacctgaggtgtaaaatggtggtgtgccgggcttatgatccttcgagtcggtgttacagaggctgcgttcttcgttccaagcgagatgtgggtagttaccaggaaaaagtcgacgtcgtcctaggccccatccagttgcagacgcctcctaggagggaggaggaaccacggtag

SEQ ID NO: 335271 - DNA, 3402 bp, Artificial Sequence
  derived and/or modified sequence
atgggtatctcgacagtgattcttgaaatgtgtctgctgtggggacaggttttgtccaccggtggctggattccacggactacagattatgcatcactgattccctctgaagtacctcttgatccaactgtggctgagggctcccccttcccaagcgaatcaaccctagaaagcacagtggccgaagggtcccctattagcttggagtcaaccttggagagcactgtggccgaaggttctctgatacccagcgagtcgaccctggaaagcacagtagccgaaggttcggatagcggactggccctccggcttgtgaacggagacgggcgttgtcagggaagagtagagatactctaccggggtagctggggcacagtttgtgatgattcttgggacacaaacgatgccaatgttgtctgtaggcagctcgggtgtggctgggctatgagcgctccaggcaatgcctggtttggacagggcagtggaccgattgcactggacgatgtgagatgcagtggacacgagagctacctgtggtcctgtccacataacggttggctatcacacaactgtggccatggcgaggacgctggtgtgatttgttccgctcctcagtcgaggcccaccccttccccagacacctggccaactagtcatgcatctactgctggctctgagagtagcctcgcactaaggctcgttaacggtggggatagatgccaaggtcgggtggaggtactgtaccgaggttcttgggggaccgtgtgcgatgactattgggacaccaacgatgccaatgtggtctgcaggcaactaggttgcggttgggccacatctgcacctggaaatgcgaggtttggtcagggctctggcccaattgtgcttgacgacgtgagatgttccggccatgaatcctacctatggtcgtgtcctcataacggctggctgagccataactgcgggcaccacgaagatgcaggtgtgatctgttccgcttctcagtcccagcccactcctagccctgatacatggcccacttctagggcatctacagccggatcggagtctactctggctttaaggctcgtaaatggcggtgatcgttgtagagggcgagttgaagtcctctaccaaggcagctggggtactgtgtgcgatgattactgggacacaaatgacgccaatgtcgtgtgtcggcagttgggctgcgggtgggcaatgtcagcccctgggaatgcacagtttggccagggatccggtcctatcgttcttgatgatgtgcgatgctcggggcatgagagttacctgtggagctgtccacacaatggatggctgtcccacaactgtggccaccatgaagacgccggagtgatctgctctgccacccagattaattctacgacgaccgattggtggcatcctactacaacaactaccgccaggccatcatccaactgcggtggctttctgttctacgcctcaggaaccttttcgagtcccagctaccctgcctactacccaaataacgccaagtgcgtttgggaaatcgaggtcaactctggatacagaattaacctcggctttagtaatttgaagctcgaagcccaccacaattgcagttttgattatgttgagatcttcgatggctccctgaattccagcctcttgttaggcaagatttgcaatgatacccggcagatatttacgtcctcttacaaccgaatgactattcattttaggagtgacatctctttccaaaacacaggctttctcgcatggtacaattctttcccgagtgacgccaccttaagactggttaacctgaactccagctacggattgtgtgcgggacgcgtggaaatctaccacggcggaacctggggtaccgtttgcgatgatagttggaccattcaggaagcggaggttgtgtgcaggcagctggggtgtggcagggcagtctcggccctgggtaatgcctacttcgggagtggaagcggacctatcactcttgacgacgttgaatgcagcggcacggagtcgaccctatggcaatgtcgcaatagaggttggttcagccacaattgcaaccatcgagaggatgctggcgttatatgctccggcaatcatctgtcaacaccagcccctttcctaaacatcacccggccaaatacagactatagctgtggtggctttctgtctcagccctccggagactttagctcccccttctacccgggaaactatcccaataatgcaaagtgcgtttgggacatcgaagtgcagaacaactacagagttaccgtgatcttccgagacgtgcagctcgaggggggttgcaattacgactacatagaggtcttcgatggcccttaccgtagctcacctcttatcgcaagagtgtgcgacggcgctaggggatcattcacatcatcgagcaatttcatgagtattaggttcatctcagatcattctatcactcggagaggctttcgcgcagagtactactcctctcctagcaacgattcgaccaacctgctctgtctacccaatcatatgcaggcatctgtatctcgaagctacctgcagagtctggggttctctgcgagcgacctggtcatcagcacctggaatggctactatgagtgccggccacagattacccctaacctcgtcatcttcacgatcccatacagcggatgcggaaccttcaaacaggctgataatgataccattgactattctaattttttgacagccgctgtgtccggaggcatcattaagagacgtacagatcttaggattcatgtaagttgtcgaatgctgcaaaacacatgggtggacacgatgtacatcgctaacgacactatccatgtggccaataacactatccaggtggaggaggtgcagtacggcaacttcgacgtgaacatctcattctacactagctcatcttttctgtaccctgtgacctcgcgcccttattatgttgacctcaatcaagacctgtacgtgcaggcagagattttgcacagcgatgctgtactgaccctgtttgtcgatacctgtgttgcctctccctactccaacgattttacgtctctgacatatgaccttatccggtcagggtgtgtcagagacgacacttatggaccttactctagtcctagtctgagaatcgctagattcagatttagggcctttcacttcctgaatagattcccctcagtttacttgagatgtaaaatggtcgtctgtagagcctacgaccccagctcaagatgctatcgtggatgtgtgttgcggagcaagagggatgttgggtcgtatcaggaaaaagtggatgtggtccttggtcccatccagttacagacccctcccagaagagaggaagagcccagatag

SEQ ID NO: 335272 - DNA, 4700 bp, Artificial Sequence
  derived and/or modified sequence
aggtggaccaggtgctctgaggctggcgtacagacacagcacgtgcgacggagtggtgttggtccgacaccacggggcatggggatacgtgtgcaaccaggagtggacgctggcagaggcctctgtcgtgtgcaggcagctgggctgcggccctgccgtgggcgcccccaagtatgtcccgctgcctggagagatggcccagccctggcttcacaacgtgtcctgccggggcaacgagtcctccctctgggagtgcagccttggctcatggtgccagagcccgtgcccccacgcatgggtggtggtcgcgctgtgctccagagaccagcagcagagcatgaagctgggcacaggggtctctctgagcccagggccctgtgtgactgcccggtcacctgcccctgaagctggccctggctcagcccatcactgtcctccctgaaaaaggagctgccgagtgaccatgcggccagctgggtccataccttaaggaggaccggcctgtgctccacagacggcactttccgggagctccggctggtgaagggccgcagtccctgcgcgggactccccgagatcagaaacgtgaatggggtggaccgcctctgtgtcctgcatgtggaggaggccatggtgttctgccgggagctggggtgcggccctgtgctccaggccccccgccgggacgtgggcgtcgtcaggaagtacctggcctgcaggggtaccgagcccaccatccgcagctgcagactggacaacaacttccgcagcggctgcgacctgcggctggacgcagaggtggtctgctcaggtgaggctgccacctgatgttcccagtgacccttgggatgatgctgggcccggacctggggagggcagggagaaggggggtgggcgttcccacggatgggcccccctgtcctgcatgagacattgggcgcagaggtgggaaagggcctcagctctcacgctggttctcagcagagtggagctgagtttctggtggccccacagaggtgtcctggctcagaacccgcaggccatctaggggtcctggctgccgctgcaagtctgagctgcctcagctgtgatctctgcatgtctaacatggatcggggttgggtagaggtcacttcttcccagccctgcctcaactgtgtgtgagctgcactggcctcacagctcctggccttgttgtgcatatgaggagcagctgaaatgaggtggatagtctgcctgctgcggtaccccagagagggtggtgctcagtggaccaaggggtgccctgacctcgcctctgggattgcagagggtgttgctgtcatggcctcggacaggcagaggctgtgaaatacgtgagcacctgcagcaggtgaccctgaccctgaccttggtgatgcggccaaggacgtctgctctgctctgggtgccgggtggaagggcctgtggctgcaagttcctgcctgtgcttggtagaccctctgcctagatgcaggtgatggctcctggctgaagccttccgcagtctgaggctcagggccaggctgttgacctgagaacacctgtctcctgcctgagaggacgtctgcccccaggacacaccgaggcccgactggtgggcggcgagcacccctgcgccgggcgcctggaggtgacctggggcaccgtctgtgatgcggccctggacctggccacggcccacgtggtgtgccgggagctgcagtgtggggcggtcgtgtccacgcccgagggcgcccgcttcggccggggctcggggccggtgtggacggaggccttccgctgtgcgggcaacgagtcgctgctgttccactgcccacgggggcgtgggagccagtgtgggcatggtcacgacgcggggctcaggtgctcagagttcaggatggtcaacggcagcagcagctgtgagggccgcgtggagttccaggtgcaggggtcctgggcacccctctgtgccacccactgggacatagcagatgccaccgtcctctgccaccagctcaactgtggcaacgcggtggccgcacctggaggaggccattttggggacggggacgctgccatctggcctgatgcctttcactgtgaggggacagagtcctacttgtggaattgcccagtaagcaccctgggggccccggcctgtgccccgggaaacacagcctccgcggtctgctcaggtctggcccacgccctgcgactgagggaaggacagagccgctgtgacggccgcgtggaggtctccctggatggcgtgtggggccgcgtcctggacgatgcctgggacctgcgcggcgcgggcgtggtgtgccggcaactcgggtgcagaggggcccagcaagcctatgacgcacctgcccccagccgcggatccgtccaggtggcgctgagccgcgtgcgctgtctgggcaccgaaacccgcctgactcagtgcaacgtgtccgcgaccctgcaggagcccgcggggacctcgcgggacgccggcgtggtgtgctccggtgaggtcggaaccgcgtcccccatggcccgtcgccacgggatcccgggcgccctgactctgtctctccacagggagcctcagggtgcggctggccgcggggccggggcgctgcacgggggcgcgtggggcaccgtgtgtgacgatgcctgggacctgcgggacgcgcacgtggtctgcaggcagctgggctgtggccgcgccctgagccctgggggccgcacacttcggagccggggcagggcgcatctggctggacgagctgggctgccagggccacgagtctgcgctgtggcagtgcccgtcggcgggctgggggcggcacgactggaggcacaaggaggacgccggcgtcttctgctcagagtcggtggctctgaggctgcgaggtgggacctgctgctgtgctgggtggctggacgtgttctacaatgggacctggggcgccatgtgcagcaatgccctgaaggacctctccttgtccatcatctgcaagcagctggggtgtggggagtggggctggctggagaacaggcccttcccctctgcgggcaccgggaccgcctgggtggacaacatcgagtgccgcaggctgcccaactccactctgtggcaatgcccttcccacccatggcacccgcactcttgcgaccttcgagagcaggtctggattacctgtgcaggattgtcagaggacaggccacaggctgctggggagcccctcaactgctcctcctggctcggctgcccagaggagggcgcactgcgcgtgcgcgggggcgaggaccgctgctccgggcgcgtggagctctggcacgcgggctcctggggcaccgtgtgcgacgatggctgggacctggcggacgcggaggtcgtgtgccgccagctgggctgtggtcgggccgtcgccgccctgggggccgccgcctttggccctggctccgggcccgtgtggctggacgaggtggggtgccggggcagcgaggcgtccctgtggggctgccccggagcggtggggacgcggagaccgcgcgcacgaggaggacgcgggcgtgcgctgctgggaaaacaaacagttaaccacagtgatgaccttagcaaaagcagcagcagtgagcctggcccaggccccccactgcctgcagctcccttccggacattctgggtggtcagtgtcgtcctgggatcccttcttggtcttctccttctgggcctcatggcttttctgattctgcctcgagtcacacaagccatgcagaggggtctgggaagatccgaggtatctcctggagaagccatctatgatgtcattggggaaatgccgccagcaggactgtacgaggaaatcatggaggccgaggctgtgctccaagatgaggaggacggaagtgtggtgaaggtggacacagaagccgcaggctgaagtacagtggtgtgatctcggctcacggcaacctctgtctcccaggttcaagcaattcttatgcctcagcctccagagtagctaggattacagaaagaaagaacaaaaaagagaaggagagtaaattcttgtttccaagttagacaagagagttatgattaaatgccaccttgggtccacaagtcttccataagaaaaacaatgaaaggatttctggatgattctattatgacatcacaacttgcagcagaggcagatgtaatgaggcaatacttgacattgttttcagggcatttgctcgtgtcctcggtctcttgccttggcacctgggtggcttgccacccacagcaattgtgactttgaaaggccattccaccgttctatcaatccagctgcttcaggatgatgggcaacgtggtaagaccagtgaattccacgaacatgagcccactgctgcacttctatggccgtaaagatagacaagagaagcacttctagaatggcaggataagaagctctgaaaatctgttcctccagaactgcaatgtgaacaccagctaaagtgttgaaaaatgaatggagcctcagagacctttgggacatcatcaagggtatctaacaggtacaatgggaatcacagaaagagagaaaataaggggacaaaaatactatttgaagaaataatgggtgtaaattccccaaatttgatgaaaaagatccatctacatatccaaaagcttaataaatgaatattcatttatt

SEQ ID NO: 335273 - DNA, 1680 bp, Artificial Sequence
  derived and/or modified sequence
atgaccatccacttcagaagcgacatcagcttccagaacaccggcttcctggcctggtacaacagcttccccagcgacgccaccctgagactggtgaacctgaacagcagctacggcctgtgcgccggcagagtggagatctaccacggcggcacctggggcaccgtgtgcgacgacagctggaccatccaggaggccgaggtggtgtgcagacagctgggctgcggcagagccgtgagcgccctgggcaacgcctacttcggcagcggcagcggccccatcaccctggacgacgtggagtgcagcggcaccgagagcaccctgtggcagtgcagaaacagaggctggttcagccacaactgcaaccacagagaggacgccggcgtgatctgcagcggcaaccacctgagcacccccgcccccttcctgaacatcaccagacccaacaccgactacagctgcggcggcttcctgagccagcccagcggcgacttcagcagccccttctaccccggcaactaccccaacaacgccaagtgcgtgtgggacatcgaggtgcagaacaactacagagtgaccgtgatcttcagagacgtgcagctggagggcggctgcaactacgactacatcgaggtgttcgacggcccctacagaagcagccccctgatcgccagagtgtgcgacggcgccagaggcagcttcaccagcagcagcaacttcatgagcatcagattcatcagcgaccacagcatcaccagaagaggcttcagagccgagtactacagcagccccagcaacgacagcaccaacctgctgtgcctgcccaaccacatgcaggccagcgtgagcagaagctacctgcagagcctgggcttcagcgccagcgacctggtgatcagcacctggaacggctactacgagtgcagaccccagatcacccccaacctggtgatcttcaccatcccctacagcggctgcggcaccttcaagcaggccgacaacgacaccatcgactacagcaacttcctgaccgccgccgtgagcggcggcatcatcaagagaagaaccgacctgagaatccacgtgagctgcagaatgctgcagaacacctgggtggacaccatgtacatcgccaacgacaccatccacgtggccaacaacaccatccaggtggaggaggtgcagtacggcaacttcgacgtgaacatcagcttctacaccagcagcagcttcctgtaccccgtgaccagcagaccctactacgtggacctgaaccaggacctgtacgtgcaggccgagatcctgcacagcgacgccgtgctgaccctgttcgtggacacctgcgtggccagcccctacagcaacgacttcaccagcctgacctacgacctgatcagaagcggctgcgtgagagacgacacctacggcccctacagcagccccagcctgagaatcgccagattcagattcagagccttccacttcctgaacagattccccagcgtgtacctgagatgcaagatggtggtgtgcagagcctacgaccccagcagcagatgctacagaggctgcgtgctgagaagcaagagagacgtgggcagctaccaggagaaggtggacgtggtgctgggccccatccagctgcagaccccccccagaagagaggaggagcccagatag

SEQ ID NO: 335274 - DNA, 1680 bp, Artificial Sequence
  derived and/or modified sequence
atgaccattcatttcaggagcgacattagctttcaaaacacgggtttccttgcttggtacaactcattcccctccgatgcgacactgcgcctggtgaaccttaactcttcctacggactgtgtgctggccgagtggaaatttaccacggagggacttggggaaccgtatgcgacgattcatggacaatccaggaagctgaggtagtttgccggcaattaggctgtggtcgggccgtgagtgccttgggcaatgcctactttggcagtgggagcggaccaattaccttggatgacgttgaatgttcgggcaccgaaagtacgctgtggcaatgccgcaaccgaggttggtttagtcataactgtaaccaccgggaggatgccggcgtgatttgctccggcaaccacctcagtacgccggcaccgttcctcaacattacccgcccaaatactgactacagctgcggcgggttccttagtcagccctcaggagacttcagctctccattctaccctgggaactaccctaacaatgctaagtgtgtttgggacatcgaggtgcagaataactacagggtgacagtcatatttcgagacgtccagctggaagggggctgtaattatgactacatcgaagtgtttgacggaccataccgttcatccccactgattgctcgagtgtgcgacggtgctcgcgggagtttcacttctagtagcaacttcatgtctattaggttcatatccgatcattccatcacaaggaggggcttccgggcagaatactattcatctccatccaacgattctaccaacctgctgtgtctgcccaatcatatgcaggcctcggtgtctcggagctacttacaaagtctcggcttcagcgcgagcgatcttgtaattagcacctggaatggttactatgagtgtcgcccgcagataactccgaatctggtcatattcacaattccgtacagtggatgtggtaccttcaagcaggcagataacgacacaattgactacagcaatttcctgacagcggccgtgagcggtgggattatcaaacggcgcaccgacctgcgaatccatgtttcatgtcgcatgttacagaatacctgggtggacacgatgtacatcgccaacgatactatccatgttgctaataacacaatccaggtggaggaagtccaatatgggaacttcgatgtgaacatatccttctatactagtagttcttttctgtacccagtgaccagcagaccctattacgtggacttaaatcaggatttatacgttcaggcagaaattctgcatagcgacgccgtcctcaccttatttgtggatacctgcgtcgcttctccatactcaaatgatttcacaagcctgacctacgacctcatcaggtccgggtgcgtgagggatgatacctacggcccatactcaagtccctctctgaggatcgcaaggtttcgttttcgcgccttccatttcttaaaccgctttccctccgtgtaccttcggtgcaaaatggtcgtctgtcgggcctatgaccccagttctaggtgctacagaggatgtgtgctccggtccaaacgagatgtcggatcttatcaggaaaaggtggatgttgtcctcggacctatacagctgcaaactcctcctaggagggaggaggagccgagatag

SEQ ID NO: 335275 - DNA, 1680 bp, Artificial Sequence
  derived and/or modified sequence
atgaccatccacttcagaagtgacatctccttccagaacacaggcttcctggcctggtacaacagcttccccagtgatgccaccctgcggctggtgaacctgaacagcagctatggcctgtgtgccggccgggtggagatctaccatggaggcacctggggcaccgtgtgtgatgacagctggaccatccaggaggccgaggtggtgtgccggcagctgggctgcggccgggctgtgtctgccctgggcaatgcctactttggaagtggcagcggccccatcaccctggatgatgtggagtgcagcggcacagagagcaccctgtggcagtgcaggaacagaggctggttcagccacaactgcaaccacagagaagatgctggggtcatctgcagcggcaaccacctgagcaccccagcccccttcctgaacatcacccggcccaacacagactacagctgtggcggcttcctgagccagcccagcggggacttcagcagccccttctacccaggcaactaccccaacaatgccaagtgtgtgtgggacatcgaggtgcagaacaactacagagtgaccgtcatcttcagagatgtgcagctggagggcggctgcaactatgactacatcgaggtgtttgatggcccctaccgcagcagccccctgattgcccgggtgtgtgatggagcccggggcagcttcaccagcagcagcaacttcatgagcatccgcttcatcagtgaccacagcatcacccggcggggcttccgggcagagtactacagcagccccagcaatgacagcaccaacctgctgtgcctgcccaaccacatgcaggcctctgtgagccgcagctacctgcagagcctgggcttcagcgccagtgacctggtgatcagcacctggaatggctactatgaatgtcggccccagatcacccccaacctggtgatcttcaccatcccctacagcggctgcggcaccttcaagcaggccgacaatgacaccatcgactacagcaacttcctgacagctgctgtgtctgggggcatcatcaagagaagaacagacctgcgcatccacgtgtcctgcaggatgctgcagaacacctgggtggacaccatgtacatcgccaatgacaccatccacgtggccaacaacaccatccaggtggaggaggtgcagtatggcaactttgatgtgaacatctccttctacaccagcagcagcttcctgtaccctgtgaccagccggccctactacgtggacctgaaccaggacctgtatgtgcaggccgagatcctgcacagtgatgctgtgctgaccctgtttgtggacacctgtgtggccagcccctacagcaatgacttcaccagcctgacctatgacctgatccgcagcggctgtgtgagagatgacacctacggcccctacagcagccccagcctgagaattgcccgcttccgcttccgggccttccacttcctgaaccgcttccccagcgtgtacctgcgctgcaagatggtggtgtgccgggcctatgaccccagcagccgctgctaccggggctgtgtgctgcggagcaagagagatgtgggcagctaccaggagaaggtggatgtggtgctgggccccatccagctgcagaccccaccaagaagagaggaggagcccaggtag

SEQ ID NO: 335276 - DNA, 1680 bp, Artificial Sequence
  derived and/or modified sequence
atgaccatccacttccggagcgacatcagcttccagaacaccggcttcctggcttggtacaactcttttccctccgatgcaactctgcggctggtgaatttgaacagctcttacgggctctgtgcaggaagagtggagatctatcacggcgggacctggggaaccgtgtgtgacgatagctggactatccaggaggccgaggtcgtctgtcgacagctgggctgcggccgggccgtttccgccctaggaaacgcttactttgggagcgggtcaggtcctataacactggatgacgtcgaatgctcaggcactgaaagcaccctgtggcagtgccgcaatcggggatggttctctcataactgtaaccaccgagaggatgctggagtcatttgttctgggaaccacctgtcgaccccagcacccttcctaaatattaccagaccaaacactgattacagttgcgggggtttccttagccagccttccggagacttctccagtcctttctaccccggaaactacccaaacaacgctaaatgcgtctgggatattgaggtgcagaacaactaccgtgtgaccgtgatcttccgggacgtgcagcttgaggggggttgtaactacgactatattgaggttttcgacggaccttaccggagctcacccctgattgcacgagtgtgcgatggagctcgcggcagcttcacatcatcgtcaaactttatgagcattaggttcatctcagaccattccatcactaggcgcggatttcgcgctgaatactactcctctccaagcaacgacagcactaatttgttgtgccttcccaaccacatgcaggcctctgttagtcgaagctatttgcagagtcttgggttctcagcatctgatctagtgatttctacatggaacggttactacgaatgcagaccacagattacacccaacctggttatcttcactatcccctatagcggctgtgggacatttaagcaggcagacaacgacaccatagattattctaatttcctgacagccgccgtgtcaggtggaatcattaaacgaagaacggaccttaggatacatgtgagttgcaggatgctccaaaacacctgggtggatacgatgtatatcgctaatgacactattcatgtagcgaataacaccatacaggtagaagaggtccagtacggcaattttgacgtgaatatctccttctacactagctcatcctttttgtaccccgtgacatcacgtccctactatgtggatctgaaccaggatctgtatgttcaggcagagatcctgcacagcgatgcagtcttgacgctgttcgtagatacatgtgtggcttcaccgtactcaaacgattttacatcgcttacctacgacctgattcgctcagggtgtgtgcgcgacgatacgtacggcccgtattctagtcctagcctgcggattgcaaggtttcgctttcgcgcatttcacttcctgaatcggtttccgtctgtgtacttaagatgcaaaatggtggtttgccgggcctacgatcctagtagtagatgttataggggctgcgtgttgcgatccaaacgggacgtcgggtcctaccaggagaaggtggatgtcgtgttgggtccaattcagttgcaaactcccccacgtcgggaggaggaaccgcgttag

SEQ ID NO: 335277 - DNA, 1680 bp, Artificial Sequence
  derived and/or modified sequence
atgacgatacacttcagatctgatatatcttttcaaaacacaggcttccttgcatggtacaactctttcccctcagatgcaactctcagacttgtgaatctgaactcgagctacggactgtgtgcgggaagggtggagatctatcatggtggtacttggggaaccgtttgtgacgactcatggacaattcaagaggccgaggtcgtgtgtcgacaacttggttgtggcagggccgtatctgctttgggtaatgcttactttggatccggttctggaccaatcaccctcgatgacgtggagtgtagcgggacagagtccaccctatggcagtgccggaatcgcggttggttcagtcataattgcaatcaccgtgaagacgcaggtgtcatatgctcagggaaccacttgagcacaccggcaccatttctgaatatcacccgccctaacactgattatagctgcggcggattcctaagccagccgagtggcgacttttcctctcccttctacccagggaattacccgaacaacgccaaatgcgtgtgggacattgaggtgcagaacaattaccgggtcactgtgatttttagggacgtgcagctcgagggaggatgcaactatgactatatagaagtgtttgacgggccttaccggagtagcccattgatcgctcgcgtttgtgatggtgctagaggaagcttcacatctagctcaaacttcatgagcatccgctttatctcagatcatagcattactagacggggattcagagcagaatattatagttccccctctaacgactcgaccaatctcctttgtcttcctaaccatatgcaagcatcagttagtagatcctatctgcagtccctcggattttcagcctcagatctggtaattagcacatggaatggctattacgagtgccgaccccagattacacccaaccttgtaatctttactataccctattcaggttgtggtacctttaagcaggctgacaacgacactatcgattatagcaacttcttgacggctgcagtttcaggcggaataattaagaggcgtacagatctgcgcatccatgtatcatgtaggatgttacagaacacttgggtggacaccatgtacatcgccaatgatacaattcacgtggcaaataataccatccaagtggaggaagtccagtatgggaattttgatgtgaacatttccttctatacctcaagctctttcctgtatcctgtcactagccggccttattacgtcgacttaaatcaagatctgtacgtgcaagccgaaatcttacattctgatgccgtgctgacgctctttgtcgatacatgcgttgcaagcccttactccaatgattttacctccctgacatacgatcttatacggtctggatgcgtcagggacgatacctacgggccttatagtagcccttcactgcgtatcgccagatttcgctttcgggcttttcacttccttaatcgatttccctcagtatacctgaggtgcaagatggtcgtttgcagggcatatgatcctagttccaggtgttatagaggttgtgtcttgagaagtaagcgggatgtaggctcctaccaggagaaagtggacgtcgttctcggaccaatccagcttcagaccccacctcgtagggaagaagagcccagatag

SEQ ID NO: 335278 - DNA, 121 bp, Artificial Sequence
  derived and/or modified sequence
acacacataccaacagaacatgacaaaagaacaaaaccagccgcatgcatactcgatggagacaaaggtaacactgcagaatggtgaaggaagaacagtcattttaatgacagtgttggct

SEQ ID NO: 335279 - DNA, 3702 bp, Artificial Sequence
  derived and/or modified sequence
atgaagactccctgtattcccagtcctaagcaagggagcaaaggcaggggacagagccctgctgctcaggtgaggggccccacgtggaacgcgccggcgcgggaggggcggcctggcgcaggtcatttgggacatctgcgggttggcgcatgcgcgcgaggtgcgcaggctcgcgcctttttcccttttctaagctttctgtgttacccccggttccgctgtcttttctgtctacagtttgcgatccccgcgtccaggatggagcagctgaacgaactggagctgctgatggagaagagtttttgggaggaggcggagctgccggcggagctatttcagaagaaagtggtagcttcctttccaagaacagttctgagcacaggaatggataaccggtacctggtgttggcagtcaatactgtacagaacaaagagggaaactgtgaaaagcgcctggtcatcactgcttcacagtcactagaaaataaagaactatgcatccttaggaatgactggtgttctgttccagtagagccaggagatatcattcatttggagggagactgcacatctgacacttggataatagataaagattttggatatttgattctgtatccagacatgctgatttctggcaccagcatagccagtagtattcgatgtatgagaagagctgtcctgagtgaaacttttaggagctctgatccagccacacgccaaatgctaattggtacggttctccatgaggtgtttcaaaaagccataaataatagctttgccccagaaaagctacaagaacttgcttttcaaacaattcaagaaataagacatttgaaggaaatgtaccgcttaaatctaagtcaagatgaaataaaacaagaagtagaggactatcttccttcgttttgtaaatgggcaggagatttcatgcataaaaacacttcgactgacttccctcagatgcagctctctctgccaagtgataatagtaaggataattcaacatgtaacattgaagtcgtgaaaccaatggatattgaagaaagcatttggtcccctaggtttggattgaaaggcaaaatagatgttacagttggtgtgaaaatacatcgagggtataaaacaaaatacaagataatgccgctggaacttaaaactggcaaagaatcaaattctattgaacaccgtagtcaggttgttctgtacactctactaagccaagagagaagagctgatccagaggctggcttgcttctctacctcaagactggtcagatgtaccctgtgcctgccaaccatctagataaaagagaattattaaagctaagaaaccagatggcattctcattgtttcaccgtattagcaaatctgctactagacagaagacacagcttgcttctttgccacaaataattgaggaagagaaaacttgtaaatattgttcacaaattggcaattgtgctctttatagcagagcagttgaacaacagatggattgtagttcagtcccaattgtgatgctgcccaaaatagaagaagaaacccagcatctgaagcaaacacacttagaatatttcagcctttggtgtctaatgttaaccctggagtcacaatcgaaggataataaaaagaatcaccaaaatatctggctaatgcctgcttcggaaatggagaagagtggcagttgcattggaaacctgattagaatggaacatgtaaagatagtttgtgatgggcaatatttacataatttccaatgtaaacatggtgccatacctgtcacaaatctaatggcaggtgacagagttattgtaagtggagaagaaaggtcactgtttgctttgtctagaggatatgtgaaggagattaacatgacaacagtaacttgtttattagacagaaacttgtcggtccttccagaatcaactttgttcagattagaccaagaagaaaaaaattgtgatatagataccccattaggaaatctttccaaattgatggaaaacacgtttgtcagcaaaaaacttcgagatttaattattgactttcgtgaacctcagtttatatcctaccttagttctgttcttccacatgatgcaaaggatacagttgcctgcattctaaagggtttgaataagcctcagaggcaagcgatgaaaaaggtacttctttcaaaagactacacactcatcgtgggtatgcctgggacaggaaaaacaactacgatatgtactctcgttccagcgccagaacaagttgaaaaaggtggtgtgagcaatgtaacagaagccaaactcatagttttcctaacctccatttttgttaaggctggatgcagtccctctgatattggtattattgcaccgtacaggcagcaattaaagatcatcaatgatttattggcacgttctattgggatggtcgaagttaatacagtagacaaataccaaggaagggacaaaagtattgtcctagtatcttttgttagaagtaataaggatggaactgttggtgaactcttgaaagattggcgacgtcttaatgttgctataaccagagccaaacataaactgattcttctggggtgtgtgccctcactaaattgctatcctcctttggagaagctgcttaatcatttaaactcagaaaaattaatcattgatcttccatcaagagaacatgaaagtctttgccacatattgggtgactttcaaagagaataaaacactatttcccttgccttttcatactagggcagtatctcctctagctagtgcccatacagaaaattctatcaccatacaaaatttaatgcagtatttatgttttaaagcacaggtgtaccgaaaactgtgaaaagtctgaatttatgggttctatgcatgcatttttgcctaacctagagaaagagtttgataaatttttaccagctttgaagatggattaacttttgactttgagctttaaacttttaagtcagacatttcaggactaatttgattttgtagatatcattgtaagaactttatttgaaagactgaataaagggatttgatttgttttcatcatttaagcacagtcttgtgatgatgagaacataagtgtgattcttttctgtattttgaggtccctaatccaaagcccattttgctaggattttttctgctatcagatgtgttttcactctaaacctagtcttttatgacatgaattgattacttcctgttaattttctatcctcccttactatcctccttttttgttttcagtattcagtatttcagtattctagagtagattttgatataaaagaaaataattcttacatcatcttttgcaacaaattttgttttctgaattgataataaatttaaaaagttgattcctattttcacatatgttcatatgcccctatgtttgggggtatcactcagttttcccttttttgtgtaaagatgttttgtaaaacaaaattgtctcaaagtgattatattatatatataaaaagtaacagattttaacaaaggttaaaagattcttggggtaacagattcttctggggcttggaaatcttccatttctcttgagggttttttttaatgagtgttaaatatgttaaaatttttatttctacctcatgtgtttttttaaattattacttgaagttttttatttaataaattttttctactaatgga

SEQ ID NO: 335280 - protein, 261 aa, Artificial Sequence
  derived and/or modified sequence
MRVGLPSEASSCPWSARGPRDPPERRRSGLAHVLSDNIYPVEDLAATSVTIFPNAELGGPFDQMNGVAGDGMINIDMTGEKRSLDLPYPSSFAPVSAPRNQTFTYMGKFSIDPQYPGASCYPEGIINIVSAGILQGVTSPASTTASSSVTSASPNPLATGPLGVCTMSQTQPDLDHLYSPPPPPPPYSGCAGDLYQDPSAFLSAATTSTSSSLAYPPPPSYPSPKPVEAARDPGCLVAAQQQQQPPPPPPITHTTCHCGPF

SEQ ID NO: 335281 - DNA, 786 bp, Artificial Sequence
  derived and/or modified sequence
atgcgcgtcggcctgcccagcgaggcatcatcttgcccctggagcgctaggggtccaagggatccacctgagcgtaggcgctcaggcctggcacacgtacttagcgacaatatctatcccgttgaggacctggctgccacctctgtcaccatctttccaaatgcagagctgggcggaccctttgatcagatgaatggtgtggccggagacggcatgataaatatagatatgaccggcgaaaagcggagcctggatttgccttatccttcaagtttcgcgcctgtctccgctccccgcaatcaaacgttcacatatatggggaagttcagcatcgacccacagtatccaggtgcaagttgctatcctgaagggattatcaacattgtctctgccggaattctgcagggagtgacaagtcctgcgagtaccactgcttcttcgtcagttacctcagcctctcccaatcccctggccactggcccactcggcgtatgtaccatgtcacagacacaaccagatctagatcacctgtactccccccctcctccaccccctccctacagcggatgcgctggcgacctgtatcaggacccttccgcctttttatcagctgcgacaacctccaccagtagtagtttggcttaccctccaccacccagctacccatcccctaaacctgtggaagccgcccgtgatcccgggtgcctggtcgccgcgcagcaacagcagcaaccccccccgccaccacctatcacacataccacgtgccattgcggaccattctag

SEQ ID NO: 335282 - DNA, 786 bp, Artificial Sequence
  derived and/or modified sequence
atgagggtgggcctgcccagcgaggccagcagctgcccctggagcgcccggggcccccgggaccccccagagcggcggcgcagcggcctggcccacgtgctgagtgacaacatctaccctgtggaggacctggccgccacctctgtgaccatcttccccaatgctgagctgggcggcccctttgaccagatgaatggagtggccggagatggcatgatcaacatcgacatgaccggggagaagaggagcctggacctgccctaccccagcagctttgcccctgtgtctgcccccaggaaccagaccttcacctacatgggcaagttcagcattgacccccagtacccaggggccagctgctacccagagggcatcatcaacatcgtgtctgctggcatcctgcagggcgtgaccagccctgccagcaccacagccagcagctctgtgaccagcgccagccccaaccccctggccaccggccccctgggcgtgtgcaccatgagccagacccagcctgacctggaccacctgtacagccccccacctcctcctccaccctacagcggctgtgccggggacctgtaccaggaccccagcgccttcctgtctgctgccaccaccagcaccagcagcagcctggcctacccacctccacccagctaccccagccccaagcctgtggaggccgcccgggaccccggctgcctggtggccgcccagcagcagcagcagcccccacctcctccacccatcacccacaccacctgccactgcggccccttctag

SEQ ID NO: 335283 - DNA, 786 bp, Artificial Sequence
  derived and/or modified sequence
atgcgggtgggcctgcccagcgaggccagcagctgcccctggagcgcgcggggacctcgtgatccccctgagcggaggcgctctgggttggcccatgtgctttcagacaatatctacccagtggaggatttggctgctacctctgtgacgatatttcctaacgccgagttgggaggcccatttgaccagatgaatggcgtcgccggcgacgggatgataaacattgacatgacaggtgaaaagcggagcctagatttaccgtacccatctagtttcgcgccggtgagtgcacccaggaatcaaacctttacatacatggggaaattttccatagacccccagtacccaggtgcctcatgctatccggaggggataatcaacattgtatctgccggcattctgcagggagtgacctctccagcaagcactactgcatcatctagcgtcaccagtgcttctcccaacccgctcgctaccggccccctgggggtgtgcacgatgtctcagacccaacccgatctcgaccatttatactcaccaccccctcccccccctccatattccggttgcgcgggcgatctgtaccaggatccgtctgcctttctgtcagcggcaactacgagcaccagctcaagtctagcatatccgcccccgcctagttacccatcccctaaacccgtggaagctgcccgggaccccggatgcctggttgctgcccagcagcagcagcagccaccacctccccctccaattacacacactacatgccattgtggccctttttag

SEQ ID NO: 335284 - DNA, 786 bp, Artificial Sequence
  derived and/or modified sequence
atgagagtgggactgccctcagaagcctcatcctgcccctggagcgccaggggacccagagatcctcctgagcgcagacggtcgggactcgcccacgtgttatcggataatatttatccggtagaggatctagctgcaacgtccgtgacaattttcccaaacgcagaactagggggtccatttgatcaaatgaacggggtggcaggcgacgggatgatcaatattgacatgacaggagaaaaaagatccttggacctgccatacccctcctccttcgccccagtctcagcccctcgaaatcagacgtttacatatatgggtaagttctccatcgaccctcagtatcccggagcttcctgctaccctgagggcatcattaacattgtgtcagcaggtattttacagggcgtgacttccccagcgagcacaactgcatcctcttccgtgacgtccgcgtcccctaacccactagccacaggtccattaggggtgtgcacaatgagtcaaactcagcccgatctcgaccacttatatagccctccccctccaccccctccgtattcaggctgtgccggagacttgtaccaagacccctccgcctttctgtccgccgctactacaagcacgagcagcagcctggcctatccaccaccgccaagctacccaagtcccaaacctgtggaggcagccagggaccccggatgtctggttgccgcacagcagcaacagcagcctcctcccccacctcccatcacacacacaacttgtcactgcggtccattttag

SEQ ID NO: 335285 - DNA, 786 bp, Artificial Sequence
  derived and/or modified sequence
atgagagtgggcctgcccagcgaggccagcagctgcccctggagcgccagaggccccagagacccccccgagagaagaagaagcggcctggcccacgtgctgagcgacaacatctaccccgtggaggacctggccgccaccagcgtgaccatcttccccaacgccgagctgggcggccccttcgaccagatgaacggcgtggccggcgacggcatgatcaacatcgacatgaccggcgagaagagaagcctggacctgccctaccccagcagcttcgcccccgtgagcgcccccagaaaccagaccttcacctacatgggcaagttcagcatcgacccccagtaccccggcgccagctgctaccccgagggcatcatcaacatcgtgagcgccggcatcctgcagggcgtgaccagccccgccagcaccaccgccagcagcagcgtgaccagcgccagccccaaccccctggccaccggccccctgggcgtgtgcaccatgagccagacccagcccgacctggaccacctgtacagcccccccccccccccccccccctacagcggctgcgccggcgacctgtaccaggaccccagcgccttcctgagcgccgccaccaccagcaccagcagcagcctggcctacccccccccccccagctaccccagccccaagcccgtggaggccgccagagaccccggctgcctggtggccgcccagcagcagcagcagccccccccccccccccccatcacccacaccacctgccactgcggccccttctag

SEQ ID NO: 335286 - DNA, 2872 bp, Artificial Sequence
  derived and/or modified sequence
aactgagcgaggagcaattgattaatagctcggcgaggggactcactgactgttataataacactacaccagcaactcctggcttcccagcagccggaacacagacaggagagagtcagtggcaaatagacatttttcttatttcttaaaaaacagcaacttgtttgctacttttatttctgttgatttttttttcttggtgtgtgtggtggttgtttttaagtgtggagggcaaaaggagataccatcccaggctcagtccaacccctctccaaaacggcttttctgacactccagctgtctgacaacatctacccggtggaggacctcgccgccacgtcggtgaccatctttcccaatgccgaactgggaggcccctttgaccagatgaacggagtggccggagatggcatgatcaacattgacatgactggagagaagaggtcgttggatctcccatatcccagcagctttgctcccgtctctgcacctagaaaccagaccttcacttacatgggcaagttctccattgaccctcagtaccctggtgccagctgctacccagaaggcataatcaatattgtgagtgcaggcatcttgcaaggggtcacttccccagcttcaaccacagcctcatccagcgtcacctctgcctcccccaacccactggccacaggacccctgggtgtgtgcaccatgtcccagacccagcctgacctggaccacctgtactctccgccaccgcctcctcctccttattctggctgtgcaggagacctctaccaggacccttctgcgttcctgtcagcagccaccacctccacctcttcctctctggcctacccaccacctccttcctatccgtcccccaagccagccacggacccaggtctcttcccaatgatcccagactatcctggattctttccatctcagtgccagagagacctacatggtacagctggcccagaccgtaagccctttccctgcccactggacaccctgcgggtgccccctccactcactccactctctacaatccgtaactttaccctggggggccccagtgctggggtgaccggaccaggggccagtggaggcagcgagggaccccggctgcctggtagcagctcagcagcagcagcagccgccgccgccgccgcctataacccacaccacctgccactgcggcccattctgaggcctcgcaagtaccccaacagacccagcaagacgccggtgcacgagaggccctacccgtgcccagcagaaggctgcgaccggcggttctcccgctctgacgagctgacacggcacatccgaatccacactgggcataagcccttccagtgtcggatctgcatgcgcaacttcagccgcagtgaccacctcaccacccatatccgcacccacaccggtgagaagcccttcgcctgtgactactgtggccgaaagtttgcccggagtgatgagaggaagcgccacaccaagatccacctgagacagaaagagcggaaaagcagtgccccctctgcatcggtgccagccccctctacagcctcctgctctgggggcgtgcagcctgggggtaccctgtgcagcagtaacagcagcagtcttggcggagggccgctcgccccttgctcctctcggacccggacaccttgagatgagactcaggctgatacaccagctcccaaaggtcccggaggccctttgtccactggagctgcacaacaaacactaccaccctttcctgtccctctctccctttgttgggcaaagggctttggtggagctagcactgccccctttccacctagaagcaggttcttcctaaaacttagcccattctagtctctcttaggtgagttgactatcaacccaaggcaaaggggaggctcagaaggaggtggtgtggggacccctggccaagagggctgaggtctgaccctgctttaaagggttgtttgactaggttttgctaccccacttccccttattttgacccatcacaggtttttgaccctggatgtcagagttgatctaagacgttttctacaataggttgggagatgctgatcccttcaagtggggacagcaaaaagacaagcaaaactgatgtgcactttatggcttgggactgatttgggggacattgtacagtgagtgaagtatagcctttatgccacactctgtggccctaaaatggtgaatcagagcatatctagttgtctcaacccttgaagcaatatgtattataaactcagagaacagaagtgcaatgtgatgggaggaacatagcaatatctgctccttttcgagttgtttgagaaatgtaggctattttttcagtgtatatccactcagattttgtgtatttttgatgtacactgttctctaaattctgaatctttgggaaaaaatgtaaagcatttatgatctcagaggttaacttatttaagggggatgtacatatattctctgaaactaggatgcatgcaattgtgttggaagtgtccttggtgccttgtgtgatgtagacaatgttacaaggtctgcatgtaaatgggttgccttattatggagaaaaaaaatcactccctgagtttagtatggctgtatatttctgcctattaatatttggaattttttttagaaagtatatttttgtatgctttgttttgtgacttaaaagtgttacctttgtagtcaaatttcagataagaatgtacataatgttaccggagctgatttgtttggtcattagctcttaatagttgtgaaaaaataaatctattctaacgcaaaaccactaactgaagttcagataatggatggtttgtgactatagtgtaaataaatacttttc

SEQ ID NO: 335287 - DNA, 1190 bp, Artificial Sequence
  derived and/or modified sequence
tttcggactcagggcccgagatgcgagtcggactcccttccgaggcgtcgtcttgcccatggtcagcgcgggggccgcgggacccgccagagcgcaggcggagtgggctggcgcacgtgctgtctgacaacatctacccggtggaggacctcgccgccacgtcggtgaccatctttcccaatgccgaactgggaggcccctttgaccagatgaacggagtggccggagatggcatgatcaacattgacatgactggagagaagaggtcgttggatctcccatatcccagcagctttgctcccgtctctgcacctagaaaccagaccttcacttacatgggcaagttctccattgaccctcagtaccctggtgccagctgctacccagaaggcataatcaatattgtgagtgcaggcatcttgcaaggggtcacttccccagcttcaaccacagcctcatccagcgtcacctctgcctcccccaacccactggccacaggacccctgggtgtgtgcaccatgtcccagacccagcctgacctggaccacctgtactctccgccaccgcctcctcctccttattctggctgtgcaggagacctctaccaggacccttctgcgttcctgtcagcagccaccacctccacctcttcctctctggcctacccaccacctccttcctatccgtcccccaagccagtggaggcagcgagggaccccggctgcctggtagcagctcagcagcagcagcagccgccgccgccgccgcctataacccacaccacctgccactgcggcccattctgaggcctcgcaagtaccccaacagacccagcaagacgccggtgcacgagaggccctacccgtgcccagcagaaggctgcgaccggcggttctcccgctctgacgagctgacacggcacatccgaatccacactgggcataagcccttccagtgtcggatctgcatgcgcaacttcagccgcagtgaccacctcaccacccatatccgcacccacaccggtgagaagcccttcgcctgtgactactgtggccgaaagtttgcccggagtgatgagaggaagcgccacaccaagatccacctgagacagaaagagcggaaaagcagtgccccctctgcatcggtgccagccccctctacagcctcctgctctgggggcgtgcagcctg

SEQ ID NO: 335288 - DNA, 1281 bp, Artificial Sequence
  derived and/or modified sequence
atgaacggcgtcgctggtgacgggatgatcaatattgatatgactggcgaaaagcggagtctggatttaccctatcctagctcgttcgcccctgtctccgccccaaggaatcagacttttacttatatgggcaagttctccatagacccccaatacccgggtgcatcctgctaccccgaggggattatcaacatcgtatccgcaggcattctccagggagttacttctcccgcctctaccaccgccagctcaagcgtgacctccgcctctcccaatccactcgctaccggccctctcggggtctgtaccatgagccagacgcaacctgacctcgaccatttatatagccccccaccgcctccccctccgtatagcgggtgcgccggggacctgtatcaggacccatctgcatttctgtctgctgccacaactagcacaagtagttccctggcatatccgccccctccgtcgtatcctagcccaaaacccgctacagatccgggactgttcccaatgatacccgactatccgggattttttccctcccaatgtcagagggatctgcatggcaccgccggccccgacaggaaacctttcccttgccccctcgatacactcagggtgccacctcccctgactccgctgagtacgatccggaatttcacacttggggggccgagcgccggtgtgaccggccctggcgccagcggcggcagcgagggacctcggctgccaggtagctcctctgccgctgctgccgctgcagccgcggctgcctataatccccatcatctgccgttacggccaattctgcgtcctagaaagtaccccaatagaccatctaaaactcccgtgcacgaacgcccctacccttgccctgccgagggatgtgacaggcgcttctctaggtccgacgagttgacaaggcacattcgaattcatacaggccacaagccttttcagtgcaggatttgtatgaggaatttttcgaggagcgaccacctgacaacacacatcagaacccatacaggagaaaagccgtttgcgtgcgattactgcgggcgcaaattcgctcgatctgatgagcgtaagagacacactaaaattcatctccggcagaaggaacggaagtcaagcgctccttctgcttccgtgcccgctcccagcaccgcatcttgctcaggcggagtacagccaggcgggactctgtgttcatctaacagttccagtctgggtgggggcccactggccccctgcagtagcagaaccaggaccccatag

SEQ ID NO: 335289 - DNA, 1281 bp, Artificial Sequence
  derived and/or modified sequence
atgaatggagtggccggagatggcatgatcaacatcgacatgactggagagaagaggagcctggacctgccctaccccagcagctttgcccctgtgtctgcccccaggaaccagaccttcacctacatgggcaagttcagcattgacccccagtacccaggggccagctgctacccagagggcatcatcaacatcgtgtctgctggcatcctgcagggcgtgaccagccctgccagcaccacagccagcagctctgtgaccagcgccagccccaaccccctggccaccggccccctgggcgtgtgcaccatgagccagacccagcctgacctggaccacctgtacagccccccacctcctcctccaccctacagcggctgtgccggggacctgtaccaggaccccagcgccttcctgtctgctgccaccaccagcaccagcagcagcctggcctacccacctcctccttcctaccccagccccaagccagccacagatcctggcctcttccccatgatcccagactacccaggcttcttccccagccagtgccagagggacctgcatggaacagctggccctgacaggaagcccttcccctgccccctggacaccctgcgggtgcccccacccctgacccccctgagcaccatccggaacttcaccctgggcggccccagcgctggggtgactggacctggggccagcggcggcagcgagggcccccggctgcccggcagcagcagcgctgctgctgctgctgctgctgctgctgcctacaacccccaccacctgcccctgcggcccatcctgcggcccaggaagtaccccaaccggcccagcaagacccctgtgcatgagcggccctacccctgcccagctgagggctgtgaccggcgcttcagcagaagtgatgagctgaccaggcacatccgcatccacacaggccacaagcccttccagtgccgcatctgcatgaggaacttcagcagaagtgaccacctgaccacccacatccgcacccacactggagagaagccctttgcctgtgactactgcggcaggaagtttgcccggagtgatgagaggaagaggcacaccaagatccacctgcggcagaaggagaggaagagcagcgcccccagcgcctctgtgcctgcccccagcacagccagctgcagcggcggcgtgcagcccggcggcaccctgtgcagcagcaacagcagcagcctgggcggcggccccctggccccctgcagcagcaggaccaggaccccctag

SEQ ID NO: 335290 - DNA, 1281 bp, Artificial Sequence
  derived and/or modified sequence
atgaacggcgtggccggcgacggcatgatcaacatcgacatgaccggcgagaagcgttcccttgacctgccctacccatcttctttcgcaccagtcagtgcccccaggaaccagacttttacctacatgggcaaattctcaattgatcctcagtaccccggagcttcctgctaccccgagggaattataaatatagtgtcagcaggtatcctacagggggtcacctcccctgcctccaccacagcatcctcctctgttacctcggcatctccaaacccgttggccaccggacccctgggcgtttgtacaatgtcccagacccagcctgacttggatcacctctactcacctccgccacccccacccccatacagcggctgtgcgggggatctttatcaggatccaagtgccttcttgtccgccgcaactacctctacgtcaagctccctggcctacccacctcccccatcatatccttcccccaaacctgccactgaccctggactgttccctatgatacctgactatcctggcttctttccatcccagtgccagcgggacctgcatggcactgccggcccagatagaaaaccttttccttgtccccttgacacactgcgcgtgccacctcccctgactccactgagtactataagaaattttactcttggaggcccttcagctggtgtcactgggcctggtgcatccggcggaagtgaaggacctagacttcccggttccagctctgccgcagctgccgccgctgccgctgccgcatacaatccacatcacctgcctttacgacctatcctgcgccccagaaagtacccgaatcgccccagcaagactcccgtccatgagcgcccatatccatgtcctgccgaagggtgcgaccgcagattctctagatccgacgaattgaccagacatatccggatacacacaggacacaagccctttcagtgtcgcatttgtatgagaaatttttcacggagtgaccacttgaccacccatataaggacacacactggagagaagcccttcgcctgcgactattgcggcagaaagttcgcaagatctgacgagagaaaaagacacactaagatccacctcaggcagaaagagcggaaatcttccgccccctcagcgtctgtgcccgccccttctaccgcatcatgcagcgggggcgtccaaccaggcggcacgctgtgctccagcaattccagctcactgggtggtgggcctctggctccttgtagcagtaggacgaggacaccatag

SEQ ID NO: 335291 - DNA, 1281 bp, Artificial Sequence
  derived and/or modified sequence
atgaacggtgtcgctggagacgggatgatcaacattgacatgacaggggagaaaaggtcgctagacctgccttacccatctagcttcgcccctgtatccgcacccaggaaccagaccttcacttacatgggtaaattctctatagatccacagtatcctggcgcatcttgctatcccgagggaatcattaacatcgtctccgcaggaatcttgcagggcgtgacatcacctgcctccacaacagcttctagtagcgttacgtcagcaagcccaaaccccctggctactggccctctcggcgtctgcactatgagccagacccagcccgatctggatcacctgtacagcccccctccccctcccccaccgtacagcggatgcgccggagatttgtatcaggacccttctgcttttctatcagctgctaccacaagcacgtccagtagcttagcataccctcctcctcctagttacccgagcccgaagcccgctaccgatcccggactatttcctatgatacccgactaccctggtttttttccaagccagtgccaaagagaccttcacggaactgccggaccagataggaagccgtttccctgtcctcttgataccctacgtgtaccgcctccgctcaccccactgtctacgattcgcaactttacccttggaggacccagcgctggggtgactggccctggggcatccgggggttccgagggacctcgtttacctggatcttcatccgcggcagccgcagcggcagctgccgctgcctataaccctcatcacctcccgctgcgtccgatcctgcggcctaggaagtaccccaaccgcccatcaaagacccccgttcacgagaggccgtacccctgcccggcagagggctgtgaccgccgttttagcaggagtgacgagctcacaaggcacattcggatccacacaggtcacaagcctttccagtgtaggatttgtatgagaaacttctcgcggagcgaccacttaacaacccacatccggactcacaccggtgaaaaaccatttgcatgtgattactgcggaaggaaatttgctcgcagcgatgagaggaaacgccacacaaaaattcatcttcgtcagaaggagcggaaatcatctgcccctagtgctagcgtgcctgcaccctcaacagcttcttgtagcggaggtgttcagcccggaggaacactgtgcagcagcaattcctcgagcctgggtggagggcctttggcgccatgctcatctaggaccagaacaccttag

SEQ ID NO: 335292 - DNA, 1281 bp, Artificial Sequence
  derived and/or modified sequence
atgaacggcgtggccggcgacggcatgatcaacatcgacatgaccggcgagaagagaagcctggacctgccctaccccagcagcttcgcccccgtgagcgcccccagaaaccagaccttcacctacatgggcaagttcagcatcgacccccagtaccccggcgccagctgctaccccgagggcatcatcaacatcgtgagcgccggcatcctgcagggcgtgaccagccccgccagcaccaccgccagcagcagcgtgaccagcgccagccccaaccccctggccaccggccccctgggcgtgtgcaccatgagccagacccagcccgacctggaccacctgtacagcccccccccccccccccccccctacagcggctgcgccggcgacctgtaccaggaccccagcgccttcctgagcgccgccaccaccagcaccagcagcagcctggcctacccccccccccccagctaccccagccccaagcccgccaccgaccccggcctgttccccatgatccccgactaccccggcttcttccccagccagtgccagagagacctgcacggcaccgccggccccgacagaaagcccttcccctgccccctggacaccctgagagtgcccccccccctgacccccctgagcaccatcagaaacttcaccctgggcggccccagcgccggcgtgaccggccccggcgccagcggcggcagcgagggccccagactgcccggcagcagcagcgccgccgccgccgccgccgccgccgccgcctacaacccccaccacctgcccctgagacccatcctgagacccagaaagtaccccaacagacccagcaagacccccgtgcacgagagaccctacccctgccccgccgagggctgcgacagaagattcagcagaagcgacgagctgaccagacacatcagaatccacaccggccacaagcccttccagtgcagaatctgcatgagaaacttcagcagaagcgaccacctgaccacccacatcagaacccacaccggcgagaagcccttcgcctgcgactactgcggcagaaagttcgccagaagcgacgagagaaagagacacaccaagatccacctgagacagaaggagagaaagagcagcgcccccagcgccagcgtgcccgcccccagcaccgccagctgcagcggcggcgtgcagcccggcggcaccctgtgcagcagcaacagcagcagcctgggcggcggccccctggccccctgcagcagcagaaccagaaccccctag

SEQ ID NO: 335293 - protein, 879 aa, Artificial Sequence
  derived and/or modified sequence
MNPITQSQFVPLGEVLCCAISDMNTAQIVVTQESLLERLMKHYPGIAIPSEDILYTTLGTLIKERKIYHTGEGYFIVTPQTYFITNTTTQENKRMLPSDESRLMPASMTYLVSMESCAESAQENAAPISHCQSCQCFRDMHTQDVQEAPVAAEVTRKSHRGLGESVSWVQNGAVSVSAEHHICESTKPLPYTRDKEKGKKFGFSLLWRSLSRKEKPKTEHSSFSAQFPPEEWPVRDEDDLDNIPRDVEHEIIKRINPILTVDNLIKHTVLMQKYEEQKKYNSQGTSTDMLTIGHKYPSKEGVKKRQGLSAKPQGQGHSRRDRHKARNQGSEFQPGSIRLEKHPKLPATQPIPRIKSPNEMVGQKPLGEITTVLGSHLIYKKRISNPFQGLSHRGSTISKGHKIQKTSDLKPSQTGPKEKPFQKPRSLDSSRIFDGKAKEPYAEQPNDKMEAESIYINDPTVKPINDDFRGHLFSHPQQSMLQNDGKCCPFMESMLRYEVYGGENEVIPEVLRKSHSHFDKLGETKQTPHSLPSRGASFSDRTPSACRLVDNTIHQFQNLGLLDYPVGVNPLRQAARQDKDSEELLRKGFVQDAETTSLENEQLSNDDQALYQNEVEDDDGACSSLYLEEDDISENDDLRQMLPGHSQYSFTGGSQGNHLGKQKVIERSLTEYNSTMERVESQVLKRNECYKPTGLHATPGESQEPNLSAESCGLNSGAQFGFNYEEEPSVAKCVQASAPADERIFDYYSARKASFEAEVIQDTIGDTGKKPASWSQSPQNQEMRKHFPQKFQLFNTSHMPVLAQDVQYEHSHLEGTENHSMAGDSGIDSPRTQSLGSNNSVILDGLKRRQNFLQNVEGTKSSQPLTSNSLLPLTPVINV

SEQ ID NO: 335294 - protein, 308 aa, Artificial Sequence
  derived and/or modified sequence
MCLLLSSAVFGVKYNLLAHTTLTLESAEDSFKTHNLSINGNEESSFWLPLYGNMCCRLVAQPACMAEDAFAGFLNQQQMVEGLISWRRLYCVLRGGKLYCFYSPEEIEAKVEPALVVPINKSLVLFEDSLEGIQLAISQSFKETRIRAMDKDAKKRIHNFSVINPVPGQAITQIFAVDNREDLQKWMEAFWQHFFDLSQWKHCCEELMKIEIMSPRKPPLFLTKEATSVYHDMSIDSPMKLESLTDIIQKKIEETNGQFLIGQHEESLPPPWATLFDGNHQMVIQKKNNSNQLHNLQKLPATSKFLFT

SEQ ID NO: 335295 - protein, 527 aa, Artificial Sequence
  derived and/or modified sequence
MEGPSLRGPALRLAGLPTQQDCNIQEKIDLEIRMREGIWKLLSLSTQKDQVLHAVKNLMVCNARLMAYTSELQKLEEQIANQTGRCDVKFESKERTACKGKIAISDIRIPLMWKDSDHFSNKERSRRYAIFCLFKMGANVFDTDVVNVDKTITDICFENVTIFNEAGPDFQIKVEVYSCCTEESSITNTPKKLAKKLKTSISKATGKKISSVLQEEDDEMCLLLSSAVFGVKYNLLAHTTLTLESAEDSFKTHNLSINGNEESSFWLPLYGNMCCRLVAQPACMAEDAFAGFLNQQQMVEGLISWRRLYCVLRGGKLYCFYSPEEIEAKVEPALVVPINKSLVLFEDSLEGIQLAISQSFKETRIRAMDKDAKKRIHNFSVINPVPGQAITQIFAVDNREDLQKWMEAFWQHFFDLSQWKHCCEELMKIEIMSPRKPPLFLTKEATSVYHDMSIDSPMKLESLTDIIQKKIEETNGQFLIGQHEESLPPPWATLFDGNHQMVIQKKNNSNQLHNLQKLPATSKFLFT

SEQ ID NO: 335296 - DNA, 927 bp, Artificial Sequence
  derived and/or modified sequence
atgtgcctgctgctgagcagcgccgtgttcggcgtgaagtacaacctgctggcccacaccaccctgaccctggagagcgccgaggacagcttcaagacccacaacctgagcatcaacggcaacgaggagagcagcttctggctgcccctgtacggcaacatgtgctgcagactggtggcccagcccgcctgcatggccgaggacgccttcgccggcttcctgaaccagcagcagatggtggagggcctgatcagctggagaagactgtactgcgtgctgagaggcggcaagctgtactgcttctacagccccgaggagatcgaggccaaggtggagcccgccctggtggtgcccatcaacaagagcctggtgctgttcgaggacagcctggagggcatccagctggccatcagccagagcttcaaggagaccagaatcagagccatggacaaggacgccaagaagagaatccacaacttcagcgtgatcaaccccgtgcccggccaggccatcacccagatcttcgccgtggacaacagagaggacctgcagaagtggatggaggccttctggcagcacttcttcgacctgagccagtggaagcactgctgcgaggagctgatgaagatcgagatcatgagccccagaaagccccccctgttcctgaccaaggaggccaccagcgtgtaccacgacatgagcatcgacagccccatgaagctggagagcctgaccgacatcatccagaagaagatcgaggagaccaacggccagttcctgatcggccagcacgaggagagcctgccccccccctgggccaccctgttcgacggcaaccaccagatggtgatccagaagaagaacaacagcaaccagctgcacaacctgcagaagctgcccgccaccagcaagttcctgttcacctag

SEQ ID NO: 335297 - DNA, 1584 bp, Artificial Sequence
  derived and/or modified sequence
atggagggccccagcctgagaggccccgccctgagactggccggcctgcccacccagcaggactgcaacatccaggagaagatcgacctggagatcagaatgagagagggcatctggaagctgctgagcctgagcacccagaaggaccaggtgctgcacgccgtgaagaacctgatggtgtgcaacgccagactgatggcctacaccagcgagctgcagaagctggaggagcagatcgccaaccagaccggcagatgcgacgtgaagttcgagagcaaggagagaaccgcctgcaagggcaagatcgccatcagcgacatcagaatccccctgatgtggaaggacagcgaccacttcagcaacaaggagagaagcagaagatacgccatcttctgcctgttcaagatgggcgccaacgtgttcgacaccgacgtggtgaacgtggacaagaccatcaccgacatctgcttcgagaacgtgaccatcttcaacgaggccggccccgacttccagatcaaggtggaggtgtacagctgctgcaccgaggagagcagcatcaccaacacccccaagaagctggccaagaagctgaagaccagcatcagcaaggccaccggcaagaagatcagcagcgtgctgcaggaggaggacgacgagatgtgcctgctgctgagcagcgccgtgttcggcgtgaagtacaacctgctggcccacaccaccctgaccctggagagcgccgaggacagcttcaagacccacaacctgagcatcaacggcaacgaggagagcagcttctggctgcccctgtacggcaacatgtgctgcagactggtggcccagcccgcctgcatggccgaggacgccttcgccggcttcctgaaccagcagcagatggtggagggcctgatcagctggagaagactgtactgcgtgctgagaggcggcaagctgtactgcttctacagccccgaggagatcgaggccaaggtggagcccgccctggtggtgcccatcaacaagagcctggtgctgttcgaggacagcctggagggcatccagctggccatcagccagagcttcaaggagaccagaatcagagccatggacaaggacgccaagaagagaatccacaacttcagcgtgatcaaccccgtgcccggccaggccatcacccagatcttcgccgtggacaacagagaggacctgcagaagtggatggaggccttctggcagcacttcttcgacctgagccagtggaagcactgctgcgaggagctgatgaagatcgagatcatgagccccagaaagccccccctgttcctgaccaaggaggccaccagcgtgtaccacgacatgagcatcgacagccccatgaagctggagagcctgaccgacatcatccagaagaagatcgaggagaccaacggccagttcctgatcggccagcacgaggagagcctgccccccccctgggccaccctgttcgacggcaaccaccagatggtgatccagaagaagaacaacagcaaccagctgcacaacctgcagaagctgcccgccaccagcaagttcctgttcacctag

SEQ ID NO: 335298 - DNA, 927 bp, Artificial Sequence
  derived and/or modified sequence
atgtgcctgctcttgagttccgctgtgtttggcgtcaagtataatttactggctcatacaaccctgactctggaaagcgccgaagactcattcaagacacacaatctgtctattaatgggaatgaggaatcatctttttggcttccattatacggcaatatgtgttgtagactggtggcccagcccgcctgcatggctgaggacgcatttgctggtttcttgaaccagcagcagatggtagaaggactgattagttggaggagattgtactgcgtgctgcgcggggggaagctatactgtttttactccccagaggagatcgaagccaaggttgagcccgctctggtggttcctatcaacaaaagcctcgtccttttcgaagattcactggagggaatccagttagccatatcccagagcttcaaagaaactcgcatccgcgctatggacaaggacgctaagaagcggatccacaatttctcagttattaaccctgtaccaggccaagcaattacacaaatcttcgccgtcgacaatcgtgaagatcttcagaagtggatggaggctttctggcagcactttttcgacctgtctcagtggaaacactgctgcgaggagttgatgaagatcgagataatgtctcctagaaaaccaccgctgttccttacaaaggaagctacgtcggtgtaccatgatatgtccatagattctcctatgaaactggagtctcttacagatataattcagaaaaaaatagaagaaactaatggacaattcctgatcggccagcacgaggaaagccttccacctccttgggccaccctctttgacggaaaccaccagatggtgatacagaagaagaataattccaatcagctgcacaacctccaaaaactcccagctacttctaaatttctattcacttag

SEQ ID NO: 335299 - DNA, 1584 bp, Artificial Sequence
  derived and/or modified sequence
atggaaggcccgtccctgagggggcccgcattaaggctagctgggctgcctacccagcaagattgcaatatccaggaaaaaatcgacctggagatacggatgcgcgaaggaatttggaaactgttgagtttgagcacacagaaagaccaggtcttacacgctgtgaagaacctgatggtatgtaacgcaagactgatggcatacactagcgaactgcagaagttggaggagcaaattgccaatcagacgggaaggtgtgacgtaaagttcgagtccaaggaaagaacagcctgtaaaggaaagattgcgattagtgacatcaggataccactcatgtggaaagattctgatcacttctctaacaaggagcgctcacgacgttacgctatcttttgtttgttcaagatgggtgccaacgtgttcgatacggatgtggtcaacgtagataaaactataacggatatatgcttcgaaaacgttacgatattcaacgaagctggccccgactttcaaattaaggtggaggtgtattcctgctgcacagaggaatcatctataactaatacacctaagaagcttgctaaaaagctgaagacctctatttcaaaagcaaccgggaaaaagatcagcagcgtgctgcaggaggaagacgacgagatgtgtttgctcctgtcatcagccgtgttcggagttaagtataacctcctggcccacactactctgacacttgaaagtgccgaagatagcttcaaaactcataacttatctattaatggcaacgaggaaagttcgttttggctgccgctttacgggaacatgtgctgcagactggtcgcccaacctgcctgcatggccgaagatgctttcgctggcttcctgaaccagcagcagatggttgagggcttaatatcgtggagacgcctgtactgtgtgctgcgagggggaaaactgtactgcttctactcgcccgaagagatcgaggcaaaggtcgagccagccctggtggttccaattaacaaaagtctggtacttttcgaagactccctggaaggcattcagctggcgattagccagagctttaaggaaaccaggatccgggcaatggacaaggacgccaagaaacggatccacaatttctccgtcattaaccctgtgccaggtcaggccatcacacagatttttgccgtggataatagagaagatctacagaagtggatggaggcattctggcagcactttttcgacctgtcccagtggaaacactgttgtgaggagctgatgaaaatagaaattatgagcccgaggaaacctccgctatttttgactaaggaggcaacctcagtataccatgacatgtccatagacagcccaatgaaactggagtctctgacggatattatccagaaaaagatagaagaaaccaacggacaattcttgatcggccagcacgaggaaagtttgccccctccttgggccacactgtttgacggtaaccaccagatggttatacaaaaaaaaaacaatagtaatcaactacacaatctgcagaagctgcctgccacgagcaagtttctgtttacatag

SEQ ID NO: 335300 - DNA, 927 bp, Artificial Sequence
  derived and/or modified sequence
atgtgcctgctgctgagcagcgctgtgtttggagtgaagtacaacctgctggcccacaccaccctgaccctggagagcgctgaggacagcttcaagacccacaacctgagcatcaatggaaatgaggagagcagcttctggctgcccctgtatggcaacatgtgctgccgcctggtggcccagcctgcctgcatggctgaagatgcctttgctggcttcctgaaccagcagcagatggtggagggcctcatctcctggaggcggctgtactgtgtgctgcggggcggcaagctgtactgcttctacagccctgaggagattgaggccaaggtggagcccgccctggtggtgcccatcaacaagagcctggtgctgtttgaggacagcctggagggcatccagctggccatcagccagagcttcaaggagacccgcatccgggccatggacaaggatgccaagaagaggatccacaacttcagcgtcatcaaccctgtgcccggccaggccatcacccagatctttgctgtggacaaccgggaggacctgcagaagtggatggaggccttctggcagcacttctttgacctgagccagtggaagcactgctgtgaggagctgatgaagattgagatcatgagccccaggaagccacccctcttcctgaccaaggaggccacctctgtgtaccatgacatgagcattgacagccccatgaagctggagagcctgacagacatcatccagaagaagattgaggagaccaacggccagttcctgattggccagcacgaggagagcctgcccccaccctgggccaccctgtttgatggcaaccaccagatggtgatccagaagaagaacaacagcaaccagctgcacaacctgcagaagctgcctgccaccagcaagttcctgttcacctag

SEQ ID NO: 335301 - DNA, 1584 bp, Artificial Sequence
  derived and/or modified sequence
atggagggccccagcctgcggggccctgccctgcggctggccggcctgcccacccagcaggactgcaacatccaggagaagattgacctggagatccgcatgagggagggcatctggaagctgctgagcctgagcacccagaaggaccaggtgctgcatgctgtgaagaacctgatggtgtgcaatgcccggctgatggcctacaccagcgagctgcagaagctggaggagcagatcgccaaccagacaggccgctgtgatgtgaagtttgagagcaaggagaggacagcctgcaagggcaagatcgccatcagtgacatccgcatccccctgatgtggaaggacagcgaccacttcagcaacaaggagaggagccgccgctatgccatcttctgcctcttcaagatgggcgccaacgtgtttgacacagatgtggtgaatgtggacaagaccatcacagacatctgctttgaaaatgtgaccatcttcaatgaggccggccctgacttccagatcaaggtggaggtgtacagctgctgcacagaggagagcagcatcaccaacacccccaagaagctggccaagaagctgaagaccagcatcagcaaggccaccgggaagaagatcagctctgtgctgcaggaggaggatgatgagatgtgcctgctgctgagcagcgctgtgtttggagtgaagtacaacctgctggcccacaccaccctgaccctggagagcgcagaagattccttcaagacccacaacctgagcatcaatggaaatgaggagagcagcttctggctgcccctgtatggcaacatgtgctgccgcctggtggcccagcctgcctgcatggccgaggatgcctttgctggcttcctgaaccagcagcagatggtggagggcctcatctcctggaggcggctgtactgtgtgctgcggggcggcaagctgtactgcttctacagccctgaggagattgaggccaaggtggagcccgccctggtggtgcccatcaacaagagcctggtgctgtttgaggacagcctggagggcatccagctggccatcagccagagcttcaaggagacccgcatccgggccatggacaaggatgccaagaagaggatccacaacttcagcgtcatcaaccctgtgcccggccaggccatcacccagatctttgctgtggacaaccgggaggacctgcagaagtggatggaggccttctggcagcacttctttgacctgagccagtggaagcactgctgtgaggagctgatgaagattgagatcatgagccccaggaagcccccactcttcctgaccaaggaggccacctctgtgtaccatgacatgagcattgacagccccatgaagctggagagcctgacagacatcatccagaagaagattgaggagaccaacggccagttcctgattggccagcacgaggagagcctgcccccaccctgggccaccctgtttgatggcaaccaccagatggtgatccagaagaagaacaacagcaaccagctgcacaacctgcagaagctgcctgccaccagcaagttcctgttcacctag

SEQ ID NO: 335302 - DNA, 927 bp, Artificial Sequence
  derived and/or modified sequence
atgtgcctgctgctgagcagcgccgtgttcggcgtgaagtacaaccttctggcgcacactactcttactctggaaagcgctgaggactcgtttaaaacacataatttgagcatcaacgggaatgaagagtcctcattctggctacccctctatggcaatatgtgctgtcgtttggtggctcagcccgcctgtatggccgaagatgctttcgcaggatttcttaaccagcagcagatggtcgaagggctgattagttggaggcgcctgtactgcgtgttgagagggggcaaactgtactgtttttattcacctgaggaaattgaggctaaggtggagcccgcgcttgtcgtaccaattaacaaaagcttagtgctgttcgaggacagcctggagggaatacagctggcaatctcccagagctttaaggaaactagaatccgcgccatggacaaggacgccaaaaagcggattcataacttctccgtgataaatcctgtgcctggccaggctatcacacagatctttgccgtggataacagagaagatctgcagaagtggatggaggcattttggcaacacttcttcgacctttcccagtggaagcattgttgcgaggagctaatgaaaattgaaataatgtcccccaggaagccaccactctttctgacaaaagaagctacaagtgtataccacgatatgagtattgacagtcccatgaagttagagagcctgacagacatcatacagaagaagatcgaagagacaaatgggcagttccttatcggccaacacgaagagtccttgcctccgccctgggcgaccctcttcgatggtaaccatcagatggttattcagaagaagaataactccaaccagctacacaatctgcagaaattgcctgctactagcaagtttttgtttacatag

SEQ ID NO: 335303 - DNA, 1584 bp, Artificial Sequence
  derived and/or modified sequence
atggagggccccagcctgcggggccccgccctgcggctggccggcctgcctactcagcaggattgtaatatacaagagaaaattgacctagagatacgtatgcgggaaggcatttggaaattgctgtcccttagcactcagaaagaccaggtgttacacgcagttaagaacctgatggtttgtaatgctcgtctcatggcctacacctctgagctgcaaaaactggaggagcagattgctaatcagacaggacggtgcgatgtgaaattcgagtccaaagagcgaaccgcatgtaaggggaaaatcgcaatttccgacattagaatacctcttatgtggaaagattctgaccatttcagcaacaaggagcgctctcggcgctatgcaatattctgcctctttaagatgggggctaatgtgtttgacacagatgtagtgaacgtggacaagacgatcaccgacatctgcttcgagaatgtgactattttcaatgaggccggacccgacttccaaatcaaagtcgaagtttattcatgctgcaccgaggagagctccataacaaacacccccaagaagctcgctaagaagttaaagactagcattagcaaagctaccggtaagaagattagctccgttctgcaggaagaggacgacgaaatgtgtttactgctgtcctctgcagtgtttggcgtaaagtacaacctacttgcccacacgactctgacactggaatcagcagaggactccttcaagacacacaatttatctataaatggaaatgaagaaagctctttttggctccctttgtatggaaacatgtgttgccggttggtcgctcagccagcctgtatggctgaagacgccttcgcggggttcttgaaccagcagcagatggttgagggccttatatcgtggcgaagattatactgtgtgctacgaggcggcaagctgtattgcttttacagccctgaggagatcgaggccaaagtcgaaccagcactcgtcgtccctatcaataaatcactcgttctgttcgaggactctttggaaggcatacagttagcaatctcgcagagcttcaaggaaactcgaatcagggcaatggacaaagatgccaagaagcggatccataactttagcgtgattaaccctgtgccaggacaggccattacccagatcttcgctgtagataaccgagaagatttgcaaaaatggatggaggcattctggcagcactttttcgacctcagtcagtggaaacactgctgtgaagagctgatgaagatagagatcatgtccccaaggaagcctccattgtttctcaccaaggaggcaacttcagtataccacgatatgagcatcgattcacccatgaaattggaaagtcttactgatattatccagaaaaagattgaggagaccaatgggcagttcctgatcggtcagcacgaggaatccctgccacccccgtgggcaaccctgtttgatggaaatcatcagatggtgatacaaaagaagaacaactcaaatcagcttcacaatctgcagaaactccctgcaactagtaagtttctcttcacatag

SEQ ID NO: 335304 - DNA, 927 bp, Artificial Sequence
  derived and/or modified sequence
atgtgtctgctgctgtcttctgcggttttcggtgtcaagtacaacttgctggctcacacaactctcactctcgaaagcgcagaggacagcttcaaaacacacaacttgagcatcaatggcaatgaggagagttctttttggttacctttgtatggaaacatgtgttgtcggctggtggctcagccagcatgcatggcggaggatgcatttgccggatttttgaatcaacagcagatggtcgaagggctcatttcttggcgaaggctctattgcgtgctccgtggcggaaagctgtattgcttttatagccccgaggagatcgaagcaaaggttgagccagccctcgtggtacctattaataagtctttagtgctgttcgaggacagccttgaggggattcagttagcaatcagccagagcttcaaggagaccaggatccgggctatggacaaagatgctaagaaaaggattcacaacttttctgtgattaaccccgtcccaggacaggccatcacacagatatttgctgtcgataacagagaggaccttcaaaagtggatggaggctttctggcagcacttcttcgatctgtcgcaatggaaacactgctgcgaagagctaatgaagatcgaaatcatgtcccctagaaaaccgcctctgttcctcaccaaagaagctacttccgtctaccacgatatgtcaatagactcaccaatgaaattggagagccttaccgatattatacaaaaaaagatcgaggaaaccaatggccaatttttaattggtcagcacgaggagtctcttccacccccatgggccactctgttcgacgggaaccaccagatggtcatccagaagaagaacaactctaaccaactccataatctccaaaagcttcctgccacctctaaattcttgttcacttag

SEQ ID NO: 335305 - DNA, 1584 bp, Artificial Sequence
  derived and/or modified sequence
atggaaggtccatccctgcgaggtccagcactccgtctcgccggactccctacgcaacaggactgtaatatacaggaaaaaattgatctggaaattcgtatgcgggagggcatctggaagctacttagtctgagtactcaaaaggatcaggtgttacacgccgtgaagaacctgatggtttgtaacgcccgacttatggcctatacgagcgagctacagaagctggaagaacaaatagcaaatcagacgggcagatgcgacgtgaagttcgaaagtaaggaacgcacagcttgcaagggcaaaatagcaattagcgatatcaggataccactcatgtggaaggattcggaccatttctctaacaaagagaggtcccgcaggtacgccatcttctgtctgttcaagatgggcgcaaatgtgttcgacacagacgtagtgaatgtcgacaagacaatcaccgatatctgctttgaaaacgtgactatatttaatgaggctgggcctgactttcagattaaggtcgaagtgtactcctgttgcacagaagaaagcagtattactaacactccgaaaaaacttgccaagaaactgaagaccagtatttctaaggccacgggaaaaaaaatctccagcgtgctccaggaggaagacgatgagatgtgtttacttctctcgtcagcagttttcggagtgaaatacaatctcctggctcatacgaccctgactttagagtccgctgaagattcctttaagacccataatctaagcataaacggaaatgaggaaagttcattctggctcccactctacggaaatatgtgctgcaggttggtcgcccagcccgcttgcatggctgaggatgccttcgccggttttttaaaccagcaacagatggtcgaggggctgatatcctggcgccgactgtactgtgtactgcggggaggtaagctctattgcttttattcccctgaggaaatagaggccaaggtcgagccggctctggtggttcccatcaacaagtccctggtgctgtttgaagatagcttagagggaattcagctggccatcagccagtcgttcaaggagacacgaattcgggctatggataaggatgccaaaaagagaattcataatttctcggtaatcaatccagtgcctggtcaagcaatcactcagatctttgcggtcgataatagggaagaccttcagaagtggatggaggcattctggcaacatttcttcgacctgtctcaatggaagcactgttgtgaagaattgatgaaaattgaaattatgtcccctagaaagccaccgctcttcctaactaaagaggctacaagtgtctaccacgacatgagcatcgattcacccatgaaactggagtctctgaccgatatcatccaaaaaaagatcgaagagactaacggccagttcctgatcgggcagcacgaagagtccttacctcctccttgggctacgctgttcgatgggaaccatcagatggtcatccagaagaagaacaacagtaaccagttacataacctgcagaagttacctgctacaagcaaattcctgttcacttag

SEQ ID NO: 335306 - DNA, 2383 bp, Artificial Sequence
  derived and/or modified sequence
taatgaagcagggccagactttcagataaaggtggaagtgtatagttgctgtacagaagaatcttctataaccaacacaccaaaaaagctagctaagaaactcaagacatctataagtaaagctacaggaaagaaaataagttcagtgcttcaagaagaggatgatgaaatgtgcttgctcctcagctctgctgtttttggtgtaaagtataatttgctagctcacactaccctaaccttggaaagtgctgaggatagtttcaagacccataatctgtctattaatggaaatgaggagtcttcattttggcttcccctgtatggcaacatgtgctgccgactagttgcccagccagcttgtatggctgaggatgcatttgcaggatttcttaatcagcagcaaatggtagaaggtctgattagttggagaaggttgtattgtgttttgcgaggaggtaaactctattgtttttacagtccagaggaaattgaagctaaagtggaaccagctttggtagtacccattaacaagtcattagttttatttgaagacagtctcgaaggaattcaactcgccatatctcagtcctttaaggaaaccagaatccgggcaatggataaggatgccaagaaaagaatccataatttctctgtcatcaatcctgttcctggacaagctataactcagatttttgcagttgacaatagagaagatcttcagaagtggatggaagccttctggcagcatttctttgatcttagccaatggaagcactgttgtgaagaacttatgaaaattgagattatgtcaccacggaaaccacctttgttcttgacaaaagaggcaacctcagtctaccatgatatgagcattgattcacctatgaaacttgaaagtttaacggatataatacaaaaaaaaattgaagagacaaatgggcagttccttattggtcagcatgaagaatccttaccacctccttgggccacactctttgatggtaaccatcaaatggtcatccagaaaaagaataatagtaatcaactacataatctccagaaactgccagcaacttccaaattcctcttcacatagcttctcaaatacttcattagaaccagtgtgaaaaatttaaaatacaatgtgacatttctctagtagaatgtaagcttcatgagggaaaagacaacgcgtctccttcctgtattcctagcacccagtacggcacctgacacataatagtgaccttagaagaatatttaagagtcattgagtaaacattttgtagagctgtccatgtttattttccattcagtgtttaccaggtgtctgctatttggacagtcacttcattgttcattagtacatgactttggtaaatatatctcctgtgaagagaaatattataactactatggcattcaacactggtatttcagttactcaactaatccacccactgatggagtgaaccttgaattaaatgctttgaagaataaagtgaatcttgataaaaatcaaaggctgaagaaatcttgtttgacagaaggcatgaacaaaaatgctaaaattaatactgtttgtggagaaacactcattccaccgcagactaaatggagttcatgagtatcaaaatgcctatgtgatcaaaaggcagaaacagcttctttttactaggtctgttaatattccaggactcataatattgtgcctacatgagcacctgtgtttgtggtaactcaaagtatttgaacaccttatctcatccaacctcaaatttcctgtgaggtatttaagcaccgagagctcttggtactgttttcaagatgaagcagatgaattagagaggctgttcacacaccaaatttcacagaagcctatggaggaaatgacggggagacttaccagttaacacccagttgcagaaatcaatgtcagagcttgaaaggaccttataaacccctgatccaatgtggactttcctagtaagacttctgtttgcagtgacttggttcatttcaccaaccacaagaattttaagtaatttttaatcataaaagtaacatagaacatagtaatacatatatacgtacatacatgatacagaaaggtatcaaaaaacaaaaacatatattacttcctcctctaacattccagtgccagtttccaaagattcctattacccagaggtaaccactgttaataatttttaatgtatatttccaaaaattttttatgcatttagaaatgtgtgcatgtgggtgatgggtgcaccaaaatctcagaaatcaccactaaagaacttactcatgtaaccaaacaccatgtggtcccccaaaaacctattgaaataaataaataataacataataaagacttaat

SEQ ID NO: 335307 - DNA, 1681 bp, Artificial Sequence
  derived and/or modified sequence
ccgggcggttggcgtcctctgcggctcctgccaggggcgggcttttcaaatcttccctttgaaggagtggcgacggcccggacagttcgcgttggagatggaggggccgagcctgaggggtcctgcgctccgcctggcggggcttcccacccagcaggactgcaacattcaagaaaaaatagacttagaaattcgaatgcgagaaggaatatggaaactcctttctctgagcactcagaaagatcaagttttacatgcagttaagaatctcatggtgtgcaatgctcgactaatggcctatacatcggagctacagaaattagaagaacagattgcaaatcagactggaagatgtgatgtgaaatttgaaagtaaagaacgaacagcatgtaaaggaaagattgccatatcagatattcgaataccactaatgtggaaagactctgatcacttcagcaataaagaacgatcacgacgctatgccattttttgtttattcaaaatgggagctaatgtgtttgatactgatgtggtgaatgtggataaaacaatcacagatatatgttttgaaaatgtaaccatatttaatgaagcagggccagactttcagataaaggtggaagtgtatagttgctgtacagaagaatcttctataaccaacacaccaaaaaagctagctaagaaactcaagacatctataagtaaagctacaggaaagaaaataagttcagtgcttcaagaagaggatgatgaaatgtgcttgctcctcagctctgctgtttttggtgtaaagtataatttgctagctcacactaccctaaccttggaaagtgctgaggatagtttcaagacccataatctgtctattaatggaaatgaggagtcttcattttggcttcccctgtatggcaacatgtgctgccgactagttgcccagccagcttgtatggctgaggatgcatttgcaggatttcttaatcagcagcaaatggtagaaggtctgattagttggagaaggttgtattgtgttttgcgaggaggtaaactctattgtttttacagtccagaggaaattgaagctaaagtggaaccagctttggtagtacccattaacaagtcattagttttatttgaagacagtctcgaaggaattcaactcgccatatctcagtcctttaaggaaaccagaatccgggcaatggataaggatgccaagaaaagaatccataatttctctgtcatcaatcctgttcctggacaagctataactcagatttttgcagttgacaatagagaagatcttcagaagtggatggaagccttctggcagcatttctttgatcttagccaatggaagcactgttgtgaagaacttatgaaaattgagattatgtcaccacggaaaccacctttgttcttgacaaaagaggcaacctcagtctaccatgatatgagcattgattcacctatgaaacttgaaagtttaacggatataatacaaaaaaaaattgaagagacaaatgggcagttccttattggtcagcatgaagaatccttaccacctccttgggccacactctttgatggtaaccatcaaatggtcatccagaaaaagaataatagtaatcaactacataatctccagaaactgccagcaacttccaaattcctcttcacatag

SEQ ID NO: 335308 - protein, 316 aa, Artificial Sequence
  derived and/or modified sequence
SPKAELKLEKKSGRKPRSPRDSGPQKELVIPGIVDFERIRRALRTPKPQTPGTYCFGRLSHHSFFSRHHPHPQHVTHIQDLTGKPVCVVRDFPAPLPESTVFSGCQMGIPTISVPIGDPQSNRNPQLSSAWKKELKELASRVAFLTKEDELKKKEDTTSLNWNCKSRRPQAPGLSGTDLGAAELGIKKEQKEEPLREQGAKYSAETGRLIPASTRAVGRRRSHQGQQSQSSSRHEGVQAFLLQDQELLGGLTSPGAPVSDPGNRLAKRNPVLAALRSAQGKRPRSGTPADSSGSAPSPAPSLHPYRKAPKPASRSA

SEQ ID NO: 335309 - DNA, 973 bp, Artificial Sequence
  derived and/or modified sequence
agtccaaaggctgagctgaaactggagaagaagtcagggcgcaagccaaggagccccagggacagtgggccacagaaagaactggtgatcccagggattgtggatttcgagcggatccgccgggcattgaggaccccaaagccccaaacccctggcacctactgctttggacgcctcagtcaccactccttcttctcccggcaccacccacacccccagcacgtgacccacatccaagatctcaccgggaagcctgtctgtgtcgtcagggattttccagcccccttgcctgagtcaactgtcttttccggctgtcaaatggggatacccaccatctctgtccccattggagacccacagtctaatcggaacccccagctttcttctgcctggaagaaggagttgaaggagctagcttcccgggtggccttcctcaccaaggaggatgaactgaagaagaaagaggatactaccagtcttaattggaattgcaagagcaggaggccccaggcaccaggcctctctgggacagacctgggggcagctgagctgggaattaagaaggagcagaaggaggagcctctgcgggagcagggggcaaagtactcagcagagactgggaggctcatccccgcttccacccgggctgtcggccgccgcagatctcaccagggccagcagagtcagtcttccagcagacatgaaggagtccaggctttcctccttcaggatcaggagctgctgggcggcctcacctcacctggagctcctgtgtcggatcctggaaacagacttgctaagcgcaatccagttctggctgctctacgctccgcccaaggaaaaagacctcgctctgggactcctgcagacagcagtggctcagctccttccccagcccctagtctccatccctacagaaaagctcctaagccagcttccagaagtgcatgaacctcctcaagagaagcaagag

SEQ ID NO: 335310 - DNA, 951 bp, Artificial Sequence
  derived and/or modified sequence
tcacctaaggccgagcttaaattggagaagaaatccggacgcaaacccagatcgcctcgggactcaggtccacaaaaagaactggtgatcccaggtatagtcgattttgagagaatccgcagggctctaaggaccccgaagcctcagactcccggcacctactgcttcggaaggctgagtcaccatagtttcttcagcaggcatcaccctcacccgcagcacgtgacacacattcaggacctgacaggaaagccagtttgcgttgtacgagacttcccagcaccgcttcccgaaagcactgtgttttcaggttgccagatgggaatccctacaatatctgtgccgatcggcgatcctcagtcaaacaggaatcctcaactgtcttctgcctggaagaaggaactgaaagaactcgctagtagagtggccttcctaactaaggaggacgagctgaagaaaaaggaagacactaccagcctcaattggaactgtaagtcgcgtaggccacaggcgccaggcctgtccggtactgaccttggcgcagctgaattgggcatcaagaaggaacagaaggaggagcctcttagagaacaaggtgccaagtattctgcggagacaggacgacttattcctgcttctacgcgggccgtgggacgacgacggagccatcagggtcagcaaagccagagttcctcacgccacgagggagtacaggcctttttgctccaagatcaggagcttctcggcggcctgacatcccctggggctccagtctccgacccaggaaatcgcctggctaaaaggaacccagtccttgctgccttgaggagcgcccaggggaaacgacctaggtctggaactccagcagactcttctgggagcgcacccagccctgcccctagcttacacccatatcgaaaagcccctaagcccgccagtcgatcagcctag

SEQ ID NO: 335311 - DNA, 951 bp, Artificial Sequence
  derived and/or modified sequence
agccccaaggccgagctgaagctggagaagaagagcggcaggaagcccaggagcccccgggacagcggcccccagaaggagctggtgattcctggcatcgtggactttgagcgcatccggcgggccctgcggacccccaagccccagaccccaggcacctactgcttcggccgcctgagccaccacagcttcttcagccgccaccacccccacccccagcacgtgacccacatccaggacctgaccgggaagcctgtgtgtgtggtgcgggacttccctgcccccctgcctgagagcaccgtcttcagcggctgccagatgggcatccccaccatctctgtgcccatcggggacccccagagcaacagaaacccccagctgagcagcgcctggaagaaggagctgaaggagctggccagccgggtggccttcctgaccaaggaggatgagctgaagaagaaggaggacaccaccagcctgaactggaactgcaagagcagaagaccccaggcccctggcctgtctggaacagacctgggcgctgctgagctgggcatcaagaaggagcagaaggaggagcccctgcgggagcagggcgccaagtacagcgctgagaccggccgcctcatcccagccagcaccagggctgtgggcagaagaagaagccaccagggccagcagagccagagcagcagcagacatgagggcgtgcaggccttcctgctgcaggaccaggagctgctgggcggcctgaccagccctggggcccctgtgtctgaccccggcaaccggctggccaagaggaaccctgtgctggccgccctgcggagcgcccagggcaagaggcccaggagcggcaccccagctgacagcagcggcagcgcccccagccctgcccccagcctgcacccctacaggaaggcccccaagccagccagccgcagcgcctag

SEQ ID NO: 335312 - DNA, 951 bp, Artificial Sequence
  derived and/or modified sequence
agccccaaggccgagctgaagctggagaagaagagcggccggaagcctcgatcccctcgggactctggcccccagaaagagctggttatacccggcatagtcgactttgagcgcattcgccgagcccttcggacgcctaaaccacagacaccaggaacctattgtttcgggcggctgtctcaccactcattcttctcccgccaccatccacacccccaacatgtcacccatattcaagatctgacgggaaagcccgtgtgcgtggttcgggactttcctgccccgctccctgaatctaccgtcttctccgggtgccagatgggcataccgacaatttcagttcccattggggatccccagagcaaccgcaatccgcagctctcctctgcttggaagaaagagctcaaggagctggcctctagagttgcctttctcaccaaagaagacgaactcaaaaaaaaggaggatactacgtccctgaactggaattgtaagtccagacggcctcaagcccccggactgtccgggaccgatctgggcgctgccgaactcggaattaaaaaggagcagaaggaagagccactgagagagcagggtgccaagtactctgccgagaccggtcggctcattcctgcatctacacgagctgtggggcgtagacgttcacaccagggacagcagtcacagtcttcaagccggcacgagggcgtgcaggcctttctccttcaggatcaggaactcctgggtggattgacctcccccggcgcgcccgtgtccgacccaggtaaccggctggcaaagcggaaccctgttctggcggcactacgaagcgcccagggtaagaggccaaggagcggtacacccgctgattcctcaggcagcgctccctctcctgcccctagtctccatccatatagaaaagcaccaaaaccagcatcccggtctgcttag

SEQ ID NO: 335313 - DNA, 951 bp, Artificial Sequence
  derived and/or modified sequence
agtcctaaggcagagctgaagctggaaaaaaagagtgggaggaagccccgtagccccagagattctggccctcagaaagagctggtaattcccggtattgtggactttgaaagaattaggcgcgctttgagaacccctaaaccacagacacctggcacttactgttttggcagattgtcacatcacagtttcttttcaagacaccatcctcatccacaacatgtgacccacatccaggatctgacagggaagcccgtatgcgttgtaagggattttccagcgcctcttccagagtccactgtgttctcaggctgtcaaatggggatccccacaatctccgtgcctattggggatccccagtcgaataggaacccacagctgtcaagcgcctggaagaaggagctgaaagagctggcttcgcgggtagcctttctgacaaaagaggacgagctcaaaaagaaggaagacaccacctccttgaactggaactgcaagagcagaaggccccaagcccctggcctgtccggaacagatttgggcgcagcagagctgggaattaagaaagagcagaaggaagaaccactgcgcgaacagggggcaaagtactcggccgagacagggcgtctcattccagcatcaaccagggccgtgggacgtaggcggtcacatcaggggcagcaatcacagtcctcctcccggcacgagggtgtgcaagcgtttctgttgcaggaccaggagctgctagggggtttgacctcccctggagcaccagtctccgatccagggaacagacttgccaaaagaaacccagttttggccgcattgaggagcgcccagggaaaaagacccagaagcggcacaccagcagatagctcaggctcggccccttcccctgcccctagcctgcacccgtataggaaggctcccaagccggcttcaaggagcgcctag

SEQ ID NO: 335314 - DNA, 951 bp, Artificial Sequence
  derived and/or modified sequence
agccccaaggccgagctgaagctggagaagaagagcggcagaaagcccagaagccccagagacagcggcccccagaaggagctggtgatccccggcatcgtggacttcgagagaatcagaagagccctgagaacccccaagccccagacccccggcacctactgcttcggcagactgagccaccacagcttcttcagcagacaccacccccacccccagcacgtgacccacatccaggacctgaccggcaagcccgtgtgcgtggtgagagacttccccgcccccctgcccgagagcaccgtgttcagcggctgccagatgggcatccccaccatcagcgtgcccatcggcgacccccagagcaacagaaacccccagctgagcagcgcctggaagaaggagctgaaggagctggccagcagagtggccttcctgaccaaggaggacgagctgaagaagaaggaggacaccaccagcctgaactggaactgcaagagcagaagaccccaggcccccggcctgagcggcaccgacctgggcgccgccgagctgggcatcaagaaggagcagaaggaggagcccctgagagagcagggcgccaagtacagcgccgagaccggcagactgatccccgccagcaccagagccgtgggcagaagaagaagccaccagggccagcagagccagagcagcagcagacacgagggcgtgcaggccttcctgctgcaggaccaggagctgctgggcggcctgaccagccccggcgcccccgtgagcgaccccggcaacagactggccaagagaaaccccgtgctggccgccctgagaagcgcccagggcaagagacccagaagcggcacccccgccgacagcagcggcagcgcccccagccccgcccccagcctgcacccctacagaaaggcccccaagcccgccagcagaagcgcctag

SEQ ID NO: 335315 - protein, 106 aa, Artificial Sequence
  derived and/or modified sequence
QCAELWGSVRKNSDKFLLSRNLHPSKEEYRQQIKTPGEEWRQILVHWRSSSPPDAFKPEHREEDIEAEGRELRGPNTCTCLAQEQPQGFRGVSVSTTFTAVPDSLP

SEQ ID NO: 335316 - DNA, 321 bp, Artificial Sequence
  derived and/or modified sequence
cagtgtgccgaactctggggaagtgtaaggaaaaattcagataaattcctgctcagccgtaatttgcaccctagtaaagaggagtacaggcagcaaattaaaacgcccggggaggaatggcggcaaatcctcgttcattggcgatcttctagtccacccgatgcattcaagcctgagcaccgtgaggaagacattgaggccgaaggccgcgagctgcgaggcccgaatacatgcacatgtcttgctcaggagcaacctcagggctttagaggtgtgtccgttagtaccacctttaccgctgtcccggatagtctaccatag

SEQ ID NO: 335317 - DNA, 321 bp, Artificial Sequence
  derived and/or modified sequence
cagtgtgccgagctgtggggctctgtgaggaagaacagcgacaagttcctgctgagcaggaacctgcaccccagcaaggaggagtaccggcagcagatcaagaccccaggagaggagtggaggcagatcctggtgcactggaggagcagcagccccccagatgccttcaagccagagcaccgggaggaggacattgaagctgagggccgggagctgcggggccccaacacctgcacctgcctggcccaggagcagccccagggcttccggggcgtgtctgtgtccaccaccttcaccgctgtgcctgacagcctgccctag

SEQ ID NO: 335318 - DNA, 321 bp, Artificial Sequence
  derived and/or modified sequence
cagtgcgccgagctgtggggcagcgtgcggaagaacagcgacaagttccttctgtctcgcaaccttcacccaagtaaggaggagtacagacagcaaataaaaactccaggcgaggagtggagacagattttggtgcattggagaagctcttccccaccggatgctttcaaacctgaacatagagaggaggatatagaagcggaaggccgcgagcttagggggcctaatacatgtacatgcctggcccaggagcagcctcagggatttagaggtgtctctgtgtcgaccaccttcactgccgtgcccgactctctgccatag

SEQ ID NO: 335319 - DNA, 321 bp, Artificial Sequence
  derived and/or modified sequence
cagtgcgctgagctgtggggtagtgtgcggaaaaattctgacaagttcttactatcaaggaaccttcacccctctaaagaagaataccgtcaacagataaagactccgggtgaggagtggagacagatactcgtgcactggcggtccagttctcccccagatgcttttaagccggaacacagggaagaggacatagaagccgaaggtagagagttgcggggacctaacacttgtacatgccttgcccaggagcagccacaggggttcagaggtgtgtctgtaagcacaacgtttactgcagttcctgatagtctcccatag

SEQ ID NO: 335320 - DNA, 353 bp, Artificial Sequence
  derived and/or modified sequence
caatgtgctgaactctggggatcagtgaggaagaattcagacaagttcctgctgtcacggaacttacatcccagcaaggaggaatacagacaacaaattaaaacacctggggaggagtggagacagatactagtacattggagaagctcaagtcctccagatgcattcaagccagaacacagagaagaagacatcgaagccgagggcagagagctgaggggccctaacacttgcacctgccttgctcaagagcagccccaagggttcaggggtgtttctgtctccaccaccttcacagcagtacctgattccctaccgtgaaaactcttactaaataaaaccgtcttccctga

SEQ ID NO: 335321 - DNA, 321 bp, Artificial Sequence
  derived and/or modified sequence
cagtgcgccgagctgtggggcagcgtgagaaagaacagcgacaagttcctgctgagcagaaacctgcaccccagcaaggaggagtacagacagcagatcaagacccccggcgaggagtggagacagatcctggtgcactggagaagcagcagcccccccgacgccttcaagcccgagcacagagaggaggacatcgaggccgagggcagagagctgagaggccccaacacctgcacctgcctggcccaggagcagccccagggcttcagaggcgtgagcgtgagcaccaccttcaccgccgtgcccgacagcctgccctag

SEQ ID NO: 335322 - protein, 2303 aa, Artificial Sequence
  derived and/or modified sequence
MIVMNDQVLEPQNVDPSMVQMTFLDDVVHSLLKGENIGITSRRRSRANQNVNAVHSHYTRAQANSPRPAMNSQAAVPKQNTHQQQQQRSIRPNKRKGSDSSIPDEEKMKEEKYDYISRGENPKGKNKHLMNKRRKPEEDEKKLNMKRLRTDNVSDFSESSDSENSNKRIIDNSSEQKPENELKNKNTSKINGEEGKPHNNEKAGEETLKNSQPPWDQIQEDKKHEEAEKRKSVDTQLQEDMIIHSSEQSTVSDHNSNDLLPQECNMDKTHTMELLPKEKFVSRPPTPKCVIDITNDTNLEKVAQENSSTFGLQTLQKMDPNVSDSKHSIANAKFLETAKKDSDQSWVSDVVKVDLTQSSVTNASSGNDHLNMEKEKYVSYISPLSAVSVMEDKLHKRSPPPETIKSKLNTSVDTHKIKSSPSPEVVKPKITHSPDSVKSKATYVNSQATGERRLANKIEHELSRCSFHPIPTRSSTLETTKSPLIIDKNEHFTVYRDPALIGSETGANHISPFLSQHPFPLHSSSHRTCLNPGTHHPALTPAPHLLAGSSSQTPLPTINTHPLTSGPHHAVHHPHLLPTVLPGVPTASLLGGHPRLESAHASSLSHLALAHQQQQQLLQHQSPHLLGQAHPSASYNQLGLYPIIWQYPNGTHAYSGLGLPSSKWVHPENAVNAEASLRRNSPSPWLHQPTPVTSADGIGLLSHIPVRPSSAEPHRPLKITAHSSPPLTKTLVDHHKEELERKAFMEPLRSVASTSAKNDLDLNRSQTGKDCHLHRHFVDPVLNQLQRPPQETGERLNKYKEEHRRILQESIDVAPFTTKIKGLEGERENYSRVASSSSSPKSHIIKQDMDVERSVSDLYKMKHSVPQSLPQSNYFTTLSNSVVNEPPRSYPSKEVSNIYGDKQSNALAAAAANPQTLTSFITSLSKPPPLIKHQPESEGLVGKIPEHLPHQIASHSVTTFRNDCRSPTHLTVSSTNTLRSMPALHRAPVFHPPIHHSLERKEGSYSSLSPPTLTPVMPVNAGGKVQESQKPPTLIPEPKDSQANFKSSSEQSLTEMWRPNNNLSKEKTEWHVEKSSGKLQAAMASVIVRPSSSTKTDSMPAMQLASKDRVSERSSAGAHKTDCLKLAEAGETGRIILPNVNSDSVHTKSEKNFQAVSQGSVPSSVMSAVNTMCNTKTDVITSAADTTSVSSWGGSEVISSLSNTILASTSSECVSSKSVSQPVAQKQECKVSTTAPVTLASSKTGSVVQPSSGFSGTTDFIHLKKHKAALAAAQYKSSNASETEPNAIKNQTLSASLPLDSTVICSTINKANSVGNGQASQTSQPNYHTKLKKAWLTRHSEEDKNTNKMENSGNSVSEIIKPCSVNLIASTSSDIQNSVDSKIIVDKYVKDDKVNRRKAKRTYESGSESGDSDESESKSEQRTKRQPKPTYKKKQNDLQKRKGEIEEDLKPNGVLSRSAKERSKLKLQSNSNTGIPRSVLKDWRKVKKLKQTGESFLQDDSCCEIGPNLQKCRECRLIRSKKGEEPAHSPVFCRFYYFRRLSFSKNGVVRIDGFSSPDQYDDEAMSLWTHENFEDDELDIETSKYILDIIGDKFCQLVTSEKTALSWVKKDAKIAWKRAVRGVREMCDACEATLFNIHWVCQKCGFVVCLDCYKAKERKSSRDKELYAWMKCVKGQPHDHKHLMPTQIIPGSVLTDLLDAMHTLREKYGIKSHCHCTNKQNLQVGNFPTMNGVSQSQQQNTPPKSEKNGGSSPESDVGTDNKLTPPESQSPLHWLADLAEQKAREEKKENKELTLENQIKEEREQDNSESPNGRTSPLVSQNNEQGSTLRDLLTTTAGKLRVGSTDAGIAFAPVYSMGAPSSKSGRTMPNILDDIIASVVENKIPPSKTSKINVKPELKEEPEESIISAVDENNKLYSDIPHSWICEKHILWLKDYKNSSNWKLFKECWKQGQPAVVSGVHKKMNISLWKAESISLDFGDHQADLLNCKDSIISNANVKEFWDGFEEVSKRQKNKSGETVVLKLKDWPSGEDFKTMMPARYEDLLKSLPLPEYCNPEGKFNLASHLPGFFVRPDLGPRLCSAYGVVAAKDHDIGTTNLHIEVSDVVNILVYVGIAKGNGILSKAGILKKFEEEDLDDILRKRLKDSSEIPGALWHIYAGKDVDKIREFLQKISKEQGLEVLPEHDPIRDQSWYVNKKLRQRLLEEYGVRTCTLIQFLGDAIVLPAGALHQVQNFHSCIQVTEDFVSPEHLVESFHLTQELRLLKEEINYDDKLQVKNILYHAVKEMVRALKIHEDEVEDMEEN

SEQ ID NO: 335323 - protein, 1480 aa, Artificial Sequence
  derived and/or modified sequence
MIVMNDQVLEPQNVDPSMVQMTFLDDVVHSLLKGENIGITSRRRSRANQNVNAVHSHYTRAQANSPRPAMNSQAAVPKQNTHQQQQQRSIRPNKRKGSDSSIPDEEKMKEEKYDYISRGENPKGKNKHLMNKRRKPEEDEKKLNMKRLRTDNVSDFSESSDSENSNKRIIDNSSEQKPENELKNKNTSKINGEEGKPHNNEKAGEETLKNSQPPWDQIQEDKKHEEAEKRKSVDTQLQEDMIIHSSEQSTVSDHNSNDLLPQECNMDKTHTMELLPKEKFVSRPPTPKCVIDITNDTNLEKVAQENSSTFGLQTLQKMDPNVSDSKHSIANAKFLETAKKDSDQSWVSDVVKVDLTQSSVTNASSGNDHLNMEKEKYVSYISPLSAVSVMEDKLHKRSPPPETIKSKLNTSVDTHKIKSSPSPEVVKPKITHSPDSVKSKATYVNSQATGERRLANKIEHELSRCSFHPIPTRSSTLETTKSPLIIDKNEHFTVYRDPALIGSETGANHISPFLSQHPFPLHSSSHRTCLNPGTHHPALTPAPHLLAGSSSQTPLPTINTHPLTSGPHHAVHHPHLLPTVLPGVPTASLLGGHPRLESAHASSLSHLALAHQQQQQLLQHQSPHLLGQAHPSASYNQLGLYPIIWQYPNGTHAYSGLGLPSSKWVHPENAVNAEASLRRNSPSPWLHQPTPVTSADGIGLLSHIPVRPSSAEPHRPLKITAHSSPPLTKTLVDHHKEELERKAFMEPLRSVASTSAKNDLDLNRSQTGKDCHLHRHFVDPVLNQLQRPPQETGERLNKYKEEHRRILQESIDVAPFTTKIKGLEGERENYSRVASSSSSPKSHIIKQDMDVERSVSDLYKMKHSVPQSLPQSNYFTTLSNSVVNEPPRSYPSKEVSNIYGDKQSNALAAAAANPQTLTSFITSLSKPPPLIKHQPESEGLVGKIPEHLPHQIASHSVTTFRNDCRSPTHLTVSSTNTLRSMPALHRAPVFHPPIHHSLERKEGSYSSLSPPTLTPVMPVNAGGKVQESQKPPTLIPEPKDSQANFKSSSEQSLTEMWRPNNNLSKEKTEWHVEKSSGKLQAAMASVIVRPSSSTKTDSMPAMQLASKDRVSERSSAGAHKTDCLKLAEAGETGRIILPNVNSDSVHTKSEKNFQAVSQGSVPSSVMSAVNTMCNTKTDVITSAADTTSVSSWGGSEVISSLSNTILASTSSECVSSKSVSQPVAQKQECKVSTTAPVTLASSKTGSVVQPSSGFSGTTDFIHLKKHKAALAAAQYKSSNASETEPNAIKNQTLSASLPLDSTVICSTINKANSVGNGQASQTSQPNYHTKLKKAWLTRHSEEDKNTNKMENSGNSVSEIIKPCSVNLIASTSSDIQNSVDSKIIVDKYVKDDKVNRRKAKRTYESGSESGDSDESESKSEQRTKRQPKPTYKKKQNDLQKRKGEIEEDLKPNGVLSRSAKERSKLKLQSNSNSCHLVKTE

SEQ ID NO: 335324 - DNA, 4443 bp, Artificial Sequence
  derived and/or modified sequence
atgattgtgatgaatgaccaagtgcttgagccacagaatgtggacccaagcatggtgcagatgacctttctcgatgatgtcgtgcatagcctccttaaaggggaaaacatcggtatcaccagtagacgcaggtctagggcgaaccagaacgtgaatgccgtccattcccactatacccgggcccaggctaattcaccccgcccggcgatgaactctcaggcagccgtgccaaagcagaatacacatcagcagcagcagcagcggagcatccgccccaacaaacgtaaaggcagcgattcatccatccctgacgaggaaaagatgaaggaggaaaaatacgattatatttcacgcggcgaaaatcctaaggggaaaaacaaacatctaatgaacaagcgaagaaagccagaggaagatgagaagaaacttaacatgaaaagactcagaacggacaacgtcagcgacttttcagagagtagtgactctgagaattctaacaaacgcatcatcgataatagttctgagcagaaaccggagaatgagctgaaaaataagaacacaagtaagatcaacggagaagagggtaaaccacacaacaacgagaaggcgggcgaggaaactctgaaaaactcgcagcccccttgggatcaaatccaggaggacaagaaacacgaagaagcagaaaaacggaagagcgttgatacccagctgcaagaggacatgatcattcactcatcggagcagtcaacagtgagcgaccacaattctaacgacctgctcccgcaagagtgcaacatggacaagacccatacgatggagctgctcccaaaggaaaagttcgtctccaggccacctaccccaaagtgtgtgatcgatattaccaatgataccaatctggagaaagtggcccaggaaaacagttccaccttcgggctacagaccctgcagaaaatggatcctaacgtctcagatagcaagcatagcatcgccaacgccaaattcctggaaacagctaaaaaagattctgaccagtcctgggtgtccgacgtcgtgaaagtcgatctgacccagtcttcagtgaccaacgccagcagcgggaacgatcatctcaatatggaaaaggagaagtatgtgagctatatttctcctctgagcgcagtgtcagtgatggaagataagctacacaaaagatcaccaccccccgaaacaataaagagcaagttgaacacaagcgtcgacacccacaaaatcaagtcttccccgtctccggaggtagtgaaacccaaaatcacacacagtcccgattctgtgaaatcaaaggctacttatgtgaactcacaggcgacaggcgagcggcggctagccaacaaaattgagcatgagctctcccgttgttctttccatcccatcccaactcgcagctccacattggagaccactaaatcccccctgataattgataaaaacgaacatttcaccgtataccgagaccccgccctcataggctccgagaccggggccaatcatatctcccctttcctatctcaacatccattccccctccacagcagtagtcatcgcacatgcctgaaccccggaacccatcacccggcgctaacccccgctccgcacctgttggctggaagtagctcgcagacacctctcccaactatcaatactcaccccttaacctcggggccccatcacgcggttcaccacccacaccttttacccaccgtcctgccaggcgtccccaccgccagtctcttgggagggcacccacggctggaatctgcccatgcaagcagtctgtctcacttagctcttgctcaccagcagcagcagcaactgctccagcaccaatccccacatctgctagggcaagcccaccctagcgcatcttacaatcagttaggcctgtaccccattatctggcagtatcctaatggaacccacgcttatagtggacttgggctgccttcttctaagtgggtgcatcctgaaaatgcagtgaacgctgaggcaagtctaaggcggaatagcccctcgccctggcttcaccagcccactcccgtgaccagcgcggatggaattggactgttatcccatatccctgtaagaccaagctctgctgaacctcatcggccccttaagataactgctcattcatcccccccattgacaaagaccctagtggaccaccataaagaggagctggagcgcaaggcttttatggaacctttgaggtccgttgcatctacgagcgccaagaatgacctggatctgaacagaagccagaccggaaaagactgtcatctccaccggcacttcgtggatcctgtactgaatcagctacagaggcctccccaggagacaggcgaacggctaaataaatataaggaagagcatcggagaatccttcaggagtctattgacgtcgctccattcacgacaaaaattaaaggcctggaaggtgaacgcgagaactattcgcgggtcgccagttcctctagcagccccaagtcccatattatcaagcaggatatggacgtggaacggtctgtgtcagacctctacaagatgaagcacagcgtaccccagagtctcccccagtctaactactttacaaccttaagcaattcagtggtgaacgagcccccccgaagctacccgtccaaggaggtttccaatatttacggcgataagcagtccaacgctctagctgccgccgcggccaatccgcagacgctgactagtttcataaccagtcttagtaagccccctcctcttatcaagcatcagcccgaatcagagggactggtcgggaagattccggagcacctgccccaccagatcgctagccactccgtcactacatttcgcaatgactgccgaagccctacccatctgacagtttcctccactaacactctccgatccatgccggctctccatcgcgctccagtcttccatcccccaatccaccacagccttgagaggaaggaaggctcctactcgagcctgtcgccccccaccctgacacctgtcatgcccgtgaacgctggcggaaaggttcaggagtcacagaagccaccgacgctaataccagagccaaaagattcccaggcaaattttaagtcaagttcagagcaatctctgactgagatgtggagaccaaataacaatctctctaaagaaaagaccgaatggcacgttgagaaatcaagcgggaagctgcaagccgcaatggccagcgtcatcgtgaggccctcctcaagtactaagactgatagcatgcccgccatgcaactggcttcgaaggatagggtatcagaacgaagtagtgcaggggcccataagacggactgtctgaagctggcggaagctggcgaaactggaagaatcatattgcccaacgttaacagtgattccgtacacacaaagtccgagaagaactttcaggccgtatctcaagggagtgtgccatccagtgtgatgtccgcagtaaatactatgtgcaacaccaagaccgacgtgatcacttcagcggctgacacaaccagtgtaagctcttggggggggtctgaggtgatttccagcctctccaataccattctggcttcaacttcgtccgaatgcgtttcttctaagagcgttagtcagcctgtggcccagaaacaggagtgtaaagtgagcacaacggctcctgtcaccttggcttcaagcaagaccggaagtgttgtacaacccagctcaggcttttctggaacaacagactttatccacctaaaaaagcataaagcagccctggcagctgcacagtacaagtcctcaaacgcttcagagacagagcccaacgccatcaaaaaccagactctgagcgctagcctgcctcttgatagcacagttatctgttcaactattaacaaagctaactccgtaggcaacggacaggcctcacagacatcccagcctaactaccacacaaaactcaaaaaagcatggctcacccgccactccgaagaggacaaaaacaccaacaagatggaaaactccggtaattcagtctcggagattatcaaaccttgttctgtgaaccttatcgctagcacctcctcggatatccagaattctgtagactccaaaatcattgtggacaaatacgtcaaggacgacaaggtcaatcgtagaaaggcgaaacggacgtatgagtcaggctcggagtccggcgacagcgatgagtccgagtctaaatcagagcagcgcactaaaaggcaaccgaaacccacctataagaaaaagcagaatgacctacagaagcgcaagggcgagatcgaggaagatctcaagccgaacggggtcctgtctcgctccgccaaggaaaggagtaagctcaagttgcagagcaattctaactcttgccacctagtgaagaccgaatag

SEQ ID NO: 335325 - DNA, 4443 bp, Artificial Sequence
  derived and/or modified sequence
atgattgtgatgaatgaccaggtgctggagccccagaatgtggaccccagcatggtgcagatgaccttcctggatgatgtggtgcacagcctgctgaagggagaaaatattggcatcaccagcagaagaagaagccgggccaaccagaatgtgaatgctgtgcacagccactacacccgggcccaggccaacagccccaggcctgccatgaacagccaggccgctgtgcccaagcagaacacccaccagcagcagcagcagaggagcatccggcccaacaagaggaagggcagtgacagcagcatcccagatgaggagaagatgaaggaggagaagtatgactacatcagcagaggagagaaccccaagggcaagaacaagcacctgatgaacaagaggaggaagccagaggaggatgagaagaagctgaacatgaagaggctgaggacagacaacgtgtctgacttcagcgagagcagtgacagcgagaacagcaacaagaggatcatcgacaacagcagcgagcagaagccagaaaatgagctgaagaacaagaacaccagcaagatcaatggagaggagggcaagccccacaacaatgagaaggccggggaggagaccctgaagaacagccagcccccctgggaccagatccaggaggacaagaagcatgaggaggccgagaagaggaagtctgtggacacccagctgcaggaggacatgatcatccacagcagcgagcagagcacagtgtctgaccacaacagcaatgacctgctgccccaggagtgcaacatggacaagacccacaccatggagctgctgcccaaggagaagtttgtgtcccggccccccacccccaagtgtgtgattgacatcaccaatgacaccaacctggagaaggtggcccaggagaacagcagcaccttcggcctgcagaccctgcagaagatggaccccaacgtgtctgacagcaagcacagcatcgccaatgccaagttcctggagacagccaagaaggacagcgaccagagctgggtgtctgatgtggtgaaggtggacctgacccagagctctgtgaccaatgccagcagtggaaatgaccacctgaacatggagaaggagaagtatgtgtcctacatcagccccctgtctgctgtgtctgtgatggaggacaagctgcacaagaggagccccccacctgagaccatcaagagcaagctgaacacctctgtggacacccacaagatcaagagcagccccagccctgaggtggtgaagcccaagatcacccacagcccagacagcgtgaagagcaaggccacctacgtgaacagccaggccactggagagcggcggctggccaacaagattgagcacgagctgagccgctgcagcttccaccccatccccaccaggagcagcaccctggagaccaccaagagccccctcatcatcgacaagaatgagcacttcaccgtgtacagagatcctgccctgattggcagcgagactggagccaaccacatcagccccttcctgagccagcaccccttccccctgcacagcagcagccacaggacctgcctgaaccctggcacccaccacccagccctgaccccagccccccacctgctggccggcagcagcagccagacccccctgcccaccatcaacacccaccccctgaccagcggcccccaccacgctgtgcaccacccccacctgctgcccaccgtgctgcccggggtgcccacagccagcctgctgggcggccacccccggctggagagcgcccacgccagcagcctgagccacctggccctggcccaccagcagcagcagcagctgctgcagcaccagagcccccacctgctgggccaggcccaccccagcgccagctacaaccagctgggcctgtaccccatcatctggcagtacccaaatggcacccacgcctacagcggcctgggcctgcccagcagcaagtgggtgcacccagaaaatgctgtgaatgctgaggccagcctgcggaggaacagccccagcccctggctgcaccagcccacccctgtgaccagcgcagatggcatcggcctgctgagccacatccctgtgcggcccagcagcgctgagccccaccggcccctgaagatcacagcccacagcagcccccccctgaccaagaccctggtggaccaccacaaggaggagctggagaggaaggccttcatggagcccctgcggtctgtggccagcaccagcgccaagaatgacctggacctgaacagaagccagacaggcaaggactgccacctgcaccgccactttgtggaccctgtgctgaaccagctgcagaggcctccccaggagaccggggagcggctgaacaagtacaaggaggagcaccggcgcatcctgcaggagagcattgatgtggcccccttcaccaccaagatcaagggcctggagggggagcgggagaactacagccgggtggccagcagcagcagcagccccaagagccacatcatcaagcaggacatggatgtggagaggtctgtgtctgacctgtacaagatgaagcacagcgtgccccagagcctgccccagagcaactacttcaccaccctgagcaacagcgtggtgaatgagccccccaggagctaccccagcaaggaggtgagcaacatctatggagacaagcagagcaatgccctggccgctgctgctgccaacccccagaccctgaccagcttcatcaccagcctgagcaagcccccacccctcatcaagcaccagcctgagagcgagggcctggtgggcaagatccctgagcacctgccccaccagatcgccagccacagcgtgaccaccttcagaaatgactgccgcagccccacccacctgactgtgagcagcaccaacaccctgcgctccatgcctgccctgcaccgggcccctgtgttccacccccccatccaccacagcctggagaggaaggagggcagctacagcagcctgagcccccccaccctgacccctgtgatgcctgtgaatgccggcggcaaggtgcaggagagccagaagccacccaccctcatccctgagcccaaggacagccaggccaacttcaagagcagcagcgagcagagcctgacagagatgtggaggcccaacaacaacctgagcaaggagaagacagagtggcacgtggagaagagcagcggcaagctgcaggccgccatggcctctgtgattgtgcggcccagcagcagcaccaagacagacagcatgcctgccatgcagctggccagcaaggacagagtgtctgagaggagcagcgctggggcccacaagacagactgcctgaagctggccgaggccggggagaccggccgcatcatcctgcccaacgtgaacagcgacagcgtgcacaccaagtctgagaagaacttccaggccgtgtcccagggctctgtgcccagctctgtgatgtctgctgtgaacaccatgtgcaacaccaagacagatgtgatcaccagcgctgctgacaccacctctgtgtcctcctggggcggcagcgaggtgatcagcagcctgagcaacaccatcctggccagcaccagcagtgaatgtgtgagcagcaagtctgtgtcccagcctgtggcccagaagcaggagtgcaaggtgtccaccacagcccctgtgaccctggccagcagcaagacaggctctgtggtgcagcccagcagcggcttcagcggcaccacagacttcatccacctgaagaagcacaaggccgccctggccgccgcccagtacaagagcagcaatgccagcgagacagagcccaatgccatcaagaaccagaccctgagcgccagcctgcccctggacagcaccgtcatctgcagcaccatcaacaaggccaacagcgtgggcaatggccaggccagccagaccagccagcccaactaccacaccaagctgaagaaggcctggctgaccaggcacagcgaggaggacaagaacaccaacaagatggagaacagcggcaacagcgtgtctgagatcatcaagccctgcagcgtgaacctgattgccagcaccagcagtgacatccagaacagcgtggacagcaagatcatcgtggacaagtatgtgaaggatgacaaggtgaacagaaggaaggccaagaggacctatgaaagtggcagcgagagcggggacagtgatgaaagtgagagcaagtctgagcagaggaccaagaggcagcccaagcccacctacaagaagaagcagaatgacctgcagaagaggaagggggagattgaggaggacctgaagcccaacggggtgctgagccgcagcgccaaggagaggagcaagctgaagctgcagagcaacagcaacagctgccacctggtgaagacagaatag

SEQ ID NO: 335326 - DNA, 4443 bp, Artificial Sequence
  derived and/or modified sequence
atgatcgtgatgaacgaccaggtgctggagccccagaacgtggaccccagcatggtccagatgactttcctcgacgatgtggttcacagcctgctgaagggtgaaaacattggaataacctcacgcagaagatccagagccaaccaaaatgttaatgccgtccactctcattacacgagagcccaggctaactcccccaggcccgctatgaatagtcaagctgcggtgccaaaacaaaacactcatcagcagcagcagcagcgctcaatccggccgaacaagagaaaaggcagcgacagtagcatcccagacgaggaaaaaatgaaggaagagaaatacgattacatttccaggggcgaaaacccaaagggcaagaacaaacatcttatgaataaaagaagaaaacctgaggaagacgagaagaaactaaacatgaaaagattacgaacagataacgtcagtgatttcagtgaatcatcagattcagaaaactccaataagaggatcatcgataattcctccgagcaaaagcccgagaacgagcttaagaacaagaacacctctaagatcaatggggaagagggcaaaccacataataacgagaaggctggcgaagagacactcaaaaacagccagcccccatgggatcagattcaggaggataaaaagcacgaggaggctgagaagcgtaagtcggttgatacgcagctgcaggaggatatgatcatccactcttccgaacagtccaccgtttccgatcacaatagtaacgatctgctgcctcaggagtgtaacatggacaaaacacacacaatggagctgctgcccaaagagaagtttgtgagccgaccacctactcctaaatgcgtgattgacattacgaatgacaccaacttagaaaaggttgctcaggagaacagttctacctttggtttacaaacattgcagaagatggaccctaacgttagcgactccaagcactccattgccaacgctaaattcttggagaccgccaagaaagattcggaccagtcttgggtatccgacgtggtcaaagtcgatttgacgcaatcgtccgttacaaacgcctcctccggtaatgaccatcttaatatggaaaaagaaaaatatgtttcttacatttcaccattaagcgctgtttccgtgatggaggataagctgcataaacgttcccctccacccgaaacaatcaagtcgaagctcaatacgtcagtggacacacacaagatcaagagctctccctccccagaggtcgtgaaacctaaaatcacccactctcccgacagcgtgaaaagcaaggcaacgtatgtgaactcccaagccaccggagaaagaagattggcaaacaaaatcgaacacgagttgagcagatgcagttttcatcctatcccaactcgatcctccacactggagacaacaaaaagcccactgattattgacaaaaacgaacatttcacagtttaccgcgatcccgcattgatcggctctgagacaggggcaaatcacatttccccatttctgagtcagcaccctttcccgctgcactctagctcccaccggacctgtttgaacccaggaacccaccaccccgccttgacgccggcaccacacttactcgccgggagttctagtcaaacacccctacccactattaatacccacccactgacctccgggccccatcacgccgtacaccacccccacctgttgcctactgtgcttcccggagtccctaccgcctcccttttaggaggccatcctcggctcgagagcgcacatgcgtcaagtctgtcccatctggctctggcacatcaacagcagcagcagttactgcaacaccagtccccacatcttttaggtcaggcacacccctccgcttcttacaaccagcttggactttatccaataatttggcagtatccaaacggtactcacgcttactctggcttggggttgcccagcagcaagtgggtgcaccccgaaaatgcagtgaacgccgaagctagtcttaggagaaatagccccagcccatggctgcatcaacccaccccagtgaccagcgccgatgggatcggcctcttgagtcatatcccagtgagaccgtccagcgccgagcctcacaggccactcaaaataacagcacatagctcgccccccctgaccaaaaccctggtggaccatcataaagaggaactagaacggaaggcctttatggagcccctacgctctgttgcctcaacttcagctaaaaacgatttagacttgaatcgaagccagacgggaaaagactgtcatctacatcgacatttcgtcgaccccgtgctcaaccagctacagcgcccgccccaagaaacaggtgaacgattaaataagtataaggaggagcacaggagaatccttcaagaatctattgatgtcgccccattcacgacaaaaatcaagggtctggaaggagagcgggaaaattatagcagagttgcctcatcctcaagctcacctaaatcacatatcatcaaacaggacatggacgtcgaacggtccgtgtctgacctctacaagatgaagcactctgtaccccagtcactcccacagtctaattactttacaactctgagtaacagtgtggtcaatgaaccccccagatcttacccttccaaggaggtttctaacatttatggagataaacaatcaaatgctttagccgctgccgcagcaaaccctcagacactcacatcttttattaccagccttagcaaacctcctcccctgataaaacaccagcccgaatcggagggcctcgttggaaagatacccgaacacctccctcaccagatagccagtcatagcgtgacaacttttaggaacgactgtcggtccccaactcacttgaccgttagcagtaccaatacgctgcggagtatgcccgcactgcatagggcccccgttttccacccaccaatccaccacagtctggaacggaaggaaggctcatattcctccctgagccccccaacgttgacgccagtgatgccggtgaacgctggggggaaagtccaggaatcccagaaaccgcctaccctgattcccgaacccaaagatagccaggccaactttaagagctccagtgagcagtcccttaccgaaatgtggcggcctaataacaacctgagcaaagagaagaccgagtggcatgtggaaaagtcgagtggaaagcttcaggccgctatggccagcgtgattgtgcgtccaagcagttcaacaaagaccgactccatgcctgcaatgcagctagcttccaaagatagggtgagtgagcgctcaagcgcaggggcccacaagacagattgcctgaagttagcagaggctggggaaaccggccgtattatcctgcctaacgtgaatagtgacagcgtgcacaccaagtctgagaagaacttccaggctgtaagtcagggaagcgtgccttctagcgtgatgtccgcagtgaataccatgtgtaataccaagacagatgtcattacgtctgcggctgacacgaccagcgttagcagttggggggggtccgaggtcatcagttcactgtctaacactattctagcctctactagcagtgagtgcgtgagttcaaaaagtgtgtcccaaccagtcgcccagaaacaggaatgcaaggtgagtaccaccgccccagtgacccttgcatcctcaaagactggatccgtcgtgcagcctagttctggattcagtggaaccaccgactttatacatctgaaaaaacataaagctgcattggcggccgcgcagtacaaatctagcaacgctagcgagactgagccaaacgccattaaaaatcagactttatctgccagtctgcccctcgattccactgtaatttgttccacaattaacaaggcaaactcggtgggtaatggacaagcctcccagacaagtcaacccaactaccataccaaattgaagaaagcctggttgacaagacactcagaggaagacaagaacaccaacaaaatggaaaatagtggaaatagcgtaagcgaaattataaaaccttgtagcgtgaatctaatcgcctcgacatcctcagatatccagaatagcgttgactctaaaataatcgtcgacaagtatgtcaaagacgataaagtgaaccggcggaaggcaaagcgcacttatgaatccggtagcgagtctggagactccgatgagagcgagagcaaatctgagcaacggacaaagaggcagcctaagcctacctacaaaaagaaacagaacgacctccagaaacggaaaggagaaattgaagaggatctcaagcctaatggtgtcctgtcgaggtccgcgaaggagcgaagcaagctgaaattacagtcaaactctaactcatgtcacctcgtcaagaccgagtag

SEQ ID NO: 335327 - DNA, 4443 bp, Artificial Sequence
  derived and/or modified sequence
atgatcgttatgaacgaccaagtactggaaccgcaaaacgtggatccatcaatggtgcaaatgaccttcctggacgatgtcgtgcactcccttctaaaaggggaaaatatcggaataacatcgcgacgtcggtcacgggcaaaccagaacgtcaacgcggtgcactcccattacacgcgagcacaggctaactcaccgaggcccgctatgaatagtcaggctgccgtccctaagcaaaatactcaccagcagcaacaacagagaagtataagaccaaataagcgcaagggttccgacagttcaattcccgacgaggagaagatgaaagaagagaagtatgattacataagccgcggtgagaaccctaagggtaaaaacaagcatttaatgaataagcggagaaagccagaggaggacgaaaagaagttgaacatgaagcggttaagaactgacaatgtttctgacttttccgaatcctccgacagcgaaaatagcaataaacggataatcgataactcgagcgaacagaagccagagaacgaattgaaaaacaagaacacgagtaaaattaatggggaagagggcaaaccgcacaacaatgagaaggccggagaggagaccctgaagaattctcagccaccttgggatcagatacaggaggataaaaaacatgaggaagccgagaaacgtaaaagcgtcgacacccagctccaggaggacatgatcattcattcgagcgaacaaagcactgtgagtgaccataactcgaatgatctcctgccacaggaatgtaacatggataagacacacaccatggagctgctgcccaaggaaaaattcgtcagccgtcccccaactcccaagtgcgtgatcgatattacgaatgacactaaccttgagaaggtagcccaggagaatagctcaacttttgggctccagacactgcagaagatggaccctaatgtatccgattcgaagcactccattgcgaacgccaaatttcttgagaccgcgaagaaagactccgatcagagttgggtgtcagacgtggttaaggtggatctcacacagtctagcgtgacgaacgcctcgagcggtaatgatcacctcaacatggagaaggagaaatatgtgtcctatatttctccactctcagcagtgtcagtaatggaggacaagttacacaagcgctcacccccaccagaaaccatcaagtccaagctgaatacatcagttgatacccacaagatcaagtctagcccctccccagaagtcgtcaaacctaaaatcacccactcgccagactctgtgaaatccaaagcgacctatgtaaactcgcaggcaacaggtgaacgccgtttggcaaataaaatcgaacacgaactgtctaggtgctcctttcaccccataccgacgcgatcttcaaccctagagaccactaaaagtcccctgataatagataagaacgaacatttcaccgtgtacagggacccagcacttatcggtagtgagactggtgcaaaccatatctccccattcctcagccagcacccttttcccctgcattcctcaagccacagaacatgtctcaatcctgggacacaccatcctgccctgactcctgcaccacaccttctggcagggagcagctcacagactcccttaccaacaattaatactcaccccttaacgagtggcccacaccatgcagttcaccaccctcacctgcttccgaccgtcttacccggagtgcccactgctagtctcctaggaggccaccctcggttggaatctgcccacgcatcatcacttagtcatcttgctctggcacaccagcagcagcaacagcttcttcagcatcagagtcctcaccttctaggacaggcgcacccctccgcatcctacaatcaactaggcctgtaccctatcatttggcagtacccaaacggaactcacgcgtactccggactagggttacctagctctaaatgggtgcatcccgagaatgctgttaacgccgaggcttctctgagaaggaacagtccaagtccatggctacaccagcctactccggtaacgagtgccgacggaattggactcctgagccatatccccgtccgccctagctcagctgaacctcaccgacctctcaagataaccgcccacagttctcccccattaaccaagactctggtcgaccatcataaagaggaattggagcgtaaggcttttatggaaccccttcggtccgtagcttcaaccagtgccaaaaacgatctcgacttgaaccgatcgcagactggcaaggactgccacctgcacagacacttcgttgacccagtactgaaccagctccagagacctccacaagagaccggagagaggcttaataaatataaggaggaacatcgacgcatcttacaagaaagcattgatgttgctccattcactacgaagataaaaggcctcgagggtgaacgtgagaactatagccgagtggcttccagctcaagctctccaaagagtcatatcattaagcaagatatggatgtggaacgctccgtgagcgacctgtacaagatgaagcactcagtaccccagtcccttccccaatcaaactactttacgaccttaagtaatagtgttgtaaatgagccacctcggtcctatccatcaaaggaagtctccaacatttacggcgacaagcaatcgaacgctttggctgccgctgctgcgaacccccagaccctgacatcgtttataactagcctgtctaagccccctcccctgattaagcaccagcctgaaagtgaaggactggtaggcaagatcccagaacacttgccacaccagattgcctcccattcagttacaaccttccgaaatgactgccgaagtcctacacacctcaccgtttcatccaccaacacccttcgcagtatgcctgctttgcaccgagctcccgtttttcatccacccattcatcactcccttgagaggaaagaaggaagttactcttcgctttccccacccactctgacccccgtcatgcctgtgaatgctggcggaaaagtgcaggaatcacagaaaccgcctacgctgattccggagccaaaggacagccaagctaattttaagagcagctctgaacagtccctgacagaaatgtggcggcctaacaacaacctgagcaaagaaaagaccgagtggcacgtggagaagagctctgggaagctccaagctgcaatggcaagcgtgatcgtgagaccaagcagctccaccaagacagattcgatgcccgcaatgcagcttgcatcgaaggatcgggtatctgagcgctcctctgctggtgcccacaagactgattgtcttaagctggcggaggccggagaaacaggacggatcattttgccaaatgtaaactctgactcagttcatacaaagtctgagaagaacttccaggccgtttctcagggtagtgtgccgtcctccgtaatgagcgccgtgaataccatgtgtaacacgaagacagatgttattacctccgctgccgatactacttcggtatcgtcttggggcggtagcgaggttataagcagcctaagtaataccatccttgcatctacttcgtcagagtgcgtgtccagtaagtcagtaagtcagcccgtggcgcagaagcaggagtgcaaggtttctaccactgctcctgtaactctggcctcttctaaaaccgggagtgtcgttcagccaagcagcggcttctccggcactactgattttatacaccttaaaaagcataaagcggctttagcagctgcccaatacaaatcttctaacgcctcagaaaccgagcctaatgccattaagaatcagaccctctcagcatccctgccattagacagcactgtgatttgctctaccattaataaagcgaacagtgttggtaacggacaggcgtcgcagacaagccagccgaattaccacacaaagctcaagaaagcgtggttgacaaggcacagtgaagaggataaaaacaccaacaagatggagaattcaggtaatagcgtctccgaaatcattaagccctgttccgtgaaccttatcgcatcaacttccagtgacatccagaactccgtggacagcaaaatcattgtggacaaatatgtgaaggatgacaaagtaaacaggcgtaaggcaaaaaggacatatgagagtggttcagaatctggcgatagcgatgagtcagagagcaaatccgaacagcgtacaaagcgtcagcctaaaccaacgtacaagaagaagcagaacgatctgcagaaaaggaagggtgagatcgaggaggatctgaagcctaacggcgtgttgagccgatccgccaaggagcgcagtaaattaaagctccagtcaaattccaatagctgccatttagtgaaaaccgaatag

SEQ ID NO: 335328 - DNA, 4443 bp, Artificial Sequence
  derived and/or modified sequence
atgatcgtgatgaacgaccaggtgctggagccccagaacgtggaccccagcatggtgcagatgaccttcctggacgacgtggtgcacagcctgctgaagggcgagaacatcggcatcaccagcagaagaagaagcagagccaaccagaacgtgaacgccgtgcacagccactacaccagagcccaggccaacagccccagacccgccatgaacagccaggccgccgtgcccaagcagaacacccaccagcagcagcagcagagaagcatcagacccaacaagagaaagggcagcgacagcagcatccccgacgaggagaagatgaaggaggagaagtacgactacatcagcagaggcgagaaccccaagggcaagaacaagcacctgatgaacaagagaagaaagcccgaggaggacgagaagaagctgaacatgaagagactgagaaccgacaacgtgagcgacttcagcgagagcagcgacagcgagaacagcaacaagagaatcatcgacaacagcagcgagcagaagcccgagaacgagctgaagaacaagaacaccagcaagatcaacggcgaggagggcaagccccacaacaacgagaaggccggcgaggagaccctgaagaacagccagcccccctgggaccagatccaggaggacaagaagcacgaggaggccgagaagagaaagagcgtggacacccagctgcaggaggacatgatcatccacagcagcgagcagagcaccgtgagcgaccacaacagcaacgacctgctgccccaggagtgcaacatggacaagacccacaccatggagctgctgcccaaggagaagttcgtgagcagaccccccacccccaagtgcgtgatcgacatcaccaacgacaccaacctggagaaggtggcccaggagaacagcagcaccttcggcctgcagaccctgcagaagatggaccccaacgtgagcgacagcaagcacagcatcgccaacgccaagttcctggagaccgccaagaaggacagcgaccagagctgggtgagcgacgtggtgaaggtggacctgacccagagcagcgtgaccaacgccagcagcggcaacgaccacctgaacatggagaaggagaagtacgtgagctacatcagccccctgagcgccgtgagcgtgatggaggacaagctgcacaagagaagccccccccccgagaccatcaagagcaagctgaacaccagcgtggacacccacaagatcaagagcagccccagccccgaggtggtgaagcccaagatcacccacagccccgacagcgtgaagagcaaggccacctacgtgaacagccaggccaccggcgagagaagactggccaacaagatcgagcacgagctgagcagatgcagcttccaccccatccccaccagaagcagcaccctggagaccaccaagagccccctgatcatcgacaagaacgagcacttcaccgtgtacagagaccccgccctgatcggcagcgagaccggcgccaaccacatcagccccttcctgagccagcaccccttccccctgcacagcagcagccacagaacctgcctgaaccccggcacccaccaccccgccctgacccccgccccccacctgctggccggcagcagcagccagacccccctgcccaccatcaacacccaccccctgaccagcggcccccaccacgccgtgcaccacccccacctgctgcccaccgtgctgcccggcgtgcccaccgccagcctgctgggcggccaccccagactggagagcgcccacgccagcagcctgagccacctggccctggcccaccagcagcagcagcagctgctgcagcaccagagcccccacctgctgggccaggcccaccccagcgccagctacaaccagctgggcctgtaccccatcatctggcagtaccccaacggcacccacgcctacagcggcctgggcctgcccagcagcaagtgggtgcaccccgagaacgccgtgaacgccgaggccagcctgagaagaaacagccccagcccctggctgcaccagcccacccccgtgaccagcgccgacggcatcggcctgctgagccacatccccgtgagacccagcagcgccgagccccacagacccctgaagatcaccgcccacagcagcccccccctgaccaagaccctggtggaccaccacaaggaggagctggagagaaaggccttcatggagcccctgagaagcgtggccagcaccagcgccaagaacgacctggacctgaacagaagccagaccggcaaggactgccacctgcacagacacttcgtggaccccgtgctgaaccagctgcagagacccccccaggagaccggcgagagactgaacaagtacaaggaggagcacagaagaatcctgcaggagagcatcgacgtggcccccttcaccaccaagatcaagggcctggagggcgagagagagaactacagcagagtggccagcagcagcagcagccccaagagccacatcatcaagcaggacatggacgtggagagaagcgtgagcgacctgtacaagatgaagcacagcgtgccccagagcctgccccagagcaactacttcaccaccctgagcaacagcgtggtgaacgagccccccagaagctaccccagcaaggaggtgagcaacatctacggcgacaagcagagcaacgccctggccgccgccgccgccaacccccagaccctgaccagcttcatcaccagcctgagcaagcccccccccctgatcaagcaccagcccgagagcgagggcctggtgggcaagatccccgagcacctgccccaccagatcgccagccacagcgtgaccaccttcagaaacgactgcagaagccccacccacctgaccgtgagcagcaccaacaccctgagaagcatgcccgccctgcacagagcccccgtgttccacccccccatccaccacagcctggagagaaaggagggcagctacagcagcctgagcccccccaccctgacccccgtgatgcccgtgaacgccggcggcaaggtgcaggagagccagaagccccccaccctgatccccgagcccaaggacagccaggccaacttcaagagcagcagcgagcagagcctgaccgagatgtggagacccaacaacaacctgagcaaggagaagaccgagtggcacgtggagaagagcagcggcaagctgcaggccgccatggccagcgtgatcgtgagacccagcagcagcaccaagaccgacagcatgcccgccatgcagctggccagcaaggacagagtgagcgagagaagcagcgccggcgcccacaagaccgactgcctgaagctggccgaggccggcgagaccggcagaatcatcctgcccaacgtgaacagcgacagcgtgcacaccaagagcgagaagaacttccaggccgtgagccagggcagcgtgcccagcagcgtgatgagcgccgtgaacaccatgtgcaacaccaagaccgacgtgatcaccagcgccgccgacaccaccagcgtgagcagctggggcggcagcgaggtgatcagcagcctgagcaacaccatcctggccagcaccagcagcgagtgcgtgagcagcaagagcgtgagccagcccgtggcccagaagcaggagtgcaaggtgagcaccaccgcccccgtgaccctggccagcagcaagaccggcagcgtggtgcagcccagcagcggcttcagcggcaccaccgacttcatccacctgaagaagcacaaggccgccctggccgccgcccagtacaagagcagcaacgccagcgagaccgagcccaacgccatcaagaaccagaccctgagcgccagcctgcccctggacagcaccgtgatctgcagcaccatcaacaaggccaacagcgtgggcaacggccaggccagccagaccagccagcccaactaccacaccaagctgaagaaggcctggctgaccagacacagcgaggaggacaagaacaccaacaagatggagaacagcggcaacagcgtgagcgagatcatcaagccctgcagcgtgaacctgatcgccagcaccagcagcgacatccagaacagcgtggacagcaagatcatcgtggacaagtacgtgaaggacgacaaggtgaacagaagaaaggccaagagaacctacgagagcggcagcgagagcggcgacagcgacgagagcgagagcaagagcgagcagagaaccaagagacagcccaagcccacctacaagaagaagcagaacgacctgcagaagagaaagggcgagatcgaggaggacctgaagcccaacggcgtgctgagcagaagcgccaaggagagaagcaagctgaagctgcagagcaacagcaacagctgccacctggtgaagaccgagtag

SEQ ID NO: 335329 - DNA, 174 bp, Artificial Sequence
  derived and/or modified sequence
atgtggaagcccatgcccagccccagcaacatgaaggccagcgccgccctgctgtgcctgctgctgaccgccgccgccttcagcccccagggcctggcccagcccgccagcagacccaactggaccagaagaagcgtgctgaccccccacagaagcggcagcagaaccctgtag

SEQ ID NO: 335330 - protein, 147 aa, Artificial Sequence [sequence omitted]

SEQ ID NO: 335331 - protein, 265 aa, Artificial Sequence
  derived and/or modified sequence
MSTSWSDRLQNAADMPANMDKHALKKYRREAYHRVFVNRSLAMEKIKCFGFDMDYTLAVYKSPEYESLGFELTVERLVSIGYPQELLSFAYDSTFPTRGLVFDTLYGNLLKVDAYGNLLVCAHGFNFIRGSQVAVQKRPETREQYPNKFIQRDDTERFYILNTLFNLPETYLLACLVDFFTNCPRYTSCETGFKDGDLFMSYRSMFQDVRDAVDWVHYKGSLKEKTVENLEKYVVKDGKLPLLLSRMKEVGKVFLATNSDYKYTD

SEQ ID NO: 335332 - protein, 199 aa, Artificial Sequence
  derived and/or modified sequence
MDYTLAVYKSPEYESLGFELTVERLVSIGYPQELLSFAYDSTFPTRGLVFDTLYGNLLKVDAYGNLLVCAHGFNFIRGSQVAVQKRPETREQYPNKFIQRDDTERFYILNTLFNLPETYLLACLVDFFTNCPRYTSCETGFKDGDLFMSYRSMFQDVRDAVDWVHYKGSLKEKTVENLEKYVVKDSKSSRIQYFLKVLW

SEQ ID NO: 335333 - protein, 174 aa, Artificial Sequence
  derived and/or modified sequence
VSIGYPQELLSFAYDSTFPTRGLVFDTLYGNLLKVDAYGNLLVCAHGFNFIRGSQVAVQKRPETREQYPNKFIQRDDTERFYILNTLFNLPETYLLACLVDFFTNCPRYTSCETGFKDGDLFMSYRSMFQDVRDAVDWVHYKGSLKEKTVENLEKYVVKDSKSSRIQYFLKVLW

SEQ ID NO: 335334 - DNA, 600 bp, Artificial Sequence
  derived and/or modified sequence
atggactacaccttggccgtgtacaaatcaccggagtacgaaagcctcggctttgagctgaccgtggagcgtctggtgagcattggttatccccaggagctgttgagcttcgcatatgactctacgtttcccacaaggggcctggtctttgatacattgtacggaaatttgttgaaggtcgacgcctacggaaacctgcttgtctgcgcgcacggattcaacttcatccgcgggtcccaagttgccgtgcaaaaaagacccgaaacccgcgaacagtatccgaataagtttatccagcgggatgataccgagaggttttatatcctgaacacactttttaatctgccagagacttatctccttgcctgtctggtagattttttcacgaattgcccacgctacacgtcctgtgaaactgggttcaaagacggggacttgtttatgtcttatagatccatgtttcaggatgtcagggatgccgttgattgggtgcactataaaggctctcttaaggagaaaactgttgagaacctggaaaagtatgtcgttaaggatagcaaaagttcacgtattcagtactttctgaaagtgctatggtag

SEQ ID NO: 335335 - DNA, 798 bp, Artificial Sequence
  derived and/or modified sequence
atgtccacctcctggagcgaccggttgcagaacgccgcagacatgcccgccaacatggacaaacatgccctaaagaaatacagaagagaggcctatcatcgcgtcttcgtgaaccggtctctcgcaatggagaagattaagtgttttggctttgacatggactacacccttgcagtgtacaagtcacccgagtacgagagccttggttttgaattgactgtggaacgcctggtttcgatcggatacccacaggagctcctcagtttcgcctatgacagtacattccccacccgcggcttggtgtttgacacactgtatggaaacttgttgaaggtggacgcctatgggaatctcctggtctgcgcacacggatttaactttattcggggatctcaggttgcagtccaaaagcgacctgagacaagggaacagtatcccaacaagttcatccaacgtgacgatacagagcgcttctacatactcaatacactgtttaacctgccggagacctatctgttggcctgtctcgttgactttttcaccaattgcccaagatatacaagctgcgaaacagggttcaaggatggggacctgttcatgagttaccgatctatgttccaagatgtgagagacgccgttgactgggtacactacaagggatccctcaaagaaaaaaccgtcgaaaacttggaaaagtatgttgtcaaagatggcaaactgccacttctgctcagtcgtatgaaagaggtgggcaaggtgtttctggcaacgaatagcgattataaatacaccgattag

SEQ ID NO: 335336 - DNA, 525 bp, Artificial Sequence
  derived and/or modified sequence
gtgtcaatcgggtacccccaggagctgctgtccttcgcttacgactccacctttccaacacgaggtctggtgtttgatacactctatggcaatctccttaaggtggatgcctacggaaatctgcttgtgtgcgcgcacggctttaatttcatccggggttcccaggtcgctgtgcaaaaacgaccagagacgagggaacaatatccaaataagtttatccagagagacgatacagagcgattttacatccttaacaccttatttaacttacccgagacctacctgctagcttgtctggtcgactttttcactaattgtccccgttacacatcatgcgaaaccgggttcaaggacggggacctctttatgagttacaggagcatgttccaggatgtgagagacgccgtggactgggtgcattacaaggggtctctgaaagagaaaacagtcgaaaaccttgagaagtacgtggtgaaggatagtaaaagtagccggatccaatactttctgaaggtgttgtggtag

SEQ ID NO: 335337 - DNA, 600 bp, Artificial Sequence
  derived and/or modified sequence
atggactacaccctggccgtgtacaagagcccagaatatgagagcctgggctttgagctgactgtggagcggctggtgtccatcggctacccccaggagctgctgagctttgcctatgacagcaccttccccacccggggcctggtgtttgacaccctgtatggcaacctgctgaaggtggatgcctacggcaacctgctggtgtgtgcccacggcttcaacttcatccggggcagccaggtggccgtgcagaagaggcctgagacccgggagcagtaccccaacaagttcatccagagagatgacacagagcgcttctacatcctgaacaccctcttcaacctgcctgagacctacctgctggcctgcctggtggacttcttcaccaactgcccccgctacaccagctgtgaaacaggcttcaaggatggagacctcttcatgagctaccgctccatgttccaggatgtgagagatgctgtggactgggtgcactacaagggcagcctgaaggagaagacagtggagaacctggagaagtatgtggtgaaggacagcaagagcagccgcatccagtacttcctgaaggtgctgtggtag

SEQ ID NO: 335338 - DNA, 798 bp, Artificial Sequence
  derived and/or modified sequence
atgagcacctcctggagcgaccggctgcagaatgctgctgacatgcctgccaacatggacaagcacgccctgaagaagtaccgccgggaggcctaccaccgggtgtttgtgaacagaagcctggccatggagaagatcaagtgctttggatttgacatggactacaccctggccgtgtacaagagcccagaatatgagagcctgggctttgagctgactgtggagcggctggtgtccatcggctacccccaggagctgctgagctttgcctatgacagcaccttccccacccggggcctggtgtttgacaccctgtatggcaacctgctgaaggtggatgcctacggcaacctgctggtgtgtgcccacggcttcaacttcatccggggcagccaggtggccgtgcagaagaggcctgagacccgggagcagtaccccaacaagttcatccagagagatgacacagagcgcttctacatcctgaacaccctcttcaacctgcctgagacctacctgctggcctgcctggtggacttcttcaccaactgcccccgctacaccagctgtgaaacaggcttcaaggatggagacctcttcatgagctaccgctccatgttccaggatgtgagagatgctgtggactgggtgcactacaagggcagcctgaaggagaagacagtggagaacctggagaagtatgtggtgaaggatggcaagctgcccctgctgctgagcaggatgaaggaggtgggcaaggtgttcctggccaccaacagcgactacaagtacacagactag

SEQ ID NO: 335339 - DNA, 525 bp, Artificial Sequence
  derived and/or modified sequence
gtgtccatcggctacccccaggagctgctgagctttgcctatgacagcaccttccccacccggggcctggtgtttgacaccctgtatggcaacctgctgaaggtggatgcctacggcaacctgctggtgtgtgcccacggcttcaacttcatccggggcagccaggtggccgtgcagaagaggcctgagacccgggagcagtaccccaacaagttcatccagagagatgacacagagcgcttctacatcctgaacaccctcttcaacctgcctgagacctacctgctggcctgcctggtggacttcttcaccaactgcccccgctacaccagctgtgagaccggcttcaaggatggagacctcttcatgagctaccgctccatgttccaggatgtgagagatgctgtggactgggtgcactacaagggcagcctgaaggagaagacagtggagaacctggagaagtatgtggtgaaggacagcaagagcagccgcatccagtacttcctgaaggtgctgtggtag

SEQ ID NO: 335340 - DNA, 600 bp, Artificial Sequence
  derived and/or modified sequence
atggactacaccctggccgtgtacaagagccccgagtacgagagcctaggatttgagttgactgtcgagcgacttgtttcaattggctacccgcaggaactgttgtcattcgcctatgactctactttccccactagaggacttgtgtttgacaccttgtatggcaacttactaaaagttgacgcatacggaaacctattggtgtgtgctcacggattcaacttcattagagggtcccaagtagccgtgcagaagaggcccgagacccgggagcagtaccctaacaaattcatccagagagatgacacggaacgtttctatattctgaatacgctgtttaatttgcccgaaacgtacctcttagcttgtctcgttgatttttttacaaactgtccaagatacaccagttgtgaaacaggcttcaaggatggcgacctctttatgtcctataggtctatgttccaagacgttagggacgctgtagactgggttcactacaaaggctcactgaaagaaaaaacggttgagaacctggagaaatacgtggtgaaagattccaagtcgtctcgcattcaatacttcctcaaggtcctgtggtag

SEQ ID NO: 335341 - DNA, 798 bp, Artificial Sequence
  derived and/or modified sequence
atgagcaccagctggagcgaccggctgcagaacgccgccgacatgcccgctaatatggacaagcatgcgctgaagaaatataggagggaggcgtatcaccgcgtgttcgttaatcggtcgctggccatggagaaaattaaatgttttgggtttgacatggattacaccctggcggtgtataagagtcctgagtacgaatccctggggtttgagctcactgttgaaaggctcgtcagcattggctatcctcaggagttgctcagctttgcgtatgactctactttcccaactcgcggacttgtctttgacacgctctatggaaatcttctgaaggtggatgcctacggaaatcttctggtctgtgcccacggctttaatttcatcaggggtagccaggtggctgtgcagaaacgtccagaaacccgggagcagtaccccaataaatttatacagcgcgatgatacggaacgattttacatcctgaacaccctattcaatctgcctgagacatatctgcttgcatgcttggtggatttttttacgaattgccctagatataccagctgcgagaccggtttcaaagacggggatctttttatgagctacagatcaatgtttcaagacgtgagagacgctgttgattgggtccactataaggggtccttaaaggaaaaaaccgtggagaacctggagaaatatgtggttaaggatggcaagctccccctgttgctgtcgcgtatgaaggaagtaggcaaggttttcctcgccacaaatagcgactacaaatacacagattag

SEQ ID NO: 335342 - DNA, 525 bp, Artificial Sequence
  derived and/or modified sequence
gtgagcatcggctacccccaggagctgctgagcttcgcctacgacagtaccttcccgacacgcggcctcgtattcgataccctttacgggaatttacttaaggtcgacgcctacgggaatttgttggtgtgcgcccatgggttcaatttcatccggggttctcaagtggccgtgcagaaacggccggagactcgagagcagtaccctaacaaatttatacaaagagacgatactgagagattttacatcctgaataccctgttcaacctgccggaaacctaccttctggcatgccttgtggacttctttaccaattgcccgagatacacttcatgcgagaccggttttaaagatggagacctgttcatgtcataccgctctatgttccaggacgtacgggacgcagttgactgggtgcattacaaggggtccctgaaggagaaaactgtggagaatttagagaaatacgtggtcaaagattccaaaagtagtcgcattcagtatttccttaaggttctctggtag

SEQ ID NO: 335343 - DNA, 600 bp, Artificial Sequence
  derived and/or modified sequence
atggattatactctggccgtgtacaaatcaccagagtacgaatctctggggttcgagctgacagtcgagcgtctggtttcaatcggttatccccaggagctactgtctttcgcctacgacagtacctttcccacccgaggcctagtgttcgatacgctgtacggcaatctcttgaaggtggatgcttatggcaatcttctggtctgtgcgcatggcttcaactttatccgcggttctcaggtggccgtgcagaaaagaccagaaactcgcgaacaatacccaaacaagtttatccaacgcgatgacacagagcgattttatatcctgaacacccttttcaatctcccagaaacgtatctgctggcctgcttagtggatttttttaccaactgcccccgttatacttcctgcgaaaccggattcaaggatggagatctgtttatgagctatcgaagcatgtttcaggatgtcagggacgctgttgactgggtgcactataaaggtagcctgaaagagaaaactgttgagaatctggagaagtacgtagttaaggattccaagtccagccggattcagtacttcctcaaagtgctctggtag

SEQ ID NO: 335344 - DNA, 798 bp, Artificial Sequence
  derived and/or modified sequence
atgagtactagttggagcgaccggctacagaatgcggcagatatgccggctaacatggataaacatgccttgaaaaaatatagaagggaggcataccaccgcgtattcgttaatcggtctttagctatggagaagatcaagtgttttggattcgatatggattacaccctcgccgtttacaaatcgccagaatatgagagcctaggcttcgagttaacagtcgaaagactcgtgagtatcggctatccgcaagagttgctctcttttgcctatgactcaactttccctaccaggggcctcgtgtttgatacactttacgggaacttactgaaagttgacgcatacgggaatctgctagtatgtgcacatggcttcaactttataaggggcagccaggtggccgtacagaagcggcctgagactcgcgagcagtatcctaacaaatttattcaacgggacgacaccgaacggttttacatattgaacaccctgtttaacctgccggaaacttatcttctggcttgcctggttgatttcttcaccaactgcccccgatatacatcatgcgagaccggatttaaagatggggacctgttcatgtcatatcgatcaatgtttcaggacgtgcgggacgccgttgactgggtgcattacaaaggttccctgaaggagaaaaccgtggagaatctggagaagtacgtggtgaaggatggaaagctgcccctgttgttaagtagaatgaaagaggtgggaaaggtctttcttgcaacaaactccgactacaaatacacggactag

SEQ ID NO: 335345 - DNA, 525 bp, Artificial Sequence
  derived and/or modified sequence
gtgtcaataggctatccccaggagctgttgagttttgcctatgatagtacattccccactaggggcttggtctttgacaccctatacggaaacctcctgaaagtggatgcttatgggaatttgctcgtgtgtgctcatggatttaacttcatcagaggttcccaagttgctgtccaaaaacggcctgagacccgggagcaatatccgaacaaatttatccagcgagacgacactgaacggttctacatcctgaacactttatttaatctcccagaaacatacctgctcgcctgcctggttgattttttcaccaactgcccccgatatacttcctgtgaaacagggttcaaggacggtgatctattcatgtcttatcgatcgatgtttcaagacgtcagagacgcagtggattgggtgcattataagggctcactcaaggagaagactgtggaaaaccttgagaaatatgtggtcaaggattctaaaagttctcgtatccaatactttctgaaggttctgtggtag

SEQ ID NO: 335346 - DNA, 839 bp, Artificial Sequence
  derived and/or modified sequence
cgcgcgttgaggcggctgcggcagttgcgcgctgggattgttgcggtgcgctggagccgaatacaaaatacagttaaaataaaatgtcaacctcctggagtgatcggttacagaatgcagcagatatgcctgctaacatggataagcatgccctgaaaaagtatcgtcgagaagcctatcatcgggtgtttgtgaaccgaagtttagcaatggaaaagataaagtgttttggttttgatatggattatacccttgctgtgtacaagtccccagagtatgagtcccttggttttgagcttactgtggagagattagtttctattggctatccccaggagttgctcagctttgcttatgattctacattccctaccaggggacttgtctttgacacactgtatggaaatcttttgaaagtcgatgcctatggaaacctcttggtctgtgcacatggatttaactttataaggggttctcaggtagctgttcagaagagaccagaaactagagaacagtatccaaataaatttatccagcgagatgatactgaaagattttacattctgaacacactattcaacctaccagagacctacctgttggcctgcctagtagatttttttactaattgtcccagatataccagttgtgaaacaggatttaaagatggggacctcttcatgtcctaccggagtatgttccaggatgtaagagatgctgttgactgggttcattacaagggctcccttaaggaaaagacagttgaaaatcttgagaagtatgtagtcaaagatagtaaaagtagcagaatacagtattttctcaaagtactgtggtaa

SEQ ID NO: 335347 - DNA, 856 bp, Artificial Sequence
  derived and/or modified sequence
agttgcgcgctgggattgttgcggtgcgctggagccgaatacaaaatacagttaaaataaaatgtcaacctcctggagtgatcggttacagaatgcagcagatatgcctgctaacatggataagcatgccctgaaaaagtatcgtcgagaagcctatcatcgggtgtttgtgaaccgaagtttagcaatggaaaagataaagtgttttggttttgatatggattatacccttgctgtgtacaagtccccagagtatgagtcccttggttttgagcttactgtggagagattagtttctattggctatccccaggagttgctcagctttgcttatgattctacattccctaccaggggacttgtctttgacacactgtatggaaatcttttgaaagtcgatgcctatggaaacctcttggtctgtgcacatggatttaactttataaggggttctcaggtagctgttcagaagagaccagaaactagagaacagtatccaaataaatttatccagcgagatgatactgaaagattttacattctgaacacactattcaacctaccagagacctacctgttggcctgcctagtagatttttttactaattgtcccagatataccagttgtgaaacaggatttaaagatggggacctcttcatgtcctaccggagtatgttccaggatgtaagagatgctgttgactgggttcattacaagggctcccttaaggaaaagacagttgaaaatcttgagaagtatgtagtcaaagatggaaaactgcctttgcttctgagccggatgaaggaagtagggaaagtatttcttgctaccaacagtgactataaatatacagat

SEQ ID NO: 335348 - DNA, 597 bp, Artificial Sequence
  derived and/or modified sequence
gtttctattggctatccccaggagttgctcagctttgcttatgattctacattccctaccaggggacttgtctttgacacactgtatggaaatcttttgaaagtcgatgcctatggaaacctcttggtctgtgcacatggatttaactttataaggggttctcaggtagctgttcagaagagaccagaaactagagaacagtatccaaataaatttatccagcgagatgatactgaaagattttacattctgaacacactattcaacctaccagagacctacctgttggcctgcctagtagatttttttactaattgtcccagatataccagttgtgaaacaggatttaaagatggggacctcttcatgtcctaccggagtatgttccaggatgtaagagatgctgttgactgggttcattacaagggctcccttaaggaaaagacagttgaaaatcttgagaagtatgtagtcaaagatagtaaaagtagcagaatacagtattttctcaaagtactgtggtaaagatttcttgttttcagtttttgtgcttcctattttcacccacctcccttatttcaagaaagaacactgaat

SEQ ID NO: 335349 - DNA, 600 bp, Artificial Sequence
  derived and/or modified sequence
atggactacaccctggccgtgtacaagagccccgagtacgagagcctgggcttcgagctgaccgtggagagactggtgagcatcggctacccccaggagctgctgagcttcgcctacgacagcaccttccccaccagaggcctggtgttcgacaccctgtacggcaacctgctgaaggtggacgcctacggcaacctgctggtgtgcgcccacggcttcaacttcatcagaggcagccaggtggccgtgcagaagagacccgagaccagagagcagtaccccaacaagttcatccagagagacgacaccgagagattctacatcctgaacaccctgttcaacctgcccgagacctacctgctggcctgcctggtggacttcttcaccaactgccccagatacaccagctgcgagaccggcttcaaggacggcgacctgttcatgagctacagaagcatgttccaggacgtgagagacgccgtggactgggtgcactacaagggcagcctgaaggagaagaccgtggagaacctggagaagtacgtggtgaaggacagcaagagcagcagaatccagtacttcctgaaggtgctgtggtag

SEQ ID NO: 335350 - DNA, 798 bp, Artificial Sequence
  derived and/or modified sequence
atgagcaccagctggagcgacagactgcagaacgccgccgacatgcccgccaacatggacaagcacgccctgaagaagtacagaagagaggcctaccacagagtgttcgtgaacagaagcctggccatggagaagatcaagtgcttcggcttcgacatggactacaccctggccgtgtacaagagccccgagtacgagagcctgggcttcgagctgaccgtggagagactggtgagcatcggctacccccaggagctgctgagcttcgcctacgacagcaccttccccaccagaggcctggtgttcgacaccctgtacggcaacctgctgaaggtggacgcctacggcaacctgctggtgtgcgcccacggcttcaacttcatcagaggcagccaggtggccgtgcagaagagacccgagaccagagagcagtaccccaacaagttcatccagagagacgacaccgagagattctacatcctgaacaccctgttcaacctgcccgagacctacctgctggcctgcctggtggacttcttcaccaactgccccagatacaccagctgcgagaccggcttcaaggacggcgacctgttcatgagctacagaagcatgttccaggacgtgagagacgccgtggactgggtgcactacaagggcagcctgaaggagaagaccgtggagaacctggagaagtacgtggtgaaggacggcaagctgcccctgctgctgagcagaatgaaggaggtgggcaaggtgttcctggccaccaacagcgactacaagtacaccgactag

SEQ ID NO: 335351 - DNA, 525 bp, Artificial Sequence
  derived and/or modified sequence
gtgagcatcggctacccccaggagctgctgagcttcgcctacgacagcaccttccccaccagaggcctggtgttcgacaccctgtacggcaacctgctgaaggtggacgcctacggcaacctgctggtgtgcgcccacggcttcaacttcatcagaggcagccaggtggccgtgcagaagagacccgagaccagagagcagtaccccaacaagttcatccagagagacgacaccgagagattctacatcctgaacaccctgttcaacctgcccgagacctacctgctggcctgcctggtggacttcttcaccaactgccccagatacaccagctgcgagaccggcttcaaggacggcgacctgttcatgagctacagaagcatgttccaggacgtgagagacgccgtggactgggtgcactacaagggcagcctgaaggagaagaccgtggagaacctggagaagtacgtggtgaaggacagcaagagcagcagaatccagtacttcctgaaggtgctgtggtag

SEQ ID NO: 335352 - protein, 153 aa, Artificial Sequence [sequence omitted]

SEQ ID NO: 335353 - DNA, 594 bp, Artificial Sequence
  derived and/or modified sequence
atgggcgagagaaagatcttcaagaagagaaagcccggcgcccagtgcgccctgggcagagaccacagcggcagcgtggtgagcgagccctgcgtgtgcgccaactgggacttcgagtgcgactacggctacgagagacacggcgagagccagtgcgtgcccgccttctggtacaaccccgccagccccagcaaggactgcagcctgggccagagctacctgaacagcaccggctacagaagaatcgtgagcaacaactgcaccgacggcctgagagagaagtacaccgccaaggcccagatgtgccccggcaaggcccccagaggcctgcacgtggtgaccaccgacggcagactggtggccgagcagggccacaacgccaccttcatcatcctgatggaggagggcgacctgcagagaaccaacatccagctggacttcggcgacggcatcgccgtgagctacgccaacttcagccccatcgaggacggcatcaagcacgtgtacaagagcgccggcatcttccaggtgaccgcctacgccgagaacaacctgggcagcgacaccgccgtgctgttcctgcacgtggtgtag

SEQ ID NO: 335354 - DNA, 462 bp, Artificial Sequence
  derived and/or modified sequence
gagaacccctacagcagcggcagaatcagcagcaaggagaccgcccccggcctggtggtggccaccggcaacatcggccccgagctgagctacaccgacatcggcgtgttcatcagcagcgacggcggcaacacctggagacagatcttcgacgaggagtacaacgtgtggttcctggactggggcggcgccctggtggccatgaagcacacccccctgcccgtgagacacctgtgggtgagcttcgacgagggccacagctgggacaagtacggcttcaccagcgtgcccctgttcgtggacggcgccctggtggaggccggcatggagacccacatcatgaccgactacggctacgagagacacggcgagagccagtgcgtgcccgccttctggtacaaccccgccagccccagcaaggactgcagcctgggccagagctacctgaacagcaccggctag

SEQ ID NO: 335355 - DNA, 594 bp, Artificial Sequence
  derived and/or modified sequence
atgggggagcggaagatcttcaagaagaggaaacctggcgcccagtgcgccctggggagagatcactcaggcagcgttgtctccgaaccctgtgtgtgtgctaactgggacttcgagtgcgattacggttacgagcgccacggtgagagccagtgcgtgcccgctttttggtacaaccccgcatctccatctaaggactgttctctcggtcagtcatacctgaattctaccgggtacagacggatagtgagcaacaattgcacagacggactgagagagaagtataccgcaaaagcgcaaatgtgtcccgggaaagctcctcggggcttgcacgtagtgacaaccgatggccgcctggtagcggaacaggggcataacgcaaccttcataattctgatggaagagggggacctgcagcgcaccaacattcaactagatttcggggacggaatcgctgtgagttacgccaacttttcccccatcgaagacggaatcaaacacgtatataagagcgcaggcatcttccaagtgactgcttacgccgagaacaaccttgggagcgacaccgccgtgctgttcctgcatgtggtgtag

SEQ ID NO: 335356 - DNA, 462 bp, Artificial Sequence
  derived and/or modified sequence
gagaacccctattcaagcggccgcatcagcagtaaagagaccgcgcccggtctggtggtggccaccggtaacattgggcctgagctatcctacactgacatcggggtttttatttcctccgacggcggcaacacttggcggcagatttttgacgaggagtataatgtatggttcttggattgggggggtgcactcgttgctatgaaacacaccccactgccagttcgccatctttgggtgagcttcgacgaggggcacagttgggacaagtatggtttcactagtgtacccctttttgtcgatggagccctggtcgaggccggcatggagactcatattatgaccgactatggctatgaacgtcacggcgagagtcagtgtgttccagcgttctggtataaccctgcgtctccctccaaagattgcagtttgggtcagtcctaccttaacagtacgggatag

SEQ ID NO: 335357 - DNA, 594 bp, Artificial Sequence
  derived and/or modified sequence
atgggagagaggaagatcttcaagaagaggaagccaggggcccagtgtgccctgggccgggaccacagcggctctgtggtgtctgagccctgtgtgtgtgccaactgggactttgaatgtgactatggctatgaaagacatggagagagccagtgtgtgcctgccttctggtacaacccagccagccccagcaaggactgcagcctgggccagagctacctgaacagcacaggctaccgccgcatcgtgagcaacaactgcacagatggcctgcgggagaagtacacagccaaggcccagatgtgccctgggaaggccccccggggcctgcacgtggtgaccacagatggccgcctggtggccgagcagggccacaatgccaccttcatcatcctgatggaggagggggacctgcagaggaccaacatccagctggactttggagatggcattgctgtgtcctatgccaacttcagccccattgaagatggcatcaagcacgtgtacaagtctgctggcatcttccaggtgacagcctatgcagagaacaacctgggcagtgacacagctgtgctcttcctgcacgtggtgtag

SEQ ID NO: 335358 - DNA, 462 bp, Artificial Sequence
  derived and/or modified sequence
gaaaacccctacagcagcggccgcatcagcagcaaggagacagcccctggcctggtggtggccaccggcaacatcggccctgagctgagctacacagacatcggggtcttcatcagcagtgatggcggcaacacctggaggcagatctttgatgaggagtacaacgtgtggttcctggactggggcggggccctggtggccatgaagcacacccccctgcctgtgcgccacctgtgggtgtcctttgatgagggccacagctgggacaagtatggcttcacctctgtgcccctgtttgtggatggagccctggtggaggccggcatggagacccacatcatgacagattatggctatgagcggcacggggagagccagtgtgtgcctgccttctggtacaacccagccagccccagcaaggactgcagcctgggccagagctacctgaacagcactggatag

SEQ ID NO: 335359 - DNA, 594 bp, Artificial Sequence
  derived and/or modified sequence
atgggcgagcggaagatcttcaagaagcggaagcccggcgcccagtgcgctctcgggagggaccatagcggaagtgtggtttcagagccatgcgtgtgcgctaattgggactttgaatgcgactacggctatgaacggcacggagaaagtcagtgtgtgcctgccttctggtacaaccccgcgtcgcctagtaaggactgtagcctcgggcagtcatacttaaattccacgggctatcgcagaatcgtgagcaataattgcaccgacggcctcagagaaaagtacactgccaaagcccaaatgtgccccgggaaggcacctcggggtcttcacgtggtaacaacagatgggagactggtggcagagcagggacataacgcaacatttattatcttgatggaggagggtgacctgcaacggactaacatacagctcgatttcggcgacggaattgccgttagctatgctaacttttcacccatcgaggacggaatcaagcatgtctacaagagtgccgggatttttcaggtcactgcctatgccgaaaacaatttaggaagcgacactgccgttttattcttgcacgttgtttag

SEQ ID NO: 335360 - DNA, 462 bp, Artificial Sequence
  derived and/or modified sequence
gagaacccctacagcagcggccggatcagcagcaaggagaccgcccctggactcgtggttgcaacagggaacatcgggcccgagttgagctacacagacataggtgtattcattagcagtgacggaggaaacacgtggcgacagatattcgatgaagagtataatgtgtggtttctcgattggggcggcgccttggtggctatgaagcatacaccgctgcccgtgcggcacctgtgggtgtctttcgacgagggccattcttgggataaatacggcttcaccagcgtgcctttgtttgtggacggagcactggtggaagccggaatggagacacatattatgactgactatggttacgaacggcacggggaaagtcagtgcgtgcctgcattctggtataatccagcttcaccaagcaaggactgcagcctgggacaaagctacctgaactcaaccggttag

SEQ ID NO: 335361 - DNA, 594 bp, Artificial Sequence
  derived and/or modified sequence
atgggagaaagaaagattttcaaaaagagaaaacccggagctcaatgcgccttgggcagggaccactccggctcagtggtgagcgagccctgcgtctgcgctaattgggatttcgaatgcgattacgggtatgaaagacacggagagagtcaatgcgtgcctgctttctggtacaaccctgcttcaccaagtaaggactgtagcctgggacagtcgtatctgaatagcaccgggtacaggcggattgtgtccaacaattgcaccgacggactgcgtgagaagtacaccgcaaaggcacagatgtgtcccggaaaagcgcctagaggcctgcatgtcgtgaccactgatgggcgtcttgtcgccgagcagggccacaacgcaaccttcatcattctgatggaggagggagacctgcagaggacaaatattcagcttgacttcggggacgggattgctgtgtcttatgctaacttctcacccatcgaggacggcattaaacatgtgtacaagagcgcagggattttccaggtcaccgcctacgctgaaaataatcttggaagcgacacggcggtcctgttcctccacgttgtgtag

SEQ ID NO: 335362 - DNA, 462 bp, Artificial Sequence
  derived and/or modified sequence
gaaaacccttattcctcgggccgaatttcatctaaggagaccgcccctgggctggtagtggcaactgggaacattggcccagagttgtcctatacagatattggagtctttatctcttctgacggagggaatacatggcgccaaatattcgatgaagaatataacgtgtggttcctcgactgggggggtgcactggtggctatgaaacatacccccctacccgtgcgacatctgtgggtcagcttcgacgagggacacagttgggacaagtacggttttacatccgtccccctattcgtagacggagcactggtggaggcgggtatggagacacacataatgactgattacggttatgagcggcacggtgagtctcagtgtgttcccgctttttggtataacccggcttcacctagtaaagattgcagcctgggccagtcatacttaaattccactggatag

SEQ ID NO: 335363 - DNA, 458 bp, Artificial Sequence
  derived and/or modified sequence
gaaaatccatattcctcaggaagaatctctagcaaggagacagccccaggacttgtggtggctacaggcaacattggcccggagctctcatatactgatattggtgtgttcatctcctccgatgggggcaacacatggagacagatctttgatgaagagtacaatgtctggttcctagactggggtggtgccctcgtggccatgaaacacacacctctgccagtcaggcatttgtgggtgagttttgatgagggccactcttgggacaagtatggtttcacttcggttcctctctttgttgacggggctctggtggaggcaggaatggagacccacatcatgactgactatgggtatgagagacatggggagagccagtgtgtcccagctttctggtacaatccagcatccccatcaaaggactgcagccttggtcaaagctaccttaacagcactgg

SEQ ID NO: 335364 - DNA, 1209 bp, Artificial Sequence
  derived and/or modified sequence
atggacctggacagagccagcctggacctgatgatcagactgctggagctggagcaggacgccagcagcgccaagctgctgaacgagaaggacatgaacaagatcaaggagaagatcagaagactgtgcgagaccgtgcacaacaagcacctggacctggagaacatcaccaccggccacctggccatggagaccctgctgagcctgaccagcaagagagccggcgactggttcaaggaggagctgagactgctgggcggcctggaccacatcgtggacaaggtgaaggagtgcgtggaccacctgagcagagacgaggacgaggagaagctggtggccagcctgtggggcgccgagagatgcctgagagtgctggagagcgtgaccgtgcacaaccccgagaaccagagctacctgatcgcctacaaggacagccagctgatcgtgagcagcgccaaggccctgcagcactgcgaggagctgatccagcagtacaacagagccgaggacagcatctgcctggccgacagcaagcccctgccccaccagaacgtgaccaaccacgtgggcaaggccgtggaggactgcatgagagccatcatcggcgtgctgctgaacctgaccaacgacaacgagtggggcagcaccaagaccggcgagcaggacggcctgatcggcaccgccctgaactgcgtgctgcaggtgcccaagtacctgccccaggagcagagattcgacatcagagtgctgctgttcctggagagagagagagccgcccagctggccgagagcaagaccgacgagctgatcaaggacgcccccaccacccagcacgacaagagcggcgagtggcaggagaccagcggcgagatccagtgggtgagcaccgagaagaccgacggcaccgaggagaagcacaagaaggaggaggaggacgaggagctggacctgaacaaggccctgcagcacgccggcaagcacatggaggactgcatcgtggccagctacaccgccctgctgctgggctgcctgtgccaggagagccccatcaacgtgaccaccgtgagagagtacctgcccgagggcgacttcagcatcatgaccgagatgctgaagaagttcctgagcttcatgaacctgacctgcgccgtgggcaccaccggccagaagagcatcagcagagtgatcgagtacctggagcactgctag

SEQ ID NO: 335365 - DNA, 1209 bp, Artificial Sequence
  derived and/or modified sequence
atggatctggatagagccagtctggaccttatgatcagattgctcgagctcgagcaggacgccagtagtgcaaaattgctcaacgagaaagacatgaataaaataaaggagaagatccgccgcctgtgtgagacagttcataacaagcatctagatcttgagaacatcaccacaggccatttggccatggagacgttactctccctgacctcaaagcgtgctggcgactggttcaaggaggagttgaggctgctcggcggactagaccacatcgttgacaaagtgaaagagtgcgtggatcatctgtcaagagacgaggacgaggagaaactggtcgccagcctttggggtgccgagcgttgcctgcgggtcctggaaagcgtgaccgttcacaacccggagaatcagtcgtatctgatagcatataaggattcccagctaatagtgtcctccgctaaggctctgcagcattgcgaggaactgatacagcagtataaccgagctgaggatagcatctgcttggccgactccaaacctctgccgcaccaaaacgtgacaaaccacgtgggtaaggccgtagaagattgcatgcgtgcaatcattggggtactcctgaatctgaccaacgacaacgaatgggggagcacaaaaacaggggagcaagacggattgattggcaccgccctgaattgcgtgctgcaagttcctaaatatctcccccaggagcagaggtttgatatcagggtgttgctgttcctcgagagggagagggcagctcagctggccgagtctaaaaccgatgaactgattaaggatgccccaaccacgcagcatgataagagcggtgaatggcaagagacatcaggtgaaatccaatgggtttcaacggaaaagacagatggtaccgaagagaagcacaaaaaggaggaagaagacgaggaattggatctcaataaagcactccagcacgcaggcaagcatatggaggactgcatagtggcgagctacacggcactcttgttgggctgtctctgccaggagagccccataaatgtgacaacggtacgcgagtacctacctgaaggtgatttcagcattatgacggagatgcttaagaagttcctctccttcatgaacttgacttgcgccgtgggcacaactggacagaagagtattagccgcgtgatcgagtacttagaacactgctag

SEQ ID NO: 335366 - DNA, 1209 bp, Artificial Sequence
  derived and/or modified sequence
atggacctcgatagagcatctctcgacctgatgatccggctccttgagcttgagcaagacgccagctccgctaagcttctgaacgaaaaagatatgaataagattaaagagaagatacgcaggctctgcgagactgtgcataacaagcacctggaccttgagaacattactactgggcatctggctatggagactctgttgagcttaacgtctaagcgggccggggattggtttaaagaagagttgcggctactgggcggcctggaccacattgttgataaggtgaaggagtgcgtggatcatctcagtagagacgaggacgaagagaaactggtggctagcttgtggggagccgaacgttgtctccgcgtgctggagagtgtaacagtacacaatcccgaaaatcagtcctaccttattgcgtataaagattcccaactgatcgtgtccagcgctaaggccctgcagcattgcgaagagctgatccagcagtacaatcgggccgaggactctatctgtctggccgactcaaagcccttgccgcaccagaacgtgacaaaccatgtggggaaggcagtagaagactgcatgagggccattattggcgtgctattaaacctcacaaatgacaacgagtgggggtcgaccaagactggagagcaggacggattgatcggtaccgcgttgaattgtgtgcttcaggttccgaagtaccttccacaggaacaacgcttcgacatcagggtgctcctgtttctggaaagagagagagcagcccaactggcagaatctaaaaccgacgagctcatcaaggacgcccctacaactcagcatgacaagtccggggagtggcaggagactagtggggagattcaatgggtaagcaccgagaagaccgatggcacagaggagaagcacaagaaggaagaggaggatgaagagcttgatcttaataaagctcttcagcatgcaggtaagcacatggaagactgtatcgtggcttcttacacagccctcctgctggggtgtctatgtcaagaaagtcccattaatgttaccacggtcagagaatatttgcctgaaggcgatttttccatcatgactgagatgctcaagaaattcctgtctttcatgaatctgacttgtgccgtcggcacgaccggacaaaagtcaattagcagggtcatcgaatacctcgaacattgctag

SEQ ID NO: 335367 - DNA, 1209 bp, Artificial Sequence
  derived and/or modified sequence
atggacctggaccgggccagcctggacctgatgatccggctgctggagctggagcaggatgccagcagcgccaagctgctgaatgagaaggacatgaacaagatcaaggagaagatccggcggctgtgtgaaacagtgcacaacaagcacctggacctggagaacatcaccaccggccacctggccatggagaccctgctgagcctgaccagcaagagagctggggactggttcaaggaggagctgcggctgctgggcggcctggaccacatcgtggacaaggtgaaggaatgtgtggaccacctgagcagagatgaagatgaggagaagctggtggccagcctgtggggcgctgagcgctgcctgcgggtgctggagagcgtgacagtgcacaaccctgagaaccagagctacctgattgcctacaaggacagccagctgattgtgtcctctgccaaggccctgcagcactgtgaggagctgatccagcagtacaacagagcagaagattccatctgcctggccgacagcaagcccctgccccaccagaatgtgaccaaccacgtgggcaaggctgtggaggactgcatgagggccatcattggagtgctgctgaacctgaccaatgacaatgagtggggcagcaccaagacaggagagcaggacggcctgattggaacagccctgaactgtgtgctgcaggtgcccaagtacctgccccaggagcagagatttgacatccgggtgctgctcttcctggagcgggagcgggccgcccagctggccgagagcaagacagatgagctgatcaaggatgcccccaccacccagcacgacaagtctggagagtggcaggagaccagcggggagatccagtgggtgtccacagagaagacagatggaacagaggagaagcacaagaaggaggaggaggatgaggagctggacctgaacaaggccctgcagcacgccggcaagcacatggaggactgcatcgtggccagctacacagccctgctgctgggctgcctgtgccaggagagccccatcaacgtgaccaccgtgcgggagtacctgcctgagggggacttcagcatcatgacagagatgctgaagaagttcctgtccttcatgaacctgacctgtgctgtgggcaccaccggccagaagagcatcagcagggtcatcgagtacctggagcactgctag

SEQ ID NO: 335368 - DNA, 1209 bp, Artificial Sequence
  derived and/or modified sequence
atggacctggaccgggccagcctggacctgatgatccggctgctggaactggaacaggacgcctcatcagcaaagctcctgaacgagaaggacatgaacaagataaaggaaaaaattcgacggctgtgcgaaactgtccacaacaagcatctggacctggaaaatattaccaccggtcacctggcgatggagactctgttgtctttgaccagcaagagagctggggattggttcaaagaagagttgcgcctgctgggggggttagaccacattgtggataaggtgaaagaatgcgtggaccacctctcaagggacgaagatgaggagaaactagtggccagtctttggggagctgagcgctgtctgcgcgttctggagtcagtgactgtgcacaaccccgagaaccaatcgtatctcatagcctacaaggactcccagctcattgtaagctcggctaaggccctgcagcattgtgaggagcttatccaacagtacaatagggctgaggacagtatttgtctggcggattctaagccactgccgcatcagaacgtcacgaaccatgtcggaaaagccgtggaagattgcatgagggccattatcggagtcctgctgaaccttacgaatgacaatgaatggggttctacgaagactggggagcaagacggtctgattggtaccgcgttgaattgtgtgttgcaggtacctaaatacctgccccaggaacagcgctttgatataagggtgctgctgtttttggagcgggaaagggccgcgcaactagccgagagtaaaaccgacgagttgataaaagatgcccctaccacacagcacgacaaaagtggtgagtggcaagagacatcaggcgaaatacagtgggtctccacagaaaaaactgatggtaccgaggaaaaacacaagaaggaagaggaggatgaggagttggatttgaataaggccctccagcacgctggtaagcatatggaagattgcatcgttgctagctacactgctcttttgctagggtgtttatgtcaggagtcccctattaacgtgacgacggtacgcgagtacctgcccgaaggcgacttttcaatcatgactgaaatgctaaagaaattcctcagttttatgaacctgacatgcgccgtaggcactacgggccagaagagcatctctagggtgatcgagtacttggagcattgctag

SEQ ID NO: 335369 - DNA, 1209 bp, Artificial Sequence
  derived and/or modified sequence
atggacctggaccgggccagcctggacctgatgatccggctgctggaactggagcaggatgcctcatcggctaaactgctaaatgaaaaggacatgaataaaatcaaggagaagattcgcagattatgtgaaaccgtacataacaagcacctcgacctcgagaacattaccaccggtcacctcgccatggagaccctgctgtcacttaccagcaagagggctggcgattggttcaaagaagagttaagattgctgggcggtcttgatcacatcgttgataaagtgaaggaatgtgtggatcatctctccagagatgaggacgaagagaagttggtggccagcctgtggggggccgagaggtgcctcagagtgttggagtccgtgacggtccataatcccgagaaccagagctacctgatagcgtataaagactcccaactcatagttagctcagctaaagcgctccagcattgtgaagagctcatccagcagtataacagagcagaggactcaatctgcctggcagactctaagccccttccccaccagaatgtgacaaatcatgttggtaaggctgtggaggactgcatgagagcgatcataggcgtgctcttgaatcttacaaacgacaacgagtggggatctaccaagacaggcgaacaggatggcttgatcgggaccgcacttaattgcgttctgcaggttcccaagtacctgccgcaggagcagaggttcgacatccgagtgctgctatttctggaacgagagagggccgctcaactcgcagagagcaaaactgatgaactcatcaaggatgcaccaacgacacagcacgataagtctggagagtggcaggaaacaagtggggagattcagtgggtgagcacagagaaaacagatggcacagaggagaagcacaaaaaggaggaggaggacgaggaattggatctaaataaagctctccaacacgctggcaagcatatggaagattgcattgtggcgtcttacactgccctgctgttggggtgcctatgtcaggaatcacccattaacgtaacaacggtgagggagtatctgcctgaaggggacttcagtattatgactgagatgctgaaaaagtttctgtcgttcatgaacctcacctgcgccgtcggcacaaccggacagaagtccatttccagagtcatcgaatatctcgagcactgctag

SEQ ID NO: 335370 - DNA, 1209 bp, Artificial Sequence
  derived and/or modified sequence
atggatctcgaccgggcatctttggacctgatgatcagactgttggagctggaacaggacgcttcatccgcaaagcttttaaacgaaaaggacatgaacaaaattaaggagaagattaggagactttgtgaaaccgtgcacaataaacatctggaccttgaaaacattactacagggcatctcgccatggagaccttgctctctctgacatccaagagagcaggtgattggtttaaagaggaattacgattgctggggggactcgaccacattgtggacaaagttaaggagtgcgtggatcacctgagccgggacgaagatgaagagaaactagttgcttccctttggggggcagaaaggtgcttgagagtgctcgagtcagtgactgtgcacaatccggaaaaccagtcatacctcatagcctacaaggatagtcagttgatcgtttcctctgccaaggccctgcagcactgcgaagagctaatccagcagtataacagggctgaggattcaatttgccttgctgatagtaaacctctgccccaccagaacgtcaccaatcatgtcggcaaagccgtggaagattgtatgagagcaattatcggcgtcttacttaacctgactaatgacaacgaatggggatctacaaagacaggagaacaggacggattaatcgggaccgctctgaactgtgtgctccaggtgcctaaatatttgcctcaggaacagcggttcgacatcagggttctactgtttctggagagagaacgcgcagctcaattggccgaaagcaagacggacgagctaatcaaagatgctccaaccacacagcacgataaatcgggggagtggcaggaaacgtcgggagagattcaatgggtgagtactgaaaagacggatgggactgaagagaagcacaaaaaggaggaggaagacgaggaattggacctgaacaaagcactacagcatgccggtaagcatatggaagattgcattgtggcttcctatactgccttgctccttggctgtctatgccaggagagccctataaacgtcaccaccgtaagagagtacctaccggagggcgattttagtattatgactgagatgctcaaaaagttcctctctttcatgaatctcacatgtgctgtcgggacaacaggccagaagagcatttcgagggtaatcgaatatctggaacactgctag

SEQ ID NO: 335371 - DNA, 1209 bp, Artificial Sequence
  derived and/or modified sequence
atggatctggacagagcatcactggatttaatgattagactgctggaattggaacaggatgcttcttccgccaaactgctaaacgaaaaggacatgaacaaaatcaaggagaaaatccgccgactgtgtgaaacagttcacaataagcatctggacctggaaaatatcactaccggacacctcgctatggagacacttctaagcctcactagtaaaagagctggcgattggttcaaggaggagctccgtttgctgggcggattggaccatattgtggataaagttaaggagtgcgtggaccacctgagcagagacgaagatgaggagaagttggtggcaagcctatggggcgctgaacggtgtctgcgcgtgctggaatcggtgaccgtgcataaccccgagaaccagtcctatctcatagcttataaggactcccaactcattgtaagcagcgcaaaagcactgcagcactgcgaagaattgatccagcaatacaacagagcagaggatagtatctgcctggcagactccaaaccactacctcatcaaaacgtcactaaccacgtcgggaaagccgtagaggattgcatgagagcaatcataggtgttctcctgaatctgacaaacgataacgagtggggcagtactaaaaccggcgagcaagacgggctgataggaactgccttgaattgcgtgctgcaggttccaaagtatttgcctcaggaacaacggttcgatatcagagtcttgctgtttctagagcgagagagggctgctcagctggcagagagtaagacagatgaactgatcaaagatgcaccgaccacacagcacgataaaagcggtgaatggcaggagacatccggagagatccagtgggtgtccacagagaagaccgatggtacagaggagaaacacaaaaaggaagaagaggacgaggagcttgaccttaacaaggctctgcagcatgcgggaaaacatatggaagactgtatcgtggctagctacaccgccttgttactgggttgcttgtgtcaggaaagccccataaacgtgacgacagtaagagagtacttgcctgaaggcgatttcagtatcatgacggaaatgctaaaaaagttcctctcttttatgaacctcacctgcgccgtgggcacaaccggtcagaaatctatctcgagggttattgagtatttagaacattgttag

SEQ ID NO: 335372 - DNA, 1814 bp, Artificial Sequence
  derived and/or modified sequence
gattcccagcaccatcagaatctgtccctctgtacagctgccctcatgtatatactgagtagagatcgtttgaacatggatcttgatagagctagcttagatctaatgattcgacttttggaactggaacaagatgcttcatcagccaagctactgaatgaaaaagacatgaacaaaattaaagaaaaaatccgaaggctctgtgaaactgtacacaacaagcatcttgatctagaaaatataacgactgggcatttagctatggagacattattatcccttacttctaaacgagcaggagactggtttaaagaagaactccggcttttgggtggtctggatcatattgtagataaagtaaaagaatgtgtggatcatttaagtagagatgaggatgaagagaaactggtagcctcactatggggagcagagagatgtttacgagttttagaaagtgtaactgtgcataatcccgaaaatcaaagctacttgatagcatataaagattcccaacttattgtttcatcagctaaagcattacagcattgtgaagaactgattcagcagtacaaccgtgctgaggacagcatatgcttagctgacagtaagcctctgcctcaccagaatgtaactaaccatgtaggcaaagcagtggaggactgcatgagggccatcatcggggtgttgcttaatttaactaatgataatgagtggggcagcaccaaaacaggagagcaggacggtctcataggcacagcgctgaactgtgtgcttcaggttccaaagtacctacctcaggagcagagatttgatattcgagtgctgctattccttgagcgagagcgggcagcccagctagcagaaagtaaaacagatgagttgatcaaagatgctcccaccactcagcatgataagagtggagagtggcaagaaacaagtggagaaatacagtgggtgtcaactgaaaagactgatggtacagaagagaaacataagaaggaggaggaggatgaagaacttgacctcaataaagcccttcagcatgccggcaaacacatggaggattgcattgtggcctcctacacagcactacttcttgggtgtctctgccaggaaagtccaatcaatgtaaccactgtgcgggaatatctgccagaaggagacttttcaataatgacagagatgctcaaaaaatttttgagttttatgaatctcacttgtgctgttggaacaactggccagaaatctatctctagagtgattgaatatttggaacattgctagctgctttacctttgcttcaggtgctcggtaatgctggagctatccttagacaaagaaaagtcaagtcatgaaagaagtccttgaagatataccaagaacattcatcagtatcattcgtgtttggatttttaaggccacctgatttcttcgtcatgcattcggcatttgctaaatgacagttactacatcaatctgcaactatcaaaaatgaggggaaaaggttcaggctgttaacaattccatgcagtatttaaatacatttactttggcagagtttataccctccccttgttttcttgctttattctgggcaagtttgaaggggaaaatttgtgctgctgttagtgcaactgctgtgtatgttgagccactgttgtcatgccagccaggtgcaaaggcagcttagctactgaggtagcgaatgttctgaggacattctagacaacagcttagttcctttttcaggctcatttgcttttgcttttttgttgaatgattccaatcgtaaataaagcttttaataattttgt

SEQ ID NO: 335373 - DNA, 1801 bp, Artificial Sequence
  derived and/or modified sequence
agaatctgtccctctgtacagctgccctcatgtatatactgagtagagatcgtttgaacatggatcttgatagagctagcttagatctaatgattcgacttttggaactggaacaagatgcttcatcagccaagctactgaatgaaaaagacatgaacaaaattaaagaaaaaatccgaaggctctgtgaaactgtacacaacaagcatcttgatctagaaaatataacgactgggcatttagctatggagacattattatcccttacttctaaacgagcaggagactggtttaaagaagaactccggcttttgggtggtctggatcatattgtagataaagtaaaagaatgtgtggatcatttaagtagagatgaggatgaagagaaactggtagcctcactatggggagcagagagatgtttacgagttttagaaagtgtaactgtgcataatcccgaaaatcaaagctacttgatagcatataaagattcccaacttattgtttcatcagctaaagcattacagcattgtgaagaactgattcagcagtacaaccgtgctgaggacagcatatgcttagctgacagtaagcctctgcctcaccagaatgtaactaaccatgtaggcaaagcagtggaggactgcatgagggccatcatcggggtgttgcttaatttaactaatgataatgagtggggcagcaccaaaacaggagagcaggacggtctcataggcacagcgctgaactgtgtgcttcaggttccaaagtacctacctcaggagcagagatttgatattcgagtgctgctattccttgagcgagagcgggcagcccagctagcagaaagtaaaacagatgagttgatcaaagatgctcccaccactcagcatgataagagtggagagtggcaagaaacaagtggagaaatacagtgggtgtcaactgaaaagactgatggtacagaagagaaacataagaaggaggaggaggatgaagaacttgacctcaataaagcccttcagcatgccggcaaacacatggaggattgcattgtggcctcctacacagcactacttcttgggtgtctctgccaggaaagtccaatcaatgtaaccactgtgcgggaatatctgccagaaggagacttttcaataatgacagagatgctcaaaaaatttttgagttttatgaatctcacttgtgctgttggaacaactggccagaaatctatctctagagtgattgaatatttggaacattgctagctgctttacctttgcttcaggtgctcggtaatgctggagctatccttagacaaagaaaagtcaagtcatgaaagaagtccttgaagatataccaagaacattcatcagtatcattcgtgtttggatttttaaggccacctgatttcttcgtcatgcattcggcatttgctaaatgacagttactacatcaatctgcaactatcaaaaatgaggggaaaaggttcaggctgttaacaattccatgcagtatttaaatacatttactttggcagagtttataccctccccttgttttcttgctttattctgggcaagtttgaaggggaaaatttgtgctgctgttagtgcaactgctgtgtatgttgagccactgttgtcatgccagccaggtgcaaaggcagcttagctactgaggtagcgaatgttctgaggacattctagacaacagcttagttcctttttcaggctcatttgcttttgcttttttgttgaatgattccaatcgtaaataaagcttttaataattttgtgaa

SEQ ID NO: 335374 - protein, 18 aa, Artificial Sequence
  derived and/or modified sequence
TSPPDSSVIVTLLDQAAK

SEQ ID NO: 335375 - DNA, 3587 bp, Artificial Sequence
  derived and/or modified sequence
gcatctcctcctccctctccccgggctcctactggcctgaggttgagggcggctgggggctcggggcaggctccgcggcgttcccctccccaccccggccctccgttcagccgcgctcctccggggctgcggttcctactgcgcgagctgccagtggattcgctcttttcctccgtccgtggcccgcctgggcggccttgttctttccgcagcagccagataaccttctgttcggtgatgaaattatcactaatggttttcattcctgtgaaagtgatgaggaggatagagcctcacatgcaagctctagtgactggactccaaggccacggataggtgtctgtttcatgtggaatacctgacttcaggtcaagggatggtatttatgctcgccttgctgtagacttcccagatcttccagatcctcaagcgatgtttgatattgaatatttcagaaaagatccaagaccattcttcaagtttgcaaaggaaatatatcctggacaattccagccatctctctgtcacaaattcatagccttgtcagataaggaaggaaaactacttcgcaactatacccagaacatagacacgctggaacaggttgcgggaatccaaaggataattcagtgtcatggttcctttgcaacagcatcttgcctgatttgtaaatacaaagttgactgtgaagctgtacgaggagatatttttaatcaggtagttcctcgatgtcctaggtgcccagctgatgaaccgcttgctatcatgaaaccagagattgtgttttttggtgaaaatttaccagaacagtttcatagagccatgaagtatgacaaagatgaagttgacctcctcattgttattgggtcttccctcaaagtaagaccagtagcactaattccaagttccataccccatgaagtgcctcagatattaattaatagagaacctttgcctcatctgcattttgatgtagagcttcttggagactgtgatgtcataattaatgaattgtgtcataggttaggtggtgaatatgccaaactttgctgtaaccctgtaaagctttcagaaattactgaaaaacctccacgaacacaaaaagaattggcttatttgtcagagttgccacccacacctcttcatgtttcagaagactcaagttcaccagaaagaacttcaccaccagattcttcagtgattgtcacacttttagaccaagcagctaagagtaatgatgatttagatgtgtctgaatcaaaaggttgtatggaagaaaaaccacaggaagtacaaacttctaggaatgttgaaagtattgctgaacagatggaaaatccggatttgaagaatgttggttctagtactggggagaaaaatgaaagaacttcagtggctggaacagtgagaaaatgctggcctaatagagtggcaaaggagcagattagtaggcggcttgatggtaatcagtatctgtttttgccaccaaatcgttacattttccatggcgctgaggtatattcagactctgaagatgacgtcttatcctctagttcttgtggcagtaacagtgatagtgggacatgccagagtccaagtttagaagaacccatggaggatgaaagtgaaattgaagaattctacaatggcttagaagatgagcctgatgttccagagagagctggaggagctggatttgggactgatggagatgatcaagaggcaattaatgaagctatatctgtgaaacaggaagtaacagacatgaactatccatcaaacaaatcatagtgtaataattgtgcaggtacaggaattgttccaccagcattaggaactttagcatgtcaaaatgaatgtttacttgtgaactcgatagagcaaggaaaccagaaaggtgtaatatttataggttggtaaaatagattgtttttcatggataatttttaacttcattatttctgtacttgtacaaactcaacactaacttttttttttttaaaaaaaaaaaggtactaagtatcttcaatcagctgttggtcaagactaactttcttttaaaggttcatttgtatgataaattcatatgtgtatatataattttttttgttttgtctagtgagtttcaacatttttaaagttttcaaaaagccatcggaatgttaaattaatgtaaagggaacagctaatctagaccaaagaatggtattttcacttttctttgtaacattgaatggtttgaagtactcaaaatctgttacgctaaacttttgattctttaacacaattatttttaaacactggcattttccaaaactgtggcagctaactttttaaaatctcaaatgacatgcagtgtgagtagaaggaagtcaacaatatgtggggagagcactcggttgtctttacttttaaaagtaatacttggtgctaagaatttcaggattattgtatttacgttcaaatgaagatggcttttgtacttcctgtggacatgtagcaatgtctatattggctcataaaactaacctgaaaaacaaataaatgctttggaaatgtttcagttgctttagaaacattagtgcctgcctggatccccttagttttgaaatatttgccattgttgtttaaatacctatcactgtggtagagcttgcattgatcttttccacaagtattaaactgccaaaatgtgaatatgcaaagcctttctgaatctataataatggtacttctactggggagagtgtaatattttggactgctgttttccattaatgaggagagcaacaggcccctgattatacagttccaaagtaataagatgttaattgtaattcagccagaaagtacatgtctcccattgggaggatttggtgttaaataccaaactgctagccctagtattatggagatgaacatgatgatgtaacttgtaatagcagaatagttaatgaatgaaactagttcttataatttatctttatttaaaagcttagcctgccttaaaactagagatcaactttctcagctgcaaaagcttctagtctttcaagaagttcatactttatgaaattgcacagtaagcatttatttttcagaccatttttgaacatcactcctaaattaataaagtattcctctgttgctttagtatttattacaataaaaagggtttgaaatatagctgttctttatgcataaaacacccagctaggaccattactgccagagaaaaaaatcgtattgaatggccatttccctacttataagatgtctcaatctgaatttatttggctacactaaagaatgcagtatatttagttttccatttgcatgatgtttgtgtgctatagatgatattttaaattgaaaagtttgttttaaattatttttacagtgaagactgttttcagctctttttatattgtacatagtcttttatgtaatttactggcatatgttttgtagactgtttaatgactggatatcttccttcaacttttgaaatacaaaaccagtgttttttacttgtacactgttttaaagtctattaaaattgtcatttgacttttttctgttaactt

SEQ ID NO: 335376 - protein, 191 aa, Artificial Sequence
  derived and/or modified sequence
  misc_feature (1)..(1): Xaa can be any naturally occurring amino acid
XFSSQLAVNVSETSQANDQVGYSRNTSSVSPRGYVPSSTPQQSNYNTVSTSMNGYGSGAMASLGVPGSPGFLNGSSANSPYGIVPSSPTMAASSVTLPSNCSSTHGIFSFSPANVISAVKQKSAFAPVVRPQASPPPSCTSANGNGLQGSLLGAEDVAAEKTNWPFCEVGGIFHFDELMLKKGTGKLCLGW

SEQ ID NO: 335377 - DNA, 576 bp, Artificial Sequence
  derived and/or modified sequence
tagttttccagccaacttgccgtcaacgtcagtgagacaagccaggctaatgaccaggtggggtatagcagaaatacttcgtccgtgagccccagaggctacgttccgtcttctacccctcagcagtctaactacaacactgtgtctacttcaatgaacggttacgggtctggagcaatggcaagtctcggtgtgcctggttccccaggattcctgaatgggtcttctgccaactccccttatggaattgtcccttcctcacccaccatggctgcctcttcagtcactctgcccagtaattgctcctcaacacacggaatctttagtttctcccctgccaatgtgatttccgcggtgaaacagaaatcggcctttgcccctgtcgttaggccacaggcgtctccacctccgagttgtacttcagcgaacgggaatggcctgcaggggtctctgctcggggctgaagacgtggcagcagagaaaacaaattggcccttttgtgaagtgggggggattttccatttcgacgaactcatgcttaagaaaggcaccgggaagctttgtttgggatggtag

SEQ ID NO: 335378 - DNA, 576 bp, Artificial Sequence
  derived and/or modified sequence
tgattcagcagccagctggccgtgaatgtgtctgagaccagccaggccaatgaccaggtgggctacagcaggaacaccagctctgtgagcccccggggctacgtgcccagcagcaccccccagcagagcaactacaacacagtgtccacctccatgaatggctacggcagcggggccatggccagcctgggcgtgcccggcagccctggcttcctgaatggcagcagcgccaacagcccctatggaattgtgcccagcagccccaccatggccgccagctctgtgaccctgcccagcaactgcagcagcacccacggcatcttctccttcagccctgccaacgtcatctctgctgtgaagcagaagagcgcctttgcccctgtggtgcggccccaggccagccccccacccagctgcaccagcgccaatggaaatggcctgcagggcagcctgctgggcgcagaagatgtggccgctgagaagaccaactggcccttctgtgaggtgggcggcatcttccactttgatgagctgatgctgaagaagggcaccgggaagctgtgcctgggctggtag

SEQ ID NO: 335379 - DNA, 576 bp, Artificial Sequence
  derived and/or modified sequence
tgattcagcagccagctggccgtgaacgtgagcgagaccagccaggccaatgaccaggtcgggtatagccgcaatacctctagtgtgtcccctcggggctacgtgcccagtagtacccctcagcaatccaattataatactgtgtcaaccagtatgaatgggtatggcagcggagccatggccagccttggagtccccggatcacccggcttcttaaatgggagctccgccaatagcccctacgggattgttcccagcagcccaaccatggcagcaagctctgtaacccttcctagtaactgttcctccacacatgggatctttagcttttctcccgctaatgttatttcagctgtcaaacagaaaagcgcctttgcacccgttgtgcggcctcaggcgtccccccccccctcttgcacctctgcaaatggcaacgggctacagggctccctccttggcgccgaggatgtggcagccgagaagactaattggcctttctgtgaagtgggaggtatttttcactttgatgaactcatgctgaaaaaaggcacaggaaagttgtgcttagggtggtag

SEQ ID NO: 335380 - DNA, 576 bp, Artificial Sequence
  derived and/or modified sequence
tagttttcctcacagttagctgtcaatgtgtcagaaacatcacaagctaacgaccaagtgggctactcaaggaacacatcatccgtgagcccccgtggctacgtcccgtctagcactccccaacaatccaactacaatactgtatctacctctatgaatggttacggcagtggggcaatggcctcactgggagtgcccggatcaccgggatttctaaatggcagcagcgcaaactctccttacgggatcgtaccctcttccccaacaatggcggcttcgagtgtcactttaccctctaactgcagttcaacacacggtatcttctccttttcacccgcaaacgtcatcagcgcagtcaaacaaaagtcagcatttgcacctgtggtacggccacaggctagcccccctccatcctgcacatccgccaatggaaacggcctgcaagggtccctgctaggggcagaagacgtggccgctgagaagaccaattggcctttttgcgaggtaggtggaatttttcatttcgacgagctgatgctgaaaaagggcactggcaagttatgcctggggtggtag

SEQ ID NO: 335381 - DNA, 576 bp, Artificial Sequence
  derived and/or modified sequence
tgattcagcagccagctggccgtgaacgtgagcgagaccagccaggccaacgaccaggtgggctacagcagaaacaccagcagcgtgagccccagaggctacgtgcccagcagcaccccccagcagagcaactacaacaccgtgagcaccagcatgaacggctacggcagcggcgccatggccagcctgggcgtgcccggcagccccggcttcctgaacggcagcagcgccaacagcccctacggcatcgtgcccagcagccccaccatggccgccagcagcgtgaccctgcccagcaactgcagcagcacccacggcatcttcagcttcagccccgccaacgtgatcagcgccgtgaagcagaagagcgccttcgcccccgtggtgagaccccaggccagccccccccccagctgcaccagcgccaacggcaacggcctgcagggcagcctgctgggcgccgaggacgtggccgccgagaagaccaactggcccttctgcgaggtgggcggcatcttccacttcgacgagctgatgctgaagaagggcaccggcaagctgtgcctgggctggtag

SEQ ID NO: 335382 - DNA, 817 bp, Artificial Sequence
  derived and/or modified sequence
cttcagcagccagctagccgtcaacgtgtcagagacgtcacaagccaacgaccaagtcggctacagtcgcaatacaagcagcgtgtccccgcgaggctacgtccccagcagtactccccagcagtccaattacaacacagtcagcactagcatgaatggatatggaagtggcgccatggccagtctaggggtccctggctcgcctggatttcttaatggctcctccgctaactctccctacggcatagtgccgtccagccccaccatggcagcctcttcggtcaccctcccttcaaactgtagcagcacacacggcattttctcattctcacctgccaatgtcatctccgcagtgaaacagaagagcgccttcgcgcccgtggtccggccccaagcctctcctcctccttcctgcaccagcgccaacgggaatggactgcaaggctctctgctgggtgctgaggacgtagccgcggagaagacaaactggcccttttgtgaagtcggtggcatatttcactttgatgaactaatgctcaaaaaaggaactggaaagctatgtctgggctggtagtcccgccaatgtgagggacttctgtttaccttccgcagcacccagcatcaaaggacggacttcaggggacacgtttagtatattaagacatgctgatggaaacagtatcttcaaaaaaatcagcagcaattgaaatgctacaaaagactttgtttaaagattttatttaaactattaagaatcaacatgcaaacagcctacttcttcatgaacaattccattttattgactgaacttttctca

SEQ ID NO: 335383 - protein, 241 aa, Artificial Sequence
  derived and/or modified sequence
MKEVVYWSPKKVADWLLENAMPEYCEPLEHFTGQDLINLTQEDFKKPPLCRVSSDNGQRLLDMIETLKMEHHLEAHKNGHANGHLNIGVDIPTPDGSFSIKIKPNGMPNGYRKEMIKIPMPELERSQYPMEWGKTFLAFLYALSCFVLTTVMISVVHERVPPKEVQPPLPDTFFDHFNRVQWAFSICEINGMILVGLWLIQWLLLKYKDVGNESRVVMIFLSIVHPVLLLGSIAGFLSLSL

SEQ ID NO: 335384 - protein, 413 aa, Artificial Sequence
  derived and/or modified sequence
MKEVVYWSPKKVADWLLENAMPEYCEPLEHFTGQDLINLTQEDFKKPPLCRVSSDNGQRLLDMIETLKMEHHLEAHKNGHANGHLNIGVDIPTPDGSFSIKIKPNGMPNGYRKEMIKIPMPELERSQYPMEWGKTFLAFLYALSCFVLTTVMISVVHERVPPKEVQPPLPDTFFDHFNRVQWAFSICEINGMILVGLWLIQWLLLKYKSIISRRFFCIVGTLYLYRCITMYVTTLPVPGMHFNCSPKLFGDWEAQLRRIMKLIAGGGLSITGSHNMCGDYLYSGHTVMLTLTYLFIKEYSPRRLWWYHWICWLLSVVGIFCILLAHDHYTVDVVVAYYITTRLFWWYHTMANQQVLKEASQMNLLARVWWYRPFQYFEKNVQGIVPRSYHWPFPWPVVHLSRQVKYSRLVNDT

SEQ ID NO: 335385 - protein, 213 aa, Artificial Sequence
  derived and/or modified sequence
TYMYISNKSIISRRFFCIVGTLYLYRCITMYVTTLPVPGMHFNCSPKLFGDWEAQLRRIMKLIAGGGLSITGSHNMCGDYLYSGHTVMLTLTYLFIKEYSPRRLWWYHWICWLLSVVGIFCILLAHDHYTVDVVVAYYITTRLFWWYHTMANQQVLKEASQMNLLARVWWYRPFQYFEKNVQGIVPRSYHWPFPWPVVHLSRQVKYSRLVNDT

SEQ ID NO: 335386 - protein, 244 aa, Artificial Sequence
  derived and/or modified sequence
MGGRGGGGRSRQLPGRFRAPAARWPGGRWLPGAPRTVTWSIISRRFFCIVGTLYLYRCITMYVTTLPVPGMHFNCSPKLFGDWEAQLRRIMKLIAGGGLSITGSHNMCGDYLYSGHTVMLTLTYLFIKEYSPRRLWWYHWICWLLSVVGIFCILLAHDHYTVDVVVAYYITTRLFWWYHTMANQQVLKEASQMNLLARVWWYRPFQYFEKNVQGIVPRSYHWPFPWPVVHLSRQVKYSRLVNDT

SEQ ID NO: 335387 - DNA, 1242 bp, Artificial Sequence
  derived and/or modified sequence
atgaaggaggtggtgtactggagccccaagaaggtggccgactggctgctggagaacgccatgcccgagtactgcgagcccctggagcacttcaccggccaggacctgatcaacctgacccaggaggacttcaagaagccccccctgtgcagagtgagcagcgacaacggccagagactgctggacatgatcgagaccctgaagatggagcaccacctggaggcccacaagaacggccacgccaacggccacctgaacatcggcgtggacatccccacccccgacggcagcttcagcatcaagatcaagcccaacggcatgcccaacggctacagaaaggagatgatcaagatccccatgcccgagctggagagaagccagtaccccatggagtggggcaagaccttcctggccttcctgtacgccctgagctgcttcgtgctgaccaccgtgatgatcagcgtggtgcacgagagagtgccccccaaggaggtgcagccccccctgcccgacaccttcttcgaccacttcaacagagtgcagtgggccttcagcatctgcgagatcaacggcatgatcctggtgggcctgtggctgatccagtggctgctgctgaagtacaagagcatcatcagcagaagattcttctgcatcgtgggcaccctgtacctgtacagatgcatcaccatgtacgtgaccaccctgcccgtgcccggcatgcacttcaactgcagccccaagctgttcggcgactgggaggcccagctgagaagaatcatgaagctgatcgccggcggcggcctgagcatcaccggcagccacaacatgtgcggcgactacctgtacagcggccacaccgtgatgctgaccctgacctacctgttcatcaaggagtacagccccagaagactgtggtggtaccactggatctgctggctgctgagcgtggtgggcatcttctgcatcctgctggcccacgaccactacaccgtggacgtggtggtggcctactacatcaccaccagactgttctggtggtaccacaccatggccaaccagcaggtgctgaaggaggccagccagatgaacctgctggccagagtgtggtggtacagacccttccagtacttcgagaagaacgtgcagggcatcgtgcccagaagctaccactggcccttcccctggcccgtggtgcacctgagcagacaggtgaagtacagcagactggtgaacgacacctag

SEQ ID NO: 335388 - DNA, 642 bp, Artificial Sequence
  derived and/or modified sequence
acctacatgtacatcagcaacaagagcatcatcagcagaagattcttctgcatcgtgggcaccctgtacctgtacagatgcatcaccatgtacgtgaccaccctgcccgtgcccggcatgcacttcaactgcagccccaagctgttcggcgactgggaggcccagctgagaagaatcatgaagctgatcgccggcggcggcctgagcatcaccggcagccacaacatgtgcggcgactacctgtacagcggccacaccgtgatgctgaccctgacctacctgttcatcaaggagtacagccccagaagactgtggtggtaccactggatctgctggctgctgagcgtggtgggcatcttctgcatcctgctggcccacgaccactacaccgtggacgtggtggtggcctactacatcaccaccagactgttctggtggtaccacaccatggccaaccagcaggtgctgaaggaggccagccagatgaacctgctggccagagtgtggtggtacagacccttccagtacttcgagaagaacgtgcagggcatcgtgcccagaagctaccactggcccttcccctggcccgtggtgcacctgagcagacaggtgaagtacagcagactggtgaacgacacctag

SEQ ID NO: 335389 - DNA, 735 bp, Artificial Sequence
  derived and/or modified sequence
atgggcggcagaggcggcggcggcagaagcagacagctgcccggcagattcagagcccccgccgccagatggcccggcggcagatggctgcccggcgcccccagaaccgtgacctggagcatcatcagcagaagattcttctgcatcgtgggcaccctgtacctgtacagatgcatcaccatgtacgtgaccaccctgcccgtgcccggcatgcacttcaactgcagccccaagctgttcggcgactgggaggcccagctgagaagaatcatgaagctgatcgccggcggcggcctgagcatcaccggcagccacaacatgtgcggcgactacctgtacagcggccacaccgtgatgctgaccctgacctacctgttcatcaaggagtacagccccagaagactgtggtggtaccactggatctgctggctgctgagcgtggtgggcatcttctgcatcctgctggcccacgaccactacaccgtggacgtggtggtggcctactacatcaccaccagactgttctggtggtaccacaccatggccaaccagcaggtgctgaaggaggccagccagatgaacctgctggccagagtgtggtggtacagacccttccagtacttcgagaagaacgtgcagggcatcgtgcccagaagctaccactggcccttcccctggcccgtggtgcacctgagcagacaggtgaagtacagcagactggtgaacgacacctag

SEQ ID NO: 335390 - DNA, 1242 bp, Artificial Sequence
  derived and/or modified sequence
atgaaggaggtggtgtactggtctcctaagaaagtggccgactggcttctggagaatgccatgcctgaatactgcgagcccctggaacatttcaccggtcaggacctaatcaacctgacccaggaagatttcaaaaaaccaccactctgtagagttagtagcgacaacggccaacgactcctggacatgattgagaccctaaagatggagcaccatctcgaggcgcacaagaacggccacgccaatggccatctcaatatcggagtggatatcccaacacctgacggaagtttctccataaaaatcaagcccaacggtatgcccaatgggtaccgcaaggagatgatcaaaattccaatgcccgaactcgagcgctcgcagtaccctatggagtgggggaaaacctttctcgcctttctctatgctctgtcttgtttcgtgctaaccaccgtaatgattagcgtcgttcatgaacgggtaccacccaaagaagtgcagcctcctctgcctgacaccttcttcgaccattttaacagggttcaatgggctttctcaatttgtgagatcaatggcatgatcctggtcggattatggctcatacagtggttgctgttaaaatataagtcgatcatttccaggcggttcttctgtatcgtcggtacactgtacctctaccgatgtataactatgtatgtgacaacattgcccgtacccggcatgcacttcaactgttcccctaagctattcggcgattgggaagcacaactgcggcggattatgaagctcatcgccggtggcggcctctcaatcactggctcacacaatatgtgcggggattacctgtactcaggtcatactgtcatgctgaccctgacctacctcttcataaaggagtactctcctagacggctctggtggtaccactggatctgttggttactgtcagtggtgggaatcttttgcatcctcctggcccatgatcactatactgtggacgtggtggttgcctactatataacaacacgcctgttttggtggtatcacacaatggcaaaccaacaggtgttaaaagaggcctcccagatgaaccttctcgcacgagtgtggtggtaccgcccttttcagtacttcgagaaaaacgtgcaggggatcgtacctagatcataccattggccattcccatggccagttgtccatctctctcgacaggtgaaatactcgcgcctcgtaaacgacacatag

SEQ ID NO: 335391 - DNA, 642 bp, Artificial Sequence
  derived and/or modified sequence
acttatatgtatatctcaaataagagtatcattagtcgaaggtttttctgcattgttggaacattgtatctgtaccgctgcataacgatgtatgttactacgcttcccgtgccaggaatgcactttaattgctctcccaaattgttcggagactgggaggcacagctccgcagaatcatgaagctgatcgctggcgggggcttgagtatcaccggtagccacaatatgtgtggagattacctctattccgggcacactgtcatgctgacacttacctatttgttcattaaagaatattctcctaggaggctttggtggtaccactggatctgctggcttttgtccgtggtcggaattttctgcatcctgctcgctcacgaccattatacagtcgatgtcgtggttgcctactacatcaccacgcgactgttctggtggtaccatactatggcaaaccaacaagtgttgaaggaggcaagccagatgaacttgctcgctcgagtctggtggtataggcctttccagtactttgaaaaaaatgtgcagggaatcgtgccccgtagctaccactggccatttccctggccagtggtgcacctgagtaggcaggtgaaatattcacgcctggttaatgatacctag

SEQ ID NO: 335392 - DNA, 735 bp, Artificial Sequence
  derived and/or modified sequence
atgggcggtagagggggggggggccgctcccgccagttgcctgggcgctttagagctcctgcagcccggtggccaggaggccggtggctaccaggagctccacgtactgttacttggtcaataatttccagacggttcttttgcatagtcggtacactgtacctctatcgttgcatcactatgtatgtaacgacactccctgtccctggaatgcactttaactgctccccaaaattatttggcgactgggaagcacagctgcggagaattatgaagctcatagcaggcggaggtttgtcaatcacagggtcacacaacatgtgcggcgattacctgtattccggtcacaccgtaatgttgacccttacttacctctttattaaagagtattctccccgacgactgtggtggtatcattggatatgctggctcctgagtgtcgttgggattttctgcattttgctggcccatgaccactatactgtggatgtggtggttgcatactatataacaacccgtctgttctggtggtaccatacgatggcgaatcagcaggtgctgaaggaagcgtcacagatgaatttgctggcccgcgtgtggtggtatcggccctttcagtattttgagaaaaatgtccaggggatagttcctaggagttatcattggccgtttccctggcccgttgtgcacctttcgagacaggtgaaatattcgaggctagtaaacgacacctag

SEQ ID NO: 335393 - DNA, 1242 bp, Artificial Sequence
  derived and/or modified sequence
atgaaggaggtggtgtactggagccccaagaaggtggccgactggctgctggagaatgccatgcctgagtactgtgagcccctggagcacttcaccggccaggacctgatcaacctgacccaggaggacttcaagaagccacccctgtgccgggtgtccagtgacaatggccagaggctgctggacatgattgagaccctgaagatggagcaccacctggaggcccacaagaatggccacgccaacggccacctgaacattggagtggacatccccaccccagatggcagcttcagcatcaagatcaagcccaacggcatgcccaacggctacaggaaggagatgatcaagatccccatgcctgagctggagaggagccagtaccccatggagtggggcaagaccttcctggccttcctgtatgccctgagctgctttgtgctgaccaccgtgatgatctctgtggtgcatgagcgggtgccccccaaggaggtgcagccccccctgcctgacaccttctttgaccacttcaacagagtgcagtgggccttcagcatctgtgagatcaatggcatgatcctggtgggcctgtggctgatccagtggctgctgctgaagtacaagagcatcatcagccgccgcttcttctgcatcgtgggcaccctgtacctgtaccgctgcatcaccatgtatgtgaccaccctgcctgtgcccggcatgcacttcaactgcagccccaagctgtttggagactgggaggcccagctgcggcgcatcatgaagctgattgctgggggcggcctgagcatcaccggcagccacaacatgtgtggggactacctgtacagcggccacacagtgatgctgaccctgacctacctgttcatcaaggagtacagcccccggcggctgtggtggtaccactggatctgctggctgctgtctgtggtgggcatcttctgcatcctgctggcccatgaccactacacagtggatgtggtggtggcctactacatcaccaccaggctcttctggtggtaccacaccatggccaaccagcaggtgctgaaggaggccagccagatgaacctgctggcccgggtgtggtggtaccggcccttccagtactttgagaagaatgtgcagggcatcgtgcccaggagctaccactggcccttcccctggcctgtggtgcacctgagccggcaggtgaagtacagccggctggtgaatgacacctag

SEQ ID NO: 335394 - DNA, 642 bp, Artificial Sequence
  derived and/or modified sequence
acctacatgtacatcagcaacaagagcatcatcagccgccgcttcttctgcatcgtgggcaccctgtacctgtaccgctgcatcaccatgtatgtgaccaccctgcctgtgcccggcatgcacttcaactgcagccccaagctgtttggagactgggaggcccagctgcggcgcatcatgaagctgattgctgggggcggcctgagcatcaccggcagccacaacatgtgtggggactacctgtacagcggccacacagtgatgctgaccctgacctacctgttcatcaaggagtacagcccccggcggctgtggtggtaccactggatctgctggctgctgtctgtggtgggcatcttctgcatcctgctggcccatgaccactacacagtggatgtggtggtggcctactacatcaccaccaggctcttctggtggtaccacaccatggccaaccagcaggtgctgaaggaggccagccagatgaacctgctggcccgggtgtggtggtaccggcccttccagtactttgagaagaatgtgcagggcatcgtgcccaggagctaccactggcccttcccctggcctgtggtgcacctgagccggcaggtgaagtacagccggctggtgaatgacacctag

SEQ ID NO: 335395 - DNA, 735 bp, Artificial Sequence
  derived and/or modified sequence
atgggcggccggggcggcggcggccgcagccggcagctgcccggccgcttccgggccccagctgcccgctggccaggcggccgctggctgcccggggcccccaggacagtgacctggagcatcatcagccgccgcttcttctgcatcgtgggcaccctgtacctgtaccgctgcatcaccatgtatgtgaccaccctgcctgtgcccggcatgcacttcaactgcagccccaagctgtttggagactgggaggcccagctgcggcgcatcatgaagctgattgctgggggcggcctgagcatcaccggcagccacaacatgtgtggggactacctgtacagcggccacacagtgatgctgaccctgacctacctgttcatcaaggagtacagcccccggcggctgtggtggtaccactggatctgctggctgctgtctgtggtgggcatcttctgcatcctgctggcccatgaccactacacagtggatgtggtggtggcctactacatcaccaccaggctcttctggtggtaccacaccatggccaaccagcaggtgctgaaggaggccagccagatgaacctgctggcccgggtgtggtggtaccggcccttccagtactttgagaagaatgtgcagggcatcgtgcccaggagctaccactggcccttcccctggcctgtggtgcacctgagccggcaggtgaagtacagccggctggtgaatgacacctag

SEQ ID NO: 335396 - DNA, 1242 bp, Artificial Sequence
  derived and/or modified sequence
atgaaggaggtggtgtactggagccccaagaaggtggccgactggcttctggagaatgcaatgcccgaatattgtgaacctctggagcacttcaccgggcaggatctgatcaacctgacgcaggaggactttaaaaaaccaccactctgtagggtctctagcgacaacggccagcgactgttggatatgatcgagacactaaaaatggaacaccacctggaggcccacaagaatggccacgctaatgggcatctgaacatcggcgtcgacatccccactccagatggttcgttctctatcaagatcaagcccaacggaatgcccaatggatatcgtaaggagatgattaagatacccatgcccgaactggagcgctctcagtacccaatggagtgggggaagacttttctagccttcctgtatgcactgagctgcttcgttctaaccacagtcatgatcagtgttgtccatgagcgagtgccacccaaagaggttcaaccaccgttgccagataccttctttgaccattttaaccgggtgcaatgggcatttagcatatgcgaaatcaacggaatgatcttggtgggcctctggcttattcaatggctcctgctaaaatacaaaagcatcattagtaggaggtttttctgcatcgtcgggacgctgtatctctacaggtgtataactatgtacgtcacaacactgcccgttcccgggatgcactttaactgctcgcctaaactttttggcgattgggaggctcagctgcgacgcattatgaagttaatcgccggcggcgggctgtctattacgggcagccacaatatgtgcggcgactacctgtattctggccatacggtgatgttgaccctgacctacctcttcattaaggagtattccccccgacgactctggtggtaccactggatttgctggctgctgagtgtggttggcatcttttgcatcctgctcgctcacgatcattatacagtcgacgtggtggtcgcctattatattacgactcgcttattctggtggtaccacaccatggctaaccagcaagtgctgaaggaggcctctcagatgaatctgttggcacgcgtctggtggtaccggcccttccagtatttcgagaaaaatgtccagggaatcgtacctaggtcataccattggccttttccttggcctgttgtgcacttgtccagacaagtcaaatattcgcggctggtgaacgacacctag

SEQ ID NO: 335397 - DNA, 642 bp, Artificial Sequence
  derived and/or modified sequence
acctacatgtacatcagcaacaagagcatcatcagccggcggttcttctgcatcgtcggcacactctatctgtatcgctgcattaccatgtatgttactaccctgcccgtgcccggtatgcattttaattgcagcccgaagctttttggcgactgggaagctcagctacggaggattatgaagctgatagccggaggcggcctgtccattacagggtctcataacatgtgtggagactatctctactccggccatactgtgatgctgacactcacctacctgttcattaaggagtactcacctcgccggttgtggtggtaccactggatatgttggctgttaagtgtggttggcatattctgcatcctgctggcccatgatcattacactgtagacgtcgtcgttgcttattatattacgacaagactgttttggtggtatcacactatggctaaccaacaggttctgaaggaagcttcccaaatgaacctcctagcgagggtatggtggtataggcctttccagtactttgagaagaacgtccaggggattgtccctaggtcttaccactggccttttccttggccagtagtacacctgtctcggcaggtgaaatacagtcgcctcgtgaatgacacatag

SEQ ID NO: 335398 - DNA, 735 bp, Artificial Sequence
  derived and/or modified sequence
atgggcggccggggcggcggcggccggagccggcagctgcccggcagattccgcgcccccgctgcccggtggccggggggtagatggctgccaggggctccgagaacagtgacttggtctatcatttctcgacggttcttctgcatcgtgggcactctgtacttatatcgctgcatcactatgtatgtcacaaccctgccagtacccggaatgcatttcaattgcagccctaagcttttcggtgactgggaggcccaactgagacgtattatgaagttgatcgccggaggggggctgtcgattaccggatcccacaatatgtgtggtgactacttgtatagcgggcatactgttatgctcacattgacttatctgtttatcaaagaatattctccacggcggctgtggtggtaccactggatctgttggctgctctcagtggttgggattttctgcatcctcctggcacacgatcactacactgtggatgttgttgtagcatattacatcaccacaaggctcttctggtggtaccatacaatggctaaccaacaggtacttaaggaagcctcccagatgaatcttcttgctcgcgtgtggtggtacagaccatttcaatattttgagaaaaacgtccagggaatcgttccaaggtcttatcattggccattcccttggcctgtcgtgcatctgtcacgtcaggtaaagtatagtcgacttgtaaacgatacctag

SEQ ID NO: 335399 - DNA, 1242 bp, Artificial Sequence
  derived and/or modified sequence
atgaaggaggtcgtctattggtctccaaagaaggtggccgattggctcctggaaaacgctatgcccgagtactgtgagccactggaacactttacaggtcaggacctgattaacctcacacaggaggacttcaagaaacctccactgtgcagagtgagctccgacaatggtcagagactgctcgatatgatcgaaacactgaagatggaacaccacctggaagcccacaaaaatgggcatgctaatggccacctgaacatcggggtagacatacctacaccggacggatctttttccattaagattaagcctaacggaatgcccaacggttatcgcaaggagatgatcaagattccaatgccggaactggagcgctctcagtaccccatggagtggggtaagactttcctggcgtttctctatgcgctatcttgttttgttttgaccactgtaatgatttccgtggtccacgaacgagtgccgcctaaggaggttcagccacccttacctgacacattttttgatcactttaatcgggtgcagtgggccttttcaatctgcgagattaatggcatgattttggtggggctctggttgatacaatggctgctgctcaagtataaatccataatttccagaaggttcttttgtattgtaggaacactgtacctttaccggtgcattaccatgtatgtcacaaccctgccagtgccagggatgcactttaattgtagtcccaagctgtttggggattgggaagcgcagcttcgtagaatcatgaagctgattgcagggggagggctttccattaccggttcccataacatgtgtggggactatctttactccggacacactgtgatgctcaccttgacgtatctgttcataaaggaatactcgccaaggaggctttggtggtaccactggatatgctggttgctgtccgtggtcgggatcttttgcatacttctggctcatgatcactatactgtggatgtcgttgttgcttactatattacaacccggctcttttggtggtaccacactatggcaaatcaacaggtgctcaaggaagcaagtcaaatgaatctgctggccagagtatggtggtatagaccattccaatactttgagaaaaatgtgcaagggatcgtgccacggagctaccattggcctttcccgtggccagtggtgcatctgtcaagacaggtcaagtactctcggctggttaacgacacctag

SEQ ID NO: 335400 - DNA, 642 bp, Artificial Sequence
  derived and/or modified sequence
acctacatgtatatctctaacaaatctattatttcaagaaggtttttttgtatcgtggggactctttatctgtacaggtgtatcacaatgtacgtgactacactgcccgtgcccggaatgcatttcaattgttccccaaagttattcggcgactgggaagcgcagcttcgtcggattatgaaattgattgccggaggtggtttgagcatcacaggctctcacaacatgtgcggtgattatctgtactccggccacactgtgatgctcacactgacctatctgttcatcaaggaatattcaccacgtaggctgtggtggtatcattggatttgctggctcctcagcgtcgtgggcatattttgcatactcctggcacatgaccactacactgttgatgtggtcgtcgcatattacattaccacgcgactgttctggtggtatcacacaatggccaaccagcaggtgttgaaagaagcttcccagatgaatcttctcgccagagtatggtggtaccgccctttccaatattttgagaagaatgtccagggcatcgtcccacggtcttatcattggccatttccatggcctgtagtgcacttatctaggcaagtgaagtattctagattagttaacgatacctag

SEQ ID NO: 335401 - DNA, 735 bp, Artificial Sequence
  derived and/or modified sequence
atgggtgggcgtggaggagggggacggagccgccagctgccaggtagatttagggcgcctgcagccaggtggcccggaggcaggtggttgcctggagctccccgaactgtgacatggagcattattagtagaagatttttttgcattgtgggtacactctatctgtacaggtgcatcacaatgtatgtcactaccctcccagtgcccggtatgcacttcaattgttcgcccaagttgttcggggattgggaggctcaactacggaggatcatgaaacttattgccggagggggactcagcatcacgggttcccataacatgtgcggggattatttgtattccggtcacactgttatgctgacactgacatacctgtttattaaggaatactcaccccgtagactgtggtggtatcattggatctgttggctcctgtccgttgtcgggatcttctgtatccttttagcccatgaccattacaccgtggacgtggttgtcgcctattatataacaacaaggctcttctggtggtatcatacaatggccaaccagcaggtgctgaaagaagcctcccagatgaatctgctggcaagagtttggtggtaccgccctttccagtatttcgaaaagaacgttcagggcatagtgcccaggagttaccattggccctttccgtggccagtggtgcacctgagcagacaggtgaaatattcacgcttggtgaatgatacctag

SEQ ID NO: 335402 - DNA, 3744 bp, Artificial Sequence
  derived and/or modified sequence
tcgggcagcggactgggcatgctcggcagcccgggaggctcgcggtggcaagtcgaaagcgttcgcaccagcggggcagcggctgcgggcggcaggcggcgggcaggtcgggagtgagaaggaccggcctgggctgactgctctcccctcgcgcctagggagccggtcggagagcgcgattggggtgcggagccccgacgctgccctgccccggatttcattccgcggcgggggctccgcgagcggaattccggcggctgccgtgactccagtgcaacgtgacgacagcatgtacgatccctgaatgggcccgtgggcatatttagtcattcatttttgatcaggagaaagaagacagccatcatttgaaaggtaaagcttcagcgactgaaggagtgtggactttttgaatttcaagaacagtaaagttggaacacagcagagggtgtgtaataaaatacagattggaaagaagactgatgaagaaaaataacagcatgattcaggcacaccattgagttctttgggatgcccgaaagtgtctggttgggaaacatgaaatagaagacgagaacctgcctcagcaagcgtacctgagaatacttttaaaggaacctgttgataaatgcaaaacagtggctgttgcaggtgatggaactgtactggaacaatgggagaagctggtagcttataggaagccaagatgaccagaatgtttttaaataatccaaggaagaatcctgctcaaaaatgaggtgaattaatacttgggcgctcaggaaccctggacagctacatgaggtgtttaaaaactgccctgaccatcttgccaaacaagtctctgctcatgaggccccacaggatgaacgagccgaggcaggacagtgtcctgccctgtcggaacagtgactgctgacctgccaagagagagctggggactgcctgctgtctgccagtacaatgaaggaagtggtttattggtcacccaagaaggtggcagactggctgctggagaatgctatgccagaatactgtgagcctctggagcatttcacaggccaggacttgatcaacctaacccaagaggatttcaaaaaaccccccttgtgccgagtctcctctgacaatgggcagcggctcctggacatgatagaaaccctgaaaatggagcaccatttggaagcacacaagaacggccatgccaatgggcacctcaacattggcgtagacatccccacccccgacggcagcttcagcatcaagattaaacccaacgggatgccaaatgggtataggaaagagatgataaagatccccatgccagaactggagcgctctcagtaccccatggagtggggcaagacttttctggcctttctttatgcactttcctgtttcgttctcaccacagtgatgatctcggtcgtccacgaacgagtacctcctaaggaggtgcagcctccactaccggacacattttttgaccattttaaccgggtgcagtgggccttttctatttgtgaaattaatggcatgatccttgtaggactctggttaattcagtggctgctcttaaaatacaagtctattattagcagaagatttttctgcatagttggcacgctgtacctgtatcggtgtattacaatgtatgtaactacactcccagtacctggtatgcatttcaactgttctccgaagcttttcggagactgggaagcccaactgcgaagaataatgaagctcattgctggaggtggcttgtctatcactggctctcacaacatgtgtggggactatctgtacagcggccacacggtcatgctaacacttacctacttatttatcaaagagtattcccctcggcgactctggtggtatcactggatttgctggcttctcagcgtagttggaatcttctgtattctcttagcgcatgaccactacactgtggacgtggtggtggcatattacatcaccacgagactcttctggtggtatcacactatggccaatcagcaagtgctaaaggaagcttcccagatgaacctcctggccagggtgtggtggtacaggccatttcagtactttgaaaagaatgtccaaggaattgtacctcgatcttaccattggcctttcccctggccagtagtccacctcagtaggcaagttaaatacagccggctggtgaatgacacataacagctgtacaaagtggggaaaagacaaattgtccgaagtgctaagaactccatgagagaagatgccataaaataaacacctccctaatcctattatctttcaatggttaccttgacttaacctattgagttacctggtcagcactgtgatctttttttctctccaaaggacctgcgttggacaacaataaagaaaaatttaacctatcatgcactgtacacatttcctgttcataagtttgggatttacataacccgcaaccaccatgttcctttgtatatgatgcagcagcataaatgtaagcttttatatcataagttctggtctttccagtcacatctggaaataaagcgtattattttcttgggaaaacatacttttcatatctcttgccccaaagattgggctgtaagccattttctagcaaatgtctctatgaaggtttctaagtacctgaatggggtttgattctgaaatctttctacctgttgcaccgatattcaaataaaaatgatagacacagaaaggtttggtaactttgggttttgtaaaatcagcaaaggcagtgtttcaaaaagtgcaaaaaaaaagattctgttataaagtgattttctaagtatttcctaactttatttttcaaaatgatgttatgaacaccaaatttaaagatttttaacatgtcagagagaagagagttaaaatttaaaaatgcatcttgggagagaaatttgtctatgtttctagtgcctttcttgtcttgattgtatggtcagtaggcaatcttaaatgtttttatttaaaataaagtattccttgaaaatataaatatatgtatacactactaaattttgcatttatagctaaattgaatcagaagactgcttatggttttaaaattgcaatgacttaaataatgaggttgttaattagagtcagagcctgttcacatattgtgatcaggtagcaatgacatgtaccacttaaattattttatcgtcgatttggtagttcaattttaactactcaatgaaaacagccatgaatatcttttcttaaagagagttttgaaaatgatcacttacctaaaacttgaaagctatgaattagttatccatactctcatgacaattttgttggtgaacaacaaaaaagagatctatttctttaaaagatatttgtgcagaaactgcatgtaactctaagttttactcctaacatacatatgtttggggaagtattctattctatacttgccaatgtggagaacaaaatagttttttaagaatgaagaagtatatatatccattctgtattttacgtgcagcagaattatcttccgtaggatttttttgtgtattcacaaggtgatatttgtattgtaaaacaataatggtgaaggaaataaaaaggcttttaaaattttgtttgttttaaatctttgtaaagttattattccagagagtatactggtatcttacagcttacctagatcataaattaatcaaaatgcactttttaataaaaactgatacttaaaataaa

SEQ ID NO: 335403 - DNA, 2198 bp, Artificial Sequence
  derived and/or modified sequence
acctacatgtatatatcaaataagtctattattagcagaagatttttctgcatagttggcacgctgtacctgtatcggtgtattacaatgtatgtaactacactcccagtacctggtatgcatttcaactgttctccgaagcttttcggagactgggaagcccaactgcgaagaataatgaagctcattgctggaggtggcttgtctatcactggctctcacaacatgtgtggggactatctgtacagcggccacacggtcatgctaacacttacctacttatttatcaaagagtattcccctcggcgactctggtggtatcactggatttgctggcttctcagcgtagttggaatcttctgtattctcttagcgcatgaccactacactgtggacgtggtggtggcatattacatcaccacgagactcttctggtggtatcacactatggccaatcagcaagtgctaaaggaagcttcccagatgaacctcctggccagggtgtggtggtacaggccatttcagtactttgaaaagaatgtccaaggaattgtacctcgatcttaccattggcctttcccctggccagtagtccacctcagtaggcaagttaaatacagccggctggtgaatgacacataacagctgtacaaagtggggaaaagacaaattgtccgaagtgctaagaactccatgagagaagatgccataaaataaacacctccctaatcctattatctttcaatggttaccttgacttaacctattgagttacctggtcagcactgtgatctttttttctctccaaaggacctgcgttggacaacaataaagaaaaatttaacctatcatgcactgtacacatttcctgttcataagtttgggatttacataacccgcaaccaccatgttcctttgtatatgatgcagcagcataaatgtaagcttttatatcataagttctggtctttccagtcacatctggaaataaagcgtattattttcttgggaaaacatacttttcatatctcttgccccaaagattgggctgtaagccattttctagcaaatgtctctatgaaggtttctaagtacctgaatggggtttgattctgaaatctttctacctgttgcaccgatattcaaataaaaatgatagacacagaaaggtttggtaactttgggttttgtaaaatcagcaaaggcagtgtttcaaaaagtgcaaaaaaaaagattctgttataaagtgattttctaagtatttcctaactttatttttcaaaatgatgttatgaacaccaaatttaaagatttttaacatgtcagagagaagagagttaaaatttaaaaatgcatcttgggagagaaatttgtctatgtttctagtgcctttcttgtcttgattgtatggtcagtaggcaatcttaaatgtttttatttaaaataaagtattccttgaaaatataaatatatgtatacactactaaattttgcatttatagctaaattgaatcagaagactgcttatggttttaaaattgcaatgacttaaataatgaggttgttaattagagtcagagcctgttcacatattgtgatcaggtagcaatgacatgtaccacttaaattattttatcgtcgatttggtagttcaattttaactactcaatgaaaacagccatgaatatcttttcttaaagagagttttgaaaatgatcacttacctaaaacttgaaagctatgaattagttatccatactctcatgacaattttgttggtgaacaacaaaaaagagatctatttctttaaaagatatttgtgcagaaactgcatgtaactctaagttttactcctaacatacatatgtttggggaagtattctattctatacttgccaatgtggagaacaaaatagttttttaagaatgaagaagtatatatatccattctgtattttacgtgcagcagaattatcttccgtaggatttttttgtgtattcacaaggtgatatttgtattgtaaaacaataatggtgaaggaaataaaaaggcttttaaaattttgtttgttttaaatctttgtaaagttattattccagagagtatactggtatcttacagcttacctagatcataaattaatcaaaatgcactttttaataaaaactgatacttaaaataaatggctgttatttct

SEQ ID NO: 335404 - DNA, 735 bp, Artificial Sequence
  derived and/or modified sequence
atgggagggcgtggcgggggaggacggtcccgccagctcccaggtcggttccgagcgcccgcggcccgatggccgggcggaagatggctgcccggagcgccgcggacagtcacgtggtctattattagcagaagatttttctgcatagttggcacgctgtacctgtatcggtgtattacaatgtatgtaactacactcccagtacctggtatgcatttcaactgttctccgaagcttttcggagactgggaagcccaactgcgaagaataatgaagctcattgctggaggtggcttgtctatcactggctctcacaacatgtgtggggactatctgtacagcggccacacggtcatgctaacacttacctacttatttatcaaagagtattcccctcggcgactctggtggtatcactggatttgctggcttctcagcgtagttggaatcttctgtattctcttagcgcatgaccactacactgtggacgtggtggtggcatattacatcaccacgagactcttctggtggtatcacactatggccaatcagcaagtgctaaaggaagcttcccagatgaacctcctggccagggtgtggtggtacaggccatttcagtactttgaaaagaatgtccaaggaattgtacctcgatcttaccattggcctttcccctggccagtagtccacctcagtaggcaagttaaatacagccggctggtgaatgacacataa

SEQ ID NO: 335405 - DNA, 726 bp, Artificial Sequence
  derived and/or modified sequence
atgaaggaggtggtgtactggagccccaagaaggtggccgactggctgctggagaacgccatgcccgagtactgcgagcccctggagcacttcaccggccaggacctgatcaacctgacccaggaggacttcaagaagccccccctgtgcagagtgagcagcgacaacggccagagactgctggacatgatcgagaccctgaagatggagcaccacctggaggcccacaagaacggccacgccaacggccacctgaacatcggcgtggacatccccacccccgacggcagcttcagcatcaagatcaagcccaacggcatgcccaacggctacagaaaggagatgatcaagatccccatgcccgagctggagagaagccagtaccccatggagtggggcaagaccttcctggccttcctgtacgccctgagctgcttcgtgctgaccaccgtgatgatcagcgtggtgcacgagagagtgccccccaaggaggtgcagccccccctgcccgacaccttcttcgaccacttcaacagagtgcagtgggccttcagcatctgcgagatcaacggcatgatcctggtgggcctgtggctgatccagtggctgctgctgaagtacaaggacgtgggcaacgagagcagagtggtgatgatcttcctgagcatcgtgcaccccgtgctgctgctgggcagcatcgccggcttcctgagcctgagcctgtag

SEQ ID NO: 335406 - DNA, 726 bp, Artificial Sequence
  derived and/or modified sequence
atgaaggaggtcgtctactggtcccctaaaaaagtggctgactggttgcttgaaaacgccatgccagaatactgtgaacctctcgagcatttcacgggccaggacctaataaacctgacgcaggaagactttaagaaacctcccctgtgccgcgtgtcgagcgacaacggccagaggttgctggacatgattgagacactaaaaatggagcaccaccttgaagcccataagaatggccatgccaacggccatctcaacataggagtggacatcccgactcccgatgggagcttcagtatcaagattaaacctaatggcatgccaaatggctatcggaaagagatgattaaaatccccatgcccgagctggaaaggagtcagtacccaatggagtgggggaaaacctttcttgcctttctgtatgccctcagctgtttcgtcctgacaactgtgatgatttctgtcgtccacgagcgggttcccccgaaagaggtgcaacctcccctcccggacacattcttcgatcacttcaatcgagtgcaatgggcctttagcatatgtgagatcaatgggatgatccttgtgggactatggcttatacaatggttgctgctgaaatataaagacgtggggaatgagagccgagttgttatgatctttctctccatcgtccatccggttttgctgttgggctccattgccggctttctctctctgagtttgtag

SEQ ID NO: 335407 - DNA, 726 bp, Artificial Sequence
  derived and/or modified sequence
atgaaggaggtggtgtactggagccccaagaaggtggccgactggctgctggagaatgccatgcctgagtactgtgagcccctggagcacttcaccggccaggacctgatcaacctgacccaggaggacttcaagaagccacccctgtgccgggtgtccagtgacaatggccagaggctgctggacatgattgagaccctgaagatggagcaccacctggaggcccacaagaatggccacgccaacggccacctgaacattggagtggacatccccaccccagatggcagcttcagcatcaagatcaagcccaacggcatgcccaacggctacaggaaggagatgatcaagatccccatgcctgagctggagaggagccagtaccccatggagtggggcaagaccttcctggccttcctgtatgccctgagctgctttgtgctgaccaccgtgatgatctctgtggtgcatgagcgggtgccccccaaggaggtgcagccccccctgcctgacaccttctttgaccacttcaacagagtgcagtgggccttcagcatctgtgagatcaatggcatgatcctggtgggcctgtggctgatccagtggctgctgctgaagtacaaggatgtgggcaatgaaagccgggtggtgatgatcttcctgagcatcgtgcaccctgtgctgctgctgggcagcattgctggcttcctgagcctgagcctgtag

SEQ ID NO: 335408 - DNA, 726 bp, Artificial Sequence
  derived and/or modified sequence
atgaaggaggtggtgtactggagccccaagaaggtggccgactggcttctcgaaaatgcaatgcccgagtattgtgagcctttagaacattttacagggcaagacctgattaacctgacccaggaggattttaaaaaaccgccactttgtagggtgagctcagacaatgggcaacgcttactggacatgattgaaaccctcaaaatggaacatcacctagaggcacacaaaaatggccatgccaacggccaccttaatattggcgtggatataccaacccctgacggctctttcagtatcaaaattaagcctaatggtatgccgaatggatataggaaggaaatgattaagatcccaatgcccgagctggagaggtcacaataccctatggagtggggaaagactttcctggcgttcctttacgcactgtcctgttttgtattgactactgtcatgatatccgtagttcacgagcgggtgcctcctaaggaagtgcagccccccctgccagacactttcttcgaccactttaatagggtgcaatgggctttttccatttgcgaaattaatggaatgatcctggttggactgtggttgatccagtggttgctgctaaagtacaaggatgtggggaacgagtctagagtagtgatgattttcctctctatcgtacatcctgtgttgctgttgggatctattgccggcttcctgtcactaagcctatag

SEQ ID NO: 335409 - DNA, 726 bp, Artificial Sequence
  derived and/or modified sequence
atgaaggaagtcgtgtattggagccccaagaaagttgccgattggcttcttgagaatgcaatgcccgagtattgcgaacctcttgaacattttacaggccaagacctgataaatttgacccaggaagactttaagaagcctcctctgtgtcgggtctcatccgacaacggacagcgactgttagatatgattgaaaccctgaagatggagcaccatctcgaggcccataaaaacggccacgccaacggccatttaaacatcggtgtggatatccctacaccggacggatcctttagcatcaagatcaaacctaatggcatgccgaacggctaccgaaaagaaatgattaagattcccatgccagagctggagcgatcccagtatcccatggagtggggcaagacattcctggcattcttgtatgcgctatcttgctttgtgctgacaaccgtgatgatttccgtagttcatgagagggttcctcctaaagaggtccaaccgcctcttcccgacacatttttcgatcattttaatagggtacagtgggctttttcaatatgcgaaattaatggtatgatcttggttggcctttggctgatccaatggctcctattgaagtataaggacgttgggaatgagtccagagtggtgatgattttcctgtcgatagtgcatccagtactcttgctggggtctatcgctggctttctaagcctgagtctttag

SEQ ID NO: 335410 - DNA, 1013 bp, Artificial Sequence
  derived and/or modified sequence
gccaaacaagtctctgctcatgaggccccacaggatgaacgagccgaggcaggacagtgtcctgccctgtcggaacagtgactgctgacctgccaagagagagctggggactgcctgctgtctgccagtacaatgaaggaagtggtttattggtcacccaagaaggtggcagactggctgctggagaatgctatgccagaatactgtgagcctctggagcatttcacaggccaggacttgatcaacctaacccaagaggatttcaaaaaaccccccttgtgccgagtctcctctgacaatgggcagcggctcctggacatgatagaaaccctgaaaatggagcaccatttggaagcacacaagaacggccatgccaatgggcacctcaacattggcgtagacatccccacccccgacggcagcttcagcatcaagattaaacccaacgggatgccaaatgggtataggaaagagatgataaagatccccatgccagaactggagcgctctcagtaccccatggagtggggcaagacttttctggcctttctttatgcactttcctgtttcgttctcaccacagtgatgatctcggtcgtccacgaacgagtacctcctaaggaggtgcagcctccactaccggacacattttttgaccattttaaccgggtgcagtgggccttttctatttgtgaaattaatggcatgatccttgtaggactctggttaattcagtggctgctcttaaaatacaaggatgtgggaaatgaaagcagagtcgtcatgatcttcctaagcatcgtccaccctgtccttctactggggtccatcgctggtttcctgtctctctccctgtgacctctcttcagtgtatctggcccaccagacagaattggactttcaagccactgactaggaaaaattcctgggaaatctctgcatttgtgtcagacttcactgcaaaacaggtctattattagcagaagatttttctgcatagttggcacgctgta

SEQ ID NO: 335411 - protein, 430 aa, Artificial Sequence
  derived and/or modified sequence
MECMWCSSTKRCVDSNAYIISFPYGQCLEWQTATCSPQNCSGLRTCGQCLEQPGCGWCNDPSNTGRGHCIEGSSRGPMKLIGMHHSEMVLDTNLCPKEKNYEWSFIQCPACTCSGHANICHLHTGKCFCTTKGIKGDQCQLCDSENRYVGNPLRGTCYYSLLIDYQFTFSLLQEDDRHHTAINFIANPEQSNKNLDISINASNNFNLNITWSVGSTAGTISGEETSIVSKNNIKEYRDSFSYEKFNFRSNPNITFYVYVSNFSWPIKIQIAFSQHNTIMDLVQFFVTFFSCFLSLLLVAAVVWKIKQTCWASRRREQLLRERQQMASRPFASVDVALEVGAEQTEFLRGPLEGAPKPIAIEPCAGNRAAVLTVFLCLPRGSSGAPPPGQSGLAIASALIDISQQKASDSKDKTSGVRNRKHLSTRQGTCV

SEQ ID NO: 335412 - DNA, 1293 bp, Artificial Sequence
  derived and/or modified sequence
atggagtgcatgtggtgctcatctacaaagcggtgcgtggattctaacgcatatattatcagctttccgtacgggcagtgtctcgaatggcagacagcaacctgttccccacagaattgttcagggctgcgaacctgcggccaatgcctggaacagcctggctgcggctggtgcaacgacccttcaaacacgggccggggccactgcatcgagggcagcagcaggggtccaatgaaattaatagggatgcaccacagcgagatggtgttagacaccaacctgtgcccaaaggagaaaaactatgagtggtctttcatccagtgcccagcatgtacttgttccggccatgccaatatatgtcacctgcacacaggcaaatgcttttgcacgaccaaaggaattaagggggatcagtgccaattatgtgactctgaaaacaggtatgtgggcaaccccttgcggggtacctgctactactccctcctgattgactaccagtttaccttttccctgctgcaggaagacgatagacatcatacagctataaatttcatagctaaccccgagcagtcaaacaagaatttggacatttccattaatgcctccaataatttcaaccttaacatcacatggtctgttggttcaactgcgggcacaatcagtggcgaagaaactagcatcgtcagcaaaaacaatatcaaggaatatcgagattctttctcttatgagaagtttaatttccggtcaaatcccaacattacattctacgtgtacgtatctaatttcagctggcctatcaagatccagattgccttctcacagcacaatacaattatggacctcgtacagttcttcgtaacattcttctcctgcttcctaagcctgctgcttgtggccgccgtcgtgtggaagatcaaacagacctgctgggcctctcgccgccgagagcagctcttgcgggaaaggcaacagatggcaagccggccatttgcctccgtcgacgtagcgctggaggttggcgctgagcaaaccgaatttttaagagggcctcttgagggcgccccaaagcctatcgctatcgagccatgtgccgggaatcgtgccgccgtgctcaccgtgtttctttgtctcccacgcgggtcaagcggggcgccccctccagggcagtccggtctagctatagcatcagctttgattgacattagtcaacagaaggcatctgattccaaggataaaactagcggcgtccggaaccgaaagcacctgtcgactcgtcagggaacatgcgtatag

SEQ ID NO: 335413 - DNA, 1293 bp, Artificial Sequence
  derived and/or modified sequence
atggagtgcatgtggtgcagcagcaccaagagatgtgtggacagcaatgcctacatcatctccttcccctacggccagtgcctggagtggcagacagccacctgcagcccccagaactgcagcggcctgcggacctgtggccagtgcctggagcagcccggctgcggctggtgcaatgaccccagcaacacaggccggggccactgcatcgagggcagcagccggggccccatgaagctgattggcatgcaccacagcgagatggtgctggacaccaacctgtgccccaaggagaagaactatgagtggagcttcatccagtgcccagcctgcacctgcagcggccacgccaacatctgccacctgcacacaggcaagtgcttctgcaccaccaagggcatcaagggggaccagtgccagctgtgtgacagtgaaaatcgctacgtgggcaaccccctgcggggcacctgctactacagcctgctgattgactaccagttcaccttcagcctgctgcaggaggatgacagacaccacacagccatcaacttcatcgccaaccctgagcagagcaacaagaacctggacatcagcatcaatgccagcaacaacttcaacctgaacatcacctggagcgtgggcagcacagctggcaccatctctggagaggagaccagcatcgtgtccaagaacaacatcaaggagtacagagacagcttctcctatgagaagttcaacttccgcagcaaccccaacatcaccttctacgtgtatgtgagcaacttctcctggcccatcaagatccagatcgccttcagccagcacaacaccatcatggacctggtgcagttctttgtgaccttcttcagctgcttcctgagcctgctgctggtggccgctgtggtgtggaagatcaagcagacctgctgggccagcagaagaagagagcagctgctgcgggagcggcagcagatggccagccggccctttgcctctgtggatgtggccctggaggtgggcgctgagcagacagagttcctgcggggccccctggagggcgcccccaagcccatcgccatcgagccctgtgccggcaacagagctgctgtgctgaccgtcttcctgtgcctgccccggggcagcagcggggcccctcctcctggccagagcggcctggccatcgccagcgccctgattgacatcagccagcagaaggccagtgacagcaaggacaagaccagcggcgtgaggaacaggaagcacctgagcacccggcagggcacctgtgtgtag

SEQ ID NO: 335414 - DNA, 1293 bp, Artificial Sequence
  derived and/or modified sequence
atggagtgcatgtggtgcagcagcaccaagcggtgcgtggacagcaatgcctatatcatttcatttccttacggtcaatgccttgagtggcagacagcgacctgtagcccccaaaattgcagcggcttaagaacatgtggccaatgcctcgagcagcccgggtgcgggtggtgcaacgatccaagtaacactggccgtggccattgcatagaaggatctagccgaggaccgatgaagctaatcggtatgcatcattccgagatggtgttggacacaaacctgtgtccaaaagaaaagaactatgagtggagtttcatccagtgccccgcctgcacatgttccggacacgccaatatatgccatctgcacacaggcaaatgcttttgtactactaagggtattaaaggcgaccagtgtcagctttgcgattcagaaaatcgctatgtcggcaaccctttgaggggcacgtgttactacagtctcctcatcgactatcagttcacatttagtttgctgcaagaggacgaccgccatcacaccgctattaacttcatcgcgaatcctgagcagtccaataaaaacctggacatctcgatcaatgcctccaacaacttcaatttaaacattacgtggtcggttggaagtactgccgggaccatctctggcgaagaaacatccatcgtatccaagaacaacattaaggaatatcgtgacagcttttcctacgagaaatttaatttcaggtcgaacccaaacattaccttctatgtgtacgtgtccaacttctcttggcccataaaaattcagatcgcattcagccagcataataccattatggacctcgttcagttcttcgtgacgtttttctcttgttttctcagcctgctgctggtcgccgccgtggtctggaagatcaaacagacatgctgggcatcacgaaggagggaacagctactcagggaacgacagcagatggcatctcgcccgttcgcttccgtggacgtggccttagaagtgggggctgaacagactgaattccttaggggacccctggagggggcccccaagccaattgccatcgaaccatgtgcaggcaaccgagccgctgtgctaactgtgtttctttgtcttccccgcggcagctcaggcgctcccccaccgggtcagtccggcctcgcaatcgcgagcgcgctgatagacatcagccagcagaaggcctcagatagcaaagacaaaacttccggcgtgcggaatcgcaagcacctcagtaccagacagggaacctgcgtttag

SEQ ID NO: 335415 - DNA, 1293 bp, Artificial Sequence
  derived and/or modified sequence
atggagtgtatgtggtgttcctctactaaaagatgcgtggactccaatgcatatataatcagctttccatacggacaatgtctagaatggcagaccgcgacatgcagtccccaaaattgtagcgggctcaggacctgtgggcagtgtctggagcagccaggatgtggctggtgcaacgacccaagtaatacaggcagaggccattgtatcgagggcagcagcagagggcctatgaaattgatcggtatgcaccacagcgaaatggtgctggacacaaatctgtgccctaaggaaaagaattacgagtggagtttcatccagtgccctgcctgcacctgtagtggccacgctaacatttgtcacctgcatacgggtaaatgtttttgtactacaaaaggcataaaaggggaccagtgccagctttgcgacagtgagaatcggtacgtcgggaacccactccggggaacatgttactattccctgttgatagactatcagtttaccttcagcctcttgcaggaagacgacaggcaccatactgctatcaacttcattgcaaaccccgagcagtcaaataaaaatctcgatatctccattaacgccagtaacaacttcaacttaaatataacctggagtgtcggatccactgctggaacgatttccggagaggagacatctatcgtctctaagaataacatcaaggagtatcgtgatagcttcagctatgagaaattcaatttccggagcaaccccaatatcaccttttacgtctacgtttcaaactttagctggcccatcaagattcagatcgctttctctcaacacaacaccattatggatctggttcagttttttgtcactttcttttcttgcttcctgtccctgctcttggtggctgctgtcgtctggaagatcaaacaaacctgctgggcttcacgtaggcgcgagcagttactgagggaacgccaacaaatggcttctagaccttttgcctctgtggacgtggccttagaggtcggggcagagcagacagaatttcttcgaggaccccttgaaggcgctccaaaacctatcgccatagagccttgcgccggaaaccgggcagctgtacttacagtgtttctgtgtctgcctcggggaagctcaggagcgcctcctcccggacaatccggtctggcaatcgcttccgccctgatcgacatctctcagcagaaggccagcgactctaaggacaagacctcaggggtgaggaaccgcaaacatttatccacacggcaggggacctgtgtgtag

SEQ ID NO: 335416 - DNA, 1330 bp, Artificial Sequence
  derived and/or modified sequence
tgactctaatgcctatatcatctcttttccatatggacaatgtctagagtggcaaactgccacctgctcccctcaaaattgttctggattgagaacctgtggacagtgtttggaacagcctggatgtggctggtgcaatgatcctagtaatacaggaagaggacattgcattgaaggttcttcacggggaccaatgaagcttattggaatgcaccacagtgagatggttcttgacaccaatctttgccccaaagaaaagaactatgagtggtcctttatccagtgtccagcttgtacatgcagtggccatgcaaatatctgtcatctgcacacaggaaaatgtttctgcacaactaaaggaataaaaggtgaccaatgccaattatgtgactctgaaaatcgctatgttggtaatccacttagaggaacatgttattattgcattctcacaacacaatacaatcatggaccttgtgcagttttttgtcaccttcttcagttgtttcctatccttattgctggtggctgctgtggtatggaagatcaaacaaacttgttgggcttctcgacggagagagcaactgcttcgagaacgacagcagatggccagccgtccctttgcttctgttgatgtagctctggaagtgggagctgaacaaacagagtttctgcgagggccattagagggggcacccaagccaattgccattgaaccatgtgctgggaacagagctgctgttctgactgtgtttctttgtctaccacgaggatcatcaggtgcccctccccctgggcagtcaggccttgcaattgccagtgccctaatagatatttcacaacagaaagcttcagatagtaaagataagacttctggagtccggaatcgaaaacacctttcaacacgtcaaggaacttgtgtctgagaaatggaaaccgctcctgtatattctgtactgttttacttcgggcttctgttaaagctgttctatggccttggattttatggaggcagatctctgtatcatccagagcctgagtacagtttccttccaaatggacaatgacccaggtggccaaagaatgttcatgagttttataaaagtattgatggtcacaggtgataaagtcagtttttaccactatcttaggcttattatagctaacattaaattactctggaaaaagatgtatattgtttcttaatgaagatgaaaaatatgtaattcatataaatcaactgtttatatcccaagacttgaaagaaagacattttttaatgcctgaatgatgagaattgtacagtttttgcctcataagcaaacttgaatca

SEQ ID NO: 335417 - DNA, 1646 bp, Artificial Sequence
  derived and/or modified sequence
ctgtgaaaaacctgttgttagtccaaatcaaaatgcgaggccgtgcaaaaagccatgctctctgaggacatcatgttccaactgtacaagcaatggcatggagtgtatgtggtgcagcagtacgaaacgatgtgttgactctaatgcctatatcatctcttttccatatggacaatgtctagagtggcaaactgccacctgctcccctcaaaattgttctggattgagaacctgtggacagtgtttggaacagcctggatgtggctggtgcaatgatcctagtaatacaggaagaggacattgcattgaaggttcttcacggggaccaatgaagcttattggaatgcaccacagtgagatggttcttgacaccaatctttgccccaaagaaaagaactatgagtggtcctttatccagtgtccagcttgtacatgcagtggccatgcaaatatctgtcatctgcacacaggaaaatgtttctgcacaactaaaggaataaaaggtgaccaatgccaattatgtgactctgaaaatcgctatgttggtaatccacttagaggaacatgttattacagccttttgattgattatcaatttaccttcagcttattacaggaagatgatcgccaccatactgccataaactttatagcaaacccagaacagtcgaacaaaaatctggatatatcaattaatgcatcaaacaactttaatctcaacattacgtggtctgtcggttcaacagctggaacaatatctggggaagagacttctatagtttccaagaataatataaaggaatacagagatagtttttcctatgaaaaatttaactttagaagcaatcctaacattacattctatgtgtacgtcagcaacttttcctggcctattaaaatacagattgcattctcacaacacaatacaatcatggaccttgtgcagttttttgtcaccttcttcagttgtttcctatccttattgctggtggctgctgtggtatggaagatcaaacaaacttgttgggcttctcgacggagagagcaactgcttcgagaacgacagcagatggccagccgtccctttgcttctgttgatgtagctctggaagtgggagctgaacaaacagagtttctgcgagggccattagagggggcacccaagccaattgccattgaaccatgtgctgggaacagagctgctgttctgactgtgtttctttgtctaccacgaggatcatcaggtgcccctccccctgggcagtcaggccttgcaattgccagtgccctaatagatatttcacaacagaaagcttcagatagtaaagataagacttctggagtccggaatcgaaaacacctttcaacacgtcaaggaacttgtgtctgagaaatggaaaccgctcctgtatattctgtactgttttacttcgggcttctgttaaagctgttctatggccttggattttatggaggcagatctctgtatcatccagagcctgagtacagtttccttccaaatggacaatgacccaggtggccaaagaatgttcatgagttttataaaagtattgatggtcacaggtgataaagtcagtttttaccactatcttaggcttattatagctaacattaaattactctgg

SEQ ID NO: 335418 - DNA, 1293 bp, Artificial Sequence
  derived and/or modified sequence
atggagtgcatgtggtgcagcagcaccaagagatgcgtggacagcaacgcctacatcatcagcttcccctacggccagtgcctggagtggcagaccgccacctgcagcccccagaactgcagcggcctgagaacctgcggccagtgcctggagcagcccggctgcggctggtgcaacgaccccagcaacaccggcagaggccactgcatcgagggcagcagcagaggccccatgaagctgatcggcatgcaccacagcgagatggtgctggacaccaacctgtgccccaaggagaagaactacgagtggagcttcatccagtgccccgcctgcacctgcagcggccacgccaacatctgccacctgcacaccggcaagtgcttctgcaccaccaagggcatcaagggcgaccagtgccagctgtgcgacagcgagaacagatacgtgggcaaccccctgagaggcacctgctactacagcctgctgatcgactaccagttcaccttcagcctgctgcaggaggacgacagacaccacaccgccatcaacttcatcgccaaccccgagcagagcaacaagaacctggacatcagcatcaacgccagcaacaacttcaacctgaacatcacctggagcgtgggcagcaccgccggcaccatcagcggcgaggagaccagcatcgtgagcaagaacaacatcaaggagtacagagacagcttcagctacgagaagttcaacttcagaagcaaccccaacatcaccttctacgtgtacgtgagcaacttcagctggcccatcaagatccagatcgccttcagccagcacaacaccatcatggacctggtgcagttcttcgtgaccttcttcagctgcttcctgagcctgctgctggtggccgccgtggtgtggaagatcaagcagacctgctgggccagcagaagaagagagcagctgctgagagagagacagcagatggccagcagacccttcgccagcgtggacgtggccctggaggtgggcgccgagcagaccgagttcctgagaggccccctggagggcgcccccaagcccatcgccatcgagccctgcgccggcaacagagccgccgtgctgaccgtgttcctgtgcctgcccagaggcagcagcggcgcccccccccccggccagagcggcctggccatcgccagcgccctgatcgacatcagccagcagaaggccagcgacagcaaggacaagaccagcggcgtgagaaacagaaagcacctgagcaccagacagggcacctgcgtgtag

SEQ ID NO: 335419 - DNA, 519 bp, Artificial Sequence
  derived and/or modified sequence
atgctagttatacaccttgaggagcacgtgattatagctttctcgcagcataatacaatcatggatctagttcagttcttcgtcacattttttagttgttttttgagcctcttgctggtggccgctgtagtttggaaaattaaacaaacctgttgggcatctcggcgacgcgaacaactgctgcgtgagcgccagcagatggcttcaagaccattcgcatcagtcgacgtggcgctggaggtaggcgccgagcagactgagtttcttcgcggccctctggagggggcacccaagccaatcgccattgaaccatgcgctggtaatcgtgccgctgttctgacagtctttttgtgcctccctcgggggagctcgggcgcccctcccccaggtcagagcggcctggcaatcgcatctgccctgatagatatctcccaacagaaggcctctgattccaaagacaagacctcaggggttcgtaatagaaaacacctgagtactcgccagggtacatgtgtgtag

SEQ ID NO: 335420 - DNA, 519 bp, Artificial Sequence
  derived and/or modified sequence
atgctggtgatccacctggaggagcacgtgatcatcgccttcagccagcacaacaccatcatggacctggtgcagttctttgtgaccttcttcagctgcttcctgagcctgctgctggtggccgctgtggtgtggaagatcaagcagacctgctgggccagcagaagaagagagcagctgctgcgggagcggcagcagatggccagccggccctttgcctctgtggatgtggccctggaggtgggcgctgagcagacagagttcctgcggggccccctggagggcgcccccaagcccatcgccatcgagccctgtgccggcaacagagctgctgtgctgaccgtcttcctgtgcctgccccggggcagcagcggggcccctcctcctggccagagcggcctggccatcgccagcgccctgattgacatcagccagcagaaggccagtgacagcaaggacaagaccagcggcgtgaggaacaggaagcacctgagcacccggcagggcacctgtgtgtag

SEQ ID NO: 335421 - DNA, 519 bp, Artificial Sequence
  derived and/or modified sequence
atgctggtgatccacctggaggagcacgtgatcatcgccttcagccagcataacacaatcatggatctggttcagtttttcgtgacattcttcagctgtttcctgagcctcttgctggtcgcagcggtcgtctggaaaattaaacagacctgttgggcctctaggcggcgcgaacagctgctccgcgaacgacagcagatggcaagccgcccctttgctagcgtggacgttgctctggaggtgggcgcggagcaaacagagttcctgcggggacccctcgagggcgctccaaaacctatcgccatcgaaccctgcgcaggaaatagggctgctgtcttgacagttttcctctgcctgcctcggggctcctcaggcgctcccccccccggccagagcggacttgccatagctagcgctcttatcgatattagccaacagaaggcgtccgactctaaagataaaacaagcggcgtacggaatcgaaaacatctgagcacccgccaggggacctgcgtctag

SEQ ID NO: 335422 - DNA, 519 bp, Artificial Sequence
  derived and/or modified sequence
atgctggtgatccacctggaggaacatgtcattatcgccttttctcagcacaatactattatggacctggtccaattctttgttacattcttttcttgcttcctctcactgctgttagtcgcagccgttgtatggaaaatcaaacaaacctgttgggctagcaggaggcgagaacagctgctgcgcgaaaggcagcagatggcatccaggccttttgcctccgtggatgtcgccctggaggtcggagcagaacaaaccgaattcctgaggggaccccttgagggtgctccgaaaccgattgccatcgaaccctgcgccggaaaccgagctgcggtgctgactgtctttctttgccttccacgtggttcatcaggtgcaccaccgccaggtcaatctggtttggccatcgcaagcgcactgatcgatatatctcagcagaaggcgtctgactctaaagataagacgagcggggtccggaacaggaaacacctcagtacaaggcaggggacctgtgtgtag

SEQ ID NO: 335423 - DNA, 519 bp, Artificial Sequence
  derived and/or modified sequence
atgctggtgatccacctggaggagcacgtgatcatcgccttcagccagcacaacaccatcatggacctggtgcagttcttcgtgaccttcttcagctgcttcctgagcctgctgctggtggccgccgtggtgtggaagatcaagcagacctgctgggccagcagaagaagagagcagctgctgagagagagacagcagatggccagcagacccttcgccagcgtggacgtggccctggaggtgggcgccgagcagaccgagttcctgagaggccccctggagggcgcccccaagcccatcgccatcgagccctgcgccggcaacagagccgccgtgctgaccgtgttcctgtgcctgcccagaggcagcagcggcgcccccccccccggccagagcggcctggccatcgccagcgccctgatcgacatcagccagcagaaggccagcgacagcaaggacaagaccagcggcgtgagaaacagaaagcacctgagcaccagacagggcacctgcgtgtag

SEQ ID NO: 335424 - DNA, 1878 bp, Artificial Sequence
  derived and/or modified sequence
atgagactggagaccgccgaggcctacgtgggccccggcggccccgagtgccccatgagaaccccccagctggccctgctgcaggtgttcttcctggtgttccccgacggcgtgagaccccagcccagcagcagccccagcggcgccgtgcccaccagcctggagctgcagagaggcaccgacggcggcaccctgcagagccccagcgaggccaccgccaccagacccgccgtgcccggcctgcccaccgtggtgcccaccctggtgacccccagcgcccccggcaacagaaccgtggacctgttccccgtgctgcccatctgcgtgtgcgacctgacccccggcgcctgcgacatcaactgctgctgcgacagagactgctacctgctgcaccccagaaccgtgttcagcttctgcctgcccggcagcgtgagaagcagcagctgggtgtgcgtggacaacagcgtgatcttcagaagcaacagccccttccccagcagagtgttcatggacagcaacggcatcagacagttctgcgtgcacgtgaacaacagcaacctgaactacttccagaagctgcagaaggtgaacgccaccaacttccaggccctggccgccgagttcggcggcgagagcttcaccagcaccttccagacccagagcccccccagcttctacagagccggcgaccccatcctgacctacttccccaagtggagcgtgatcagcctgctgagacagcccgccggcgtgggcgccggcggcctgtgcgccgagagcaaccccgccggcttcctggagagcaagagcaccacctgcaccagattcttcaagaacctggccagcagctgcaccctggacagcgccctgaacgccgccagctactacaacttcaccgtgctgaaggtgcccagaagcatgaccgacccccagaacatggagttccaggtgcccgtgatcctgaccagccaggccaacgcccccctgctggccggcaacacctgccagaacgtggtgagccaggtgacctacgagatcgagaccaacggcaccttcggcatccagaaggtgagcgtgagcctgggccagaccaacctgaccgtggagcccggcgccagcctgcagcagcacttcatcctgagattcagagccttccagcagagcaccgccgccagcctgaccagccccagaagcggcaaccccggctacatcgtgggcaagcccctgctggccctgaccgacgacatcagctacagcatgaccctgctgcagagccagggcaacggcagctgcagcgtgaagagacacgaggtgcagttcggcgtgaacgccatcagcggctgcaagctgagactgaagaaggccgactgcagccacctgcagcaggagatctaccagaccctgcacggcagacccagacccgagtacgtggccatcttcggcaacgccgaccccgcccagaagggcggctggaccagaatcctgaacagacactgcagcatcagcgccatcaactgcaccagctgctgcctgatccccgtgagcctggagatccaggtgctgtgggcctacgtgggcctgctgagcaacccccaggcccacgtgagcggcgtgagattcctgtaccagtgccagagcatccaggacagccagcaggtgaccgaggtgagcctgaccaccctggtgaacttcgtggacatcacccagaagccccagccccccagaggccagcccaagatggactggaagtggcccttcgacttcttccccttcaaggtggccttcagcagaggcgtgttcagccagaagtgcagcgtgagccccatcctgatcctgtgcctgctgctgctgggcgtgctgaacctggagaccatgtag

SEQ ID NO: 335425 - DNA, 1878 bp, Artificial Sequence
  derived and/or modified sequence
atgagactcgagaccgccgaggcctatgtcgggcccggtggtcctgaatgcccgatgagaacaccccagctggctcttctgcaggttttttttctggttttcccagatggcgtacggccgcagcccagtagctcgccctcaggggcggtacctaccagcctggagctccagcgcggcactgatggtggcaccctccagtctccttctgaagcaacagccacacggccagccgtacctggcctacccactgtggtgcccaccctggtgacaccaagcgcaccaggtaaccggaccgtcgacctgttcccggttctccctatctgcgtctgcgacctgacgcccggtgcatgcgatatcaactgctgctgcgacagggattgctatctcctgcaccctcggacggtgttctctttttgcttgcccggctccgttcggagcagctcgtgggtatgcgtcgataactctgtgattttccgcagcaattctccctttccaagccgagtgttcatggactccaatggcatcagacagttctgtgtccacgtcaataacagcaacctgaactattttcagaagctacagaaggtgaacgctacaaatttccaggccctcgctgccgagttcggcggagagtcttttacatcgacattccagacccaatcccccccatccttctatagagcaggcgacccaatcctgacctattttccaaagtggagcgtcatttcgttactgaggcagcccgccggagtgggggcaggaggtttatgtgcagagtccaaccctgcaggcttcctcgagtccaaatcaacaacttgtactcggttcttcaaaaatctggcatcttcctgcactttagactctgccctgaacgctgccagctattacaacttcaccgtgttgaaagttccccgctctatgactgatccacaaaacatggagtttcaagtgcctgtgatcctcacatctcaggccaacgcccctctgctggcaggaaacacgtgtcagaacgtggtgtctcaggttacctacgagattgagaccaacggaacattcggtatacagaaagtatccgtttcgctaggacagacaaacctcacagtcgaaccaggtgccagcctgcagcagcactttatcttgaggttcagagcctttcaacagagtacggctgctagcctaacctcccccagatccggcaatcccgggtacattgtgggcaagcccctacttgccttgacagatgacatctcatatagcatgacattactccaatcccaggggaacgggtcctgctcggtcaaaagacatgaagttcagtttggggtcaatgcaatctcaggatgcaaactgaggctaaagaaggccgactgctctcaccttcagcaggagatttaccaaacgttgcatggccgtccccggcccgaatatgttgcgatctttggtaacgcagaccccgcacagaaagggggatggacgcgcatcctaaaccgccattgttcaatatccgcaatcaattgcacatcttgttgcctcatccctgtgtcactcgaaatccaggtcctgtgggcctatgtcggcttactgtcgaatccacaggcgcacgtctccggtgtgcggttcctataccaatgccagagtattcaggactcccaacaggtcactgaagtaagtctcaccacactggttaactttgtggacatcacccagaagccccagccgcctcggggtcagcccaaaatggactggaagtggccattcgacttttttcctttcaaagtggctttttccagaggcgtattctcacagaaatgcagcgtgtcacctattctcattctctgcctgctcctcctcggagtgctgaatctcgaaactatgtag

SEQ ID NO: 335426 - DNA, 1878 bp, Artificial Sequence
  derived and/or modified sequence
atgaggctggagacagctgaggcctacgtgggccctgggggccctgagtgccccatgaggaccccccagctggccctgctgcaggtgttcttcctggtgtttcctgatggagtgcggccccagcccagcagcagccccagcggggctgtgcccaccagcctggagctgcagaggggcacagatggcggcaccctgcagagccccagcgaggccacagccaccaggcctgctgtgcccggcctgcccaccgtggtgcccaccctggtgacccccagcgcccctggcaacagaacagtggacctcttccctgtgctgcccatctgtgtgtgtgacctgacccctggggcctgtgacatcaactgctgctgtgaccgggactgctacctgctgcaccccaggacagtgttctccttctgcctgcccggctctgtgcgcagcagctcctgggtgtgtgtggacaacagcgtcatcttccgcagcaacagccccttccccagcagggtcttcatggacagcaatggcatccggcagttctgtgtgcacgtgaacaacagcaacctgaactacttccagaagctgcagaaggtgaatgccaccaacttccaggccctggccgctgagtttggaggagagagcttcaccagcaccttccagacccagagcccccccagcttctaccgggccggggaccccatcctgacctacttccccaagtggagcgtcatcagcctgctgcggcagcctgctggggtgggcgccggcggcctgtgtgccgagagcaacccagctggcttcctggagagcaagagcaccacctgcacccgcttcttcaagaacctggccagcagctgcaccctggacagcgccctgaatgctgccagctactacaacttcaccgtgctgaaggtgcccaggtccatgacagacccccagaacatggagttccaggtgcctgtgatcctgaccagccaggccaatgcccccctgctggccggcaacacctgccagaatgtggtgtcccaggtgacctatgaaattgagaccaacggcaccttcggcatccagaaggtgtctgtgtccctgggccagaccaacctgactgtggagcccggggccagcctgcagcagcacttcatcctgcgcttccgggccttccagcagagcacagctgccagcctgaccagccccaggagcggcaaccctggctacatcgtgggcaagcccctgctggccctgacagatgacatctcctacagcatgaccctgctgcagagccagggcaatggcagctgcagcgtgaagagacatgaggtgcagtttggagtgaatgccatcagcggctgcaagctgcggctgaagaaggctgactgcagccacctgcagcaggagatctaccagaccctgcacggccggcccaggccagaatatgtggccatctttggaaatgctgaccctgcccagaagggcggctggacccgcatcctgaacagacactgcagcatcagcgccatcaactgcaccagctgctgcctgatccctgtgtccctggagatccaggtgctgtgggcctacgtgggcctgctgagcaacccccaggcccacgtgtctggagtgcgcttcctgtaccagtgccagagcatccaggacagccagcaggtgacagaggtgtccctgaccaccctggtgaactttgtggacatcacccagaagccccagcccccccggggccagcccaagatggactggaagtggccctttgacttcttccccttcaaggtggccttcagccggggcgtcttcagccagaagtgcagcgtgagccccatcctgatcctgtgcctgctgctgctgggcgtgctgaacctggagaccatgtag

SEQ ID NO: 335427 - DNA, 1878 bp, Artificial Sequence
  derived and/or modified sequence
atgcggctggagaccgccgaggcctacgtgggccccggcggccccgaatgcccaatgagaaccccacagctggcactcctgcaggtgttcttcctcgtatttcctgacggagtacggccacagccttccagcagcccgagcggagctgttcctaccagcttggagctgcagagagggaccgacggagggaccttgcagagcccctccgaggcaaccgcaacgcgccccgcagtccccgggctaccgaccgtggtgcccactctggtgacgccctcagccccaggaaacaggacagtggatctgttccctgtgttgcctatatgtgtatgcgatcttactcccggggcctgtgacatcaattgctgctgcgaccgcgactgctaccttcttcacccacggacggtgttctctttttgccttccaggatcagtgcgatcctccagttgggtgtgcgttgacaacagcgtgatatttcgctccaactcaccttttccatctcgagtttttatggactccaacggcattcgacagttctgcgtgcacgtgaataattcgaacctaaactattttcagaagcttcagaaagtgaatgcgactaacttccaagctctcgcagccgaatttggtggtgagtcctttacctcaacctttcagactcagagtcctccatcattttacagagctggcgacccaatactgacgtactttcctaaatggagtgtcatatctctgctgagacagcctgcgggagtgggtgcaggcgggttatgcgcggaatctaatccagccggattcctagagtccaaatcaacaacctgtacaaggtttttcaagaatttagccagtagttgcactctggactccgctcttaatgctgcctcatattacaattttaccgtgctcaaagttcccagatccatgactgatccacaaaacatggagttccaggttccagtcattctgaccagccaggcaaatgcccctctgctcgccggaaatacatgtcagaacgtagtaagccaagttacttatgaaatagagaccaacggcactttcgggatccagaaggtgagcgtttctcttggccagaccaatctcaccgttgaaccaggggcttcactgcagcagcacttcatattgcggttccgggcttttcagcagagcacggccgcaagccttacaagtcctcgatcgggcaatcccggctacatagtgggcaaaccactgctggcattgaccgatgacataagctatagtatgactttgctgcagtcccagggtaatggatcctgctccgtaaaacgccatgaggttcaatttggggtaaatgcaatctcaggttgtaagcttagattgaagaaggcagattgttcccatctccagcaagaaatataccagacactgcacgggcgtccccggccggaatacgtggctattttcggaaacgccgatccggcccagaaaggcggctggactagaatcttaaacaggcattgctcaatttccgcgattaattgcacttcttgttgcctgattcccgtttctctggaaatccaggtgctgtgggcatatgtgggcttgctctccaacccccaagctcatgtgagcggtgtgagatttctgtaccaatgtcaaagcatacaggattcccagcaggtcacagaagtgagtttgaccactctggtgaactttgttgacatcacccagaaacctcaacccccacgtgggcagcctaaaatggactggaaatggccgttcgacttcttcccatttaaagtagctttctctcgcggtgtcttctctcagaaatgctccgtgagcccaatactcattctgtgcttgctgttacttggcgtgctgaatcttgagactatgtag

SEQ ID NO: 335428 - DNA, 1878 bp, Artificial Sequence
  derived and/or modified sequence
atgcggctcgaaactgcggaagcctacgtcggaccaggcggaccagagtgtcccatgcggaccccacagctggcccttttgcaagtattcttcctcgtgttcccagacggggtcaggccccagccaagtagtagcccttctggggctgtccccacaagcctagagcttcaacggggtacagatgggggtacactgcagtctccttctgaggccacggccactcgcccagctgtgcccggtctaccaactgtggtaccaacactggtgacacctagtgctcccggaaacaggaccgtggacctcttcccagtcctgcctatctgcgtttgtgatctcactcctggtgcatgtgatatcaactgctgttgtgaccgggactgctatcttctgcaccctcgtaccgtgttcagcttctgtctccctggctcggtccgcagctcttcatgggtatgtgtagataacagtgtcatatttcgatccaactctccttttccctctcgcgtattcatggacagcaatggtattcgtcaattttgcgtccacgtcaacaattcaaacctaaactattttcagaaactccagaaggtgaacgctactaatttccaggcccttgccgcagaattcggtggggagagttttacgtccacttttcagactcagagtcctccaagcttctatagagctggggatcccattttaacatattttcccaagtggtcggttatttctctcttgagacaacctgctggggtgggggctgggggtctctgtgctgaatctaatcctgctggttttctggagtcaaagagcacaacctgtacccggttctttaagaatttggctagctcctgcaccctcgactcggccctcaacgctgcaagttactacaactttacagtgttgaaggtgcctagaagcatgactgatccacagaacatggagttccaggtgccggttatcctgacatcacaggccaatgcgccactgttagccggaaacacctgccaaaacgtcgtgtctcaggtgacttacgagattgagaccaacggtacgtttggtattcagaaggtgagtgtttctttaggacagaccaacctgacagttgagcccggtgcctcgttgcagcaacatttcatcctgcgattcagagcttttcagcagagtaccgctgcaagcctgacatctcccaggtcaggaaacccaggatatatcgtgggaaagcctctccttgcactgactgatgacatctcctacagtatgactctgctccagtcacaagggaacggcagttgctcggtaaagaggcacgaggttcagtttggcgtgaacgctattagcgggtgcaagctccgcctgaagaaggccgactgcagccacttgcagcaggagatttaccagaccttacatggacgcccaaggcccgaatatgtggcgatcttcggaaacgcagatccagcccaaaaggggggttggacacggattctgaaccgccactgttccatctccgccatcaactgcaccagctgctgcctaataccagtttccctggagattcaggtgctctgggcctatgtaggcctcctgagcaatccacaggcacatgtgagcggagtgcgctttctgtaccagtgccagagcatccaagattctcagcaggtgactgaagttagcctgaccaccctggttaacttcgtggacattacgcagaaaccacagccccctcggggacagccgaaaatggactggaagtggccgttcgattttttccctttcaaagtagcattctctaggggagtgttttcacaaaagtgcagcgttagccctatactgatcctgtgcctgctcctcctgggcgtactgaatttggaaaccatgtag

SEQ ID NO: 335429 - DNA, 2739 bp, Artificial Sequence
  derived and/or modified sequence
ggttgccaggcaacggaggcacggcccggcccgcgttaaggaggagggcgcagaccgaaggacactgaaagagctgtaacaaccccactttcgattggttgaagagctctcagccttctcatgagccaatgagaagaggcacgcggatggcgtcagacgctatgcgactcctcccacccacgctctggcaatgcgattggagaccgcggaggcctacgtcggacccggaggccctgaatgccccatgcgcaccccacagctcgcgctcctgcaagtgttctttctggtgttccccgatggcgtccggcctcagccctcttcctccccatcaggggcagtgcccacgtctttggagctgcagcgagggacggatggcggaaccctccagtccccttcagaggcgactgcaactcgcccggccgtgcctggactccctacagtggtccctactctcgtgactccctcggcccctgggaataggactgtggacctcttcccagtcttaccgatctgtgtctgtgacttgactcctggagcctgcgatataaattgctgctgcgacagggactgctatcttctccatccgaggacagttttctccttctgccttccaggcagcgtaaggtcttcaagctgggtttgtgtagacaactctgttatcttcaggagtaattccccgtttccttcaagagttttcatggattctaatggaatcaggcagttttgtgtccatgtgaacaactcaaacttaaactatttccagaagcttcaaaaggtcaatgcaaccaacttccaggccctggctgcagagtttggaggcgaatcattcacttcaacattccaaactcaatcaccaccatctttttacagggctggggaccccattcttacttacttccccaagtggtctgtaataagcttgctgagacaacctgcaggagttggagctgggggactctgtgctgaaagcaatcctgcaggtttcctagagagtaaaagtacaacttgcactcgttttttcaagaacctggctagtagctgtaccttggattcagccctcaatgctgcctcttactataacttcacagtcttaaaggttccaagaagcatgactgatccacagaatatggagttccaggttcctgtaatacttacctcacaggctaatgctcctctgttggctggaaacacttgtcagaatgtagtttctcaggtcacctatgagatagagaccaatgggacttttggaatccagaaagtttctgtcagtttgggacaaaccaacctgactgttgagccaggcgcttccttacagcaacacttcatccttcgcttcagggcttttcaacagagcacagctgcttctctcaccagtcctagaagtgggaatcctggctatatagttgggaagccactcttggctctgactgatgatataagttactcaatgaccctcttacagagccagggtaatggaagttgctctgttaaaagacatgaagtgcagtttggagtgaatgcaatatctggatgcaagctcaggttgaagaaggcagactgcagccacttgcagcaggagatttatcagactcttcatggaaggcccagaccagagtatgttgccatctttggtaatgctgacccagcccagaaaggagggtggaccaggatcctcaacaggcactgcagcatttcagctataaactgtacttcctgctgtctcataccagtttccctggagatccaggtattgtgggcatatgtaggtctcctgtccaacccgcaagctcatgtatcaggagttcgattcctataccagtgccagtctatacaggattctcagcaagttacagaagtatctttgacaactcttgtgaactttgtggacattacccagaagccacagcctccaaggggccaacccaaaatggactggaaatggccattcgacttctttcccttcaaagtggcattcagcagaggagtattctctcaaaaatgctcagtctctcccatccttatcctgtgcctcttactacttggagttctcaacctagagactatgtgaagaaaagaaaataatcagatttcagttttccctatgagaaactctgaggcagccacttatcttggctaaatagaacctcacctgctcatgaccagagagcatttaggataatagaggacctaactgaaggaatccttgtatatgaaaggagttattttagaaaagcaataaaaatattttattcatcatagctctctgctttgggctctgcaggccaccagatacacatgaggcccctacttctcaagctgggaaggccaagagccttccttcagcctttctggttatgttacacctagctgaatgtttacaaggtctggatccatcagccctcaggcacagttgggccaagcagaaagagagaaacacttctgctgtcaccttgaatgaactcaggaatagcttccctctggactgtagaggagctaactgtttggaacagaaaactgctggctgttgattttgtctggttcctttgccaacatctgggcacaccctttgcccagacacgagtggggaaagcagttctttctcctcagtttccaaagtaaatggggaatcccagctttcttttctactagcaaatgaccctaccatttatttctgcctttttcttccgttcattgtgaggaaaaataaaactggttgagagctttgttgtactaattcca

SEQ ID NO: 335430 - DNA, 2734 bp, Artificial Sequence
  derived and/or modified sequence
ggttgccaggcaacggaggcacggcccggcccgcgttaaggaggagggcgcagaccgaaggacactgaaagagctgtaacaaccccactttcgattggttgaagagctctcagccttctcatgagccaatgagaagaggcacgcggatggcgtcagacgctatgcgactcctcccacccacgctctggcaatgcgattggagaccgcggaggcctacgtcggacccggaggccctgaatgccccatgcgcaccccacagctcgcgctcctgcaagtgttctttctggtgttccccgatggcgtccggcctcagccctcttcctccccatcaggggcagtgcccacgtctttggagctgcagcgagggacggatggcggaaccctccagtccccttcagaggcgactgcaactcgcccggccgtgcctggactccctacagtggtccctactctcgtgactccctcggcccctgggaataggactgtggacctcttcccagtcttaccgatctgtgtctgtgacttgactcctggagcctgcgatataaattgctgctgcgacagggactgctatcttctccatccgaggacagttttctccttctgccttccaggcagcgtaaggtcttcaagctgggtttgtgtagacaactctgttatcttcaggagtaattccccgtttccttcaagagttttcatggattctaatggaatcaggcagttttgtgtccatgtgaacaactcaaacttaaactatttccagaagcttcaaaaggtcaatgcaaccaacttccaggccctggctgcagagtttggaggcgaatcattcacttcaacattccaaactcaatcaccaccatctttttacagggctggggaccccattcttacttacttccccaagtggtctgtaataagcttgctgagacaacctgcaggagttggagctgggggactctgtgctgaaagcaatcctgcaggtttcctagagagtaaaagtacaacttgcactcgttttttcaagaacctggctagtagctgtaccttggattcagccctcaatgctgcctcttactataacttcacagtcttaaaggttccaagaagcatgactgatccacagaatatggagttccaggttcctgtaatacttacctcacaggctaatgctcctctgttggctggaaacacttgtcagaatgtagtttctcaggtcacctatgagatagagaccaatgggacttttggaatccagaaagtttctgtcagtttgggacaaaccaacctgactgttgagccaggcgcttccttacagcaacacttcatccttcgcttcagggcttttcaacagagcacagctgcttctctcaccagtcctagaagtgggaatcctggctatatagttgggaagccactcttggctctgactgatgatataagttactcaatgaccctcttacagagccagggtaatggaagttgctctgttaaaagacatgaagtgcagtttggagtgaatgcaatatctggatgcaagctcaggttgaagaaggcagactgcagccacttgcagcaggagatttatcagactcttcatggaaggcccagaccagagtatgttgccatctttggtaatgctgacccagcccagaaaggagggtggaccaggatcctcaacaggcactgcagcatttcagctataaactgtacttcctgctgtctcataccagtttccctggagatccaggtattgtgggcatatgtaggtctcctgtccaacccgcaagctcatgtatcaggagttcgattcctataccagtgccagtctatacaggattctcagcaagttacagaagtatctttgacaactcttgtgaactttgtggacattacccagaagccacagcctccaaggggccaacccaaaatggactggaaatggccattcgacttctttcccttcaaagtggcattcagcagaggagtattctctcaaaaatgctcagtctctcccatccttatcctgtgcctcttactacttggagttctcaacctagagactatgtgaagaaaagaaaataatcagatttcagttttccctatgagaaactctgaggcagccacttatcttggctaaatagaacctcacctgctcatgaccagagagcatttaggataatagaggacctaactgaaggaatccttgtatatgaaaggagttattttagaaaagcaataaaaatattttattcatcatagctctctgctttgggctctgcaggccaccagatacacatgaggcccctacttctcaagctgggaaggccaagagccttccttcagcctttctggttatgttacacctagctgaatgtttacaaggtctggatccatcagccctcaggcacagttgggccaagcagaaagagagaaacacttctgctgtcaccttgaatgaactcaggaatagcttccctctggactgtagaggagctaactgtttggaacagaaaactgctggctgttgattttgtctggttcctttgccaacatctgggcacaccctttgcccagacacgagtggggaaagcagttctttctcctcagtttccaaagtaaatggggaatcccagctttcttttctactagcaaatgaccctaccatttatttctgcctttttcttccgttcattgtgaggaaaaataaaactggttgagagctttgttgtactaa

SEQ ID NO: 335431 - DNA, 1332 bp, Artificial Sequence
  derived and/or modified sequence
atgagaaccccccagctggccctgctgcaggtgttcttcctggtgttccccgacggcgtgagaccccagcccagcagcagccccagcggcgccgtgcccaccagcctggagctgcagagaggcaccgacggcggcaccctgcagagccccagcgaggccaccgccaccagacccgccgtgcccggcctgcccaccgtggtgcccaccctggtgacccccagcgcccccggcaacagaaccgtggacctgttccccgtgctgcccatctgcgtgtgcgacctgacccccggcgcctgcgacatcaactgctgctgcgacagagactgctacctgctgcaccccagaaccgtgttcagcttctgcctgcccggcagcgtgagaagcagcagctgggtgtgcgtggacaacagcgtgatcttcagaagcaacagccccttccccagcagagtgttcatggacagcaacggcatcagacagttctgcgtgcacgtgaacaacagcaacctgaactacttccagaagctgcagaaggtgaacgccaccaacttccaggccctggccgccgagttcggcggcgagagcttcaccagcaccttccagacccagagcccccccagcttctacagagccggcgaccccatcctgacctacttccccaagtggagcgtgatcagcctgctgagacagcccgccggcgtgggcgccggcggcctgtgcgccgagagcaaccccgccggcttcctggagagcaagagcaccacctgcaccagattcttcaagaacctggccagcagctgcaccctggacagcgccctgaacgccgccagctactacaacttcaccgtgctgaaggtgcccagaagcatgaccgacccccagaacatggagttccaggtgcccgtgatcctgaccagccaggccaacgcccccctgctggccggcaacacctgccagaacgtggtgagccaggtgacctacgagatcgagaccaacggcaccttcggcatccagaaggtgagcgtgagcctgggccagaccaacctgaccgtggagcccggcgccagcctgcagcagcacttcatcctgagattcagagccttccagcagagcaccgccgccagcctgaccagccccagaagcggcaaccccggctacatcgtgggcaagcccctgctggccctgaccgacgacatcagctacagcgtgagcttcctggagctgggcggcctgctgcagcccaacgagaagagctgcaagggcttccagacctacgtgagactggccaagggcgaggagttcttcgtgcactacaacgaggtgctgatctactag

SEQ ID NO: 335432 - DNA, 1332 bp, Artificial Sequence
  derived and/or modified sequence
atgcgtactcctcaactcgcattgctacaggtcttttttctggtgtttcccgatggggtgcgtccacagcccagctctagtccttccggagctgtgccaacctccttggagctgcagcgagggaccgatggtggcaccctgcagtctccttctgaagctactgctacaaggccagccgtcccaggactccccaccgtggtgccaacgcttgttacgccctccgctcccggcaatagaaccgtggacctttttcctgtactcccgatttgcgtgtgcgaccttacccctggggcgtgtgacatcaattgctgctgcgatcgggactgttatcttctgcatcctcggaccgtattcagcttctgtttaccaggctctgtgaggagcagctcctgggtctgcgtagataattccgttattttccgatccaatagcccatttccctcgcgcgtctttatggacagcaacggcattcgccagttctgcgttcacgtcaacaacagtaatcttaactatttccaaaagctacagaaggtgaatgcaaccaactttcaggccttggccgccgaattcgggggagaaagttttacaagcacattccaaactcagtctcccccctcgttctatcgggccggggaccctatattaacctatttccctaagtggtccgtgattagcctcttaaggcagcctgcaggggtgggcgccggaggactttgtgctgagtccaatcccgcaggatttctggaatcgaagagtaccacctgtactaggttttttaaaaatctcgcgagctcctgtacactagattccgcactgaatgctgcatcgtattacaatttcaccgtactcaaagttccacgatccatgaccgacccccagaacatggagtttcaagtccctgtaatcctgacaagtcaggcaaatgcaccactgctcgcgggcaacacatgccagaatgtagtgtcacaggtgacttatgagattgagacaaatggaacttttggcatacagaaggtgtccgtctcgttaggacagaccaatttgaccgttgagcctggcgcgtccttgcagcagcactttattctgaggttccgcgcattccagcagtccacagctgcctccttaacttcccctcggagcggtaaccctggctacatcgtaggtaagcccctcttagcgctgacagacgacataagttacagcgtcagtttcctggaacttgggggtctgcttcagccaaacgagaaaagctgcaaagggtttcaaacttacgtgaggttagcaaaaggtgaggagtttttcgtccattacaatgaggtgttaatctattag

SEQ ID NO: 335433 - DNA, 1332 bp, Artificial Sequence
  derived and/or modified sequence
atgaggaccccccagctggccctgctgcaggtgttcttcctggtgtttcctgatggagtgcggccccagcccagcagcagccccagcggggctgtgcccaccagcctggagctgcagaggggcacagatggcggcaccctgcagagccccagcgaggccacagccaccaggcctgctgtgcccggcctgcccaccgtggtgcccaccctggtgacccccagcgcccctggcaacagaacagtggacctcttccctgtgctgcccatctgtgtgtgtgacctgacccctggggcctgtgacatcaactgctgctgtgaccgggactgctacctgctgcaccccaggacagtgttctccttctgcctgcccggctctgtgcgcagcagctcctgggtgtgtgtggacaacagcgtcatcttccgcagcaacagccccttccccagcagggtcttcatggacagcaatggcatccggcagttctgtgtgcacgtgaacaacagcaacctgaactacttccagaagctgcagaaggtgaatgccaccaacttccaggccctggccgctgagtttggaggagagagcttcaccagcaccttccagacccagagcccccccagcttctaccgggccggggaccccatcctgacctacttccccaagtggagcgtcatcagcctgctgcggcagcctgctggggtgggcgccggcggcctgtgtgccgagagcaacccagctggcttcctggagagcaagagcaccacctgcacccgcttcttcaagaacctggccagcagctgcaccctggacagcgccctgaatgctgccagctactacaacttcaccgtgctgaaggtgcccaggtccatgacagacccccagaacatggagttccaggtgcctgtgatcctgaccagccaggccaatgcccccctgctggccggcaacacctgccagaatgtggtgtcccaggtgacctatgaaattgagaccaacggcaccttcggcatccagaaggtgtctgtgtccctgggccagaccaacctgactgtggagcccggggccagcctgcagcagcacttcatcctgcgcttccgggccttccagcagagcacagctgccagcctgaccagccccaggagcggcaaccctggctacatcgtgggcaagcccctgctggccctgacagatgacatctcctacagcgtgtccttcctggagctgggcggcctgctgcagcccaatgagaagagctgcaagggcttccagacctacgtgcggctggccaagggggaggagttctttgtgcactacaatgaggtgctgatctactag

SEQ ID NO: 335434 - DNA, 1332 bp, Artificial Sequence
  derived and/or modified sequence
atgcggaccccccagctggccctgctgcaggtgttcttcctggtgttccccgatggagtgcggccacagccgagtagtagtccatctggggcagtcccaacatctctagaactgcagagaggtaccgacggtggtaccttgcagagcccatcagaagcaaccgcaacccggcctgctgtaccaggcctgcctaccgttgtccccaccctggtgacaccctccgcacccggaaatagaaccgtggacctcttccccgtgttgcccatctgtgtgtgtgaccttactccaggcgcatgcgatataaactgctgttgcgatcgtgattgttacctgctgcatccacggacggtgttttccttttgcctgcctggctctgtcaggtcttcttcttgggtgtgcgtggacaacagcgtcatcttcagaagtaattcccccttcccatcgagagttttcatggacagcaatggcatccgccagttctgtgtccacgtgaataattctaacctcaattattttcagaagctacaaaaggtgaatgctactaatttccaggcactggccgccgagttcggtggagagagtttcacaagcaccttccagacccagtctccgccctccttttatcgggctggcgaccccatcctcacctatttccccaagtggagcgtgatatcgttgctacggcagccggccggtgtcggggcgggaggcctctgcgccgagagcaaccccgctgggttcctggagagcaagtcaacaacatgcacccgctttttcaagaacctcgcttcgagctgcaccttggactcggccctgaatgccgcctcttattataactttactgtgctaaaggtaccccgaagcatgacggacccccagaatatggaatttcaggtccccgttatcctgacatcacaggccaacgctccactgcttgcgggcaacacctgtcagaacgttgtcagccaggtgacatatgagattgaaacaaatggcactttcggtatccagaaggtctcggtaagtctcggccagacaaacttgacagtggaacccggggcctctctccaacagcatttcattctgcggtttcgggcctttcaacagtccaccgcagcctctctgacatcaccgcgatcagggaacccaggatacattgttggaaagccccttcttgcgcttaccgatgacatttcgtacagcgtgtcctttctggagttggggggcctgttgcagcctaatgagaagagctgtaagggctttcagacttacgtgaggctggctaagggcgaggagttcttcgtgcactacaatgaagtgttaatttactag

SEQ ID NO: 335435 - DNA, 1332 bp, Artificial Sequence
  derived and/or modified sequence
atgagaaccccacaactggcgctccttcaggtgttcttcttggtcttccctgatggggtgcggccacaaccctcatcgtccccaagcggggctgtaccaacatccctggagttacagaggggaacagacggaggcacactgcagagcccttcggaagccaccgccacccgcccagccgtccccggactgcctaccgtagtgcccactctggtgacaccatcagcgcctggtaaccgtactgtggacttgtttcctgtgctcccaatatgcgtctgcgacctgacacccggagcatgtgatattaattgctgctgcgatagagactgctatttacttcatccaagaacggttttcagcttttgtctcccgggttccgtgcgaagttcaagctgggtatgcgtagacaactctgttatttttcggagcaatagtccttttccctcccgagtgtttatggattcgaacgggatcaggcagttctgcgtacatgtcaacaacagcaatctgaattacttccaaaagcttcaaaaagtaaacgcaactaatttccaggcgctcgcggcagaattcggcggtgagtctttcacgtcaacttttcagacccagtctccaccttctttttaccgggcaggggatccaattttgacttatttccctaagtggtccgtcatcagcctgctgcgccagcccgctggggtcggtgcaggcggactgtgtgcagagtcaaatcctgcaggattcctcgagtctaagagtacaacttgcacaagattctttaaaaatttagcgtcatcctgcacgctcgattccgccctcaacgctgcgtcctactacaattttacagtcctgaaggtacctagatctatgaccgatccccaaaatatggaatttcaggtcccagtaatcctgacgtcacaggccaatgctcctctgctggctgggaacacatgccaaaatgtcgttagtcaggttacttatgaaatcgagacaaacgggacctttggcattcagaaagtctccgtgtccctgggtcagaccaatctgacagtcgagccaggcgcttctttacaacagcacttcatcttgcgcttcagggcattccagcagtccacagccgcaagcctgacaagccctagatctgggaacccagggtatattgtgggaaagcccctgcttgctctgacagacgatataagctattccgtgtccttcctggaactcggaggactgttgcagccgaatgaaaagtcatgtaaaggtttccagacttatgtgagactggcaaagggtgaagagtttttcgtgcattacaatgaagtcctgatctactag

SEQ ID NO: 335436 - DNA, 1464 bp, Artificial Sequence
  derived and/or modified sequence
atgcgcaccccacagctcgcgctcctgcaagtgttctttctggtgttccccgatggcgtccggcctcagccctcttcctccccatcaggggcagtgcccacgtctttggagctgcagcgagggacggatggcggaaccctccagtccccttcagaggcgactgcaactcgcccggccgtgcctggactccctacagtggtccctactctcgtgactccctcggcccctgggaataggactgtggacctcttcccagtcttaccgatctgtgtctgtgacttgactcctggagcctgcgatataaattgctgctgcgacagggactgctatcttctccatccgaggacagttttctccttctgccttccaggcagcgtaaggtcttcaagctgggtttgtgtagacaactctgttatcttcaggagtaattccccgtttccttcaagagttttcatggattctaatggaatcaggcagttttgtgtccatgtgaacaactcaaacttaaactatttccagaagcttcaaaaggtcaatgcaaccaacttccaggccctggctgcagagtttggaggcgaatcattcacttcaacattccaaactcaatcaccaccatctttttacagggctggggaccccattcttacttacttccccaagtggtctgtaataagcttgctgagacaacctgcaggagttggagctgggggactctgtgctgaaagcaatcctgcaggtttcctagagagtaaaagtacaacttgcactcgttttttcaagaacctggctagtagctgtaccttggattcagccctcaatgctgcctcttactataacttcacagtcttaaaggttccaagaagcatgactgatccacagaatatggagttccaggttcctgtaatacttacctcacaggctaatgctcctctgttggctggaaacacttgtcagaatgtagtttctcaggtcacctatgagatagagaccaatgggacttttggaatccagaaagtttctgtcagtttgggacaaaccaacctgactgttgagccaggcgcttccttacagcaacacttcatccttcgcttcagggcttttcaacagagcacagctgcttctctcaccagtcctagaagtgggaatcctggctatatagttgggaagccactcttggctctgactgatgatataagttactcagtatcctttttagagctgggtggcctgttgcagcctaatgagaaaagctgcaaaggctttcaaacttatgttagactagccaaaggtgaggaattttttgttcattataatgaggtacttatatactaatatatggttaatcatttttggaatctagttgtctctctgtggttttctgaggaaaaaaatcacaaatttgtgactcgaacattatgatagtaatacaaaataaatagcattaaaggagaatgagaacataaa

SEQ ID NO: 335437 - protein, 607 aa, Artificial Sequence
  derived and/or modified sequence
MAAAFPVCYPLGRLLDWALRQEISTFYTREKLLETLRAADPYSDLVKEELNIIQGALELRTKVVEEVLTPLGDCFMLRSDAVLDFATVSEILRSGYTRIPVYEGDQRHNIVDILFVKDLAFVDPDDCTPLLTVTRFYNRPLHCVFNDTRLDTVLEEFKKGKSHLAIVQRVNNEGEGDPFYEVMGIVTLEDIIEEIIKSEILDETDLYTDNRKKQRVPQRERKRHDFSLFKLSDTEMRVKISPQLLLATHRFMATEVEPFKSLYLSEKILLRLLKHPNVIQELKFDEKNKKAPEHYLYQRNRPVDYFVLLLQGKVEVEVGKEGLRFENGAFTYYGVPAIMTTACSDNDVRKVGSLAGSSVFLPVSVSRTFAVSRGDSLAGSPVNRSPSRCSGLNRSESPNRERSDFGGSNTQLYSSSNNLYMPDYSVHILSDVQFVKITRQQYQNALTACHMDSSPQSPDMEAFTDGDSTKAPTTRGTPQTPKDDPAITLLNNRNSLPCSRSDGLRSPSEVVYLRMEELAFTQEEMTDFEEHSTQQLTLSPAAVPTRAASDSECCNINLDTETSPCSSDFEENVGKKLLRTLSGQKRKRSPEGERTSEDNSNLTPLIT

SEQ ID NO: 335438 - DNA, 1824 bp, Artificial Sequence
  derived and/or modified sequence
atggcggcggcgtttccagtctgctacccgttagggcggctgcttgattgggccctccgacaagagatatcgaccttttacacaagggagaaactccttgagaccctcagagctgctgacccctactctgaccttgtcaaggaagagttaaatatcattcagggggctctggagctcagaactaaggtcgtggaggaggtcctcaccccgctgggggattgctttatgctgaggtctgatgccgtgctggattttgcaacagtgtctgagatattgaggtcaggttacacacgcatccctgtctatgaaggagatcagagacataatatcgtggacatattgtttgtcaaagatctggcttttgtggatccggacgattgcacccccctcctgaccgtgacccggttttataataggcctctgcactgcgtttttaacgatacaaggctcgataccgtattggaagagtttaagaaggggaagtcccacttggccattgtgcagagggtgaacaatgaaggagaaggcgaccccttttacgaggttatgggcatcgttactctcgaagacatcattgaagagatcataaaaagcgagattctcgacgagaccgatctctacactgacaatcggaagaaacagagggttccccaacgcgaacgcaagcggcacgatttctctctcttcaaactttctgacacggagatgcgagtaaaaatttcacctcagctactgttagctacccacaggttcatggcaacagaggtcgagccctttaagtccctttacctgagtgagaagattctcctgagactattgaagcaccctaatgtcatacaggaactgaagttcgacgagaagaacaagaaagctccagagcattacctgtaccagagaaacagaccagtggactattttgtgctactgttgcagggcaaggtggaggtggaggtcgggaaagaaggcctgcgttttgagaatggtgcatttacctactatggagtcccagctataatgaccacagcatgttccgacaatgacgtccgaaaggtgggttcacttgctggaagttctgtttttttgccagtatctgtctccagaacttttgccgtcagtagaggcgattcactggccggcagtccagtgaaccgatctcctagtaggtgttcggggctaaaccggtccgagtcccccaaccgagagagatccgatttcggagggtcaaacacccagctgtattcttcttcaaataacctctatatgcccgactacagtgtccacatcctcagcgatgtgcagtttgtgaagatcactcggcaacagtaccaaaatgcgctgacggcctgccatatggactcttcgccccagtcacctgatatggaagcgtttacggatggagacagcaccaaggcaccgaccactcggggaactccccaaacccctaaagacgatccggcaattacactgctgaacaatagaaattctctgccgtgctctcggtctgatggactccgttctccatcggaggtggtctatctgcgtatggaagagctcgcatttactcaggaggagatgactgatttcgaagaacatagcacacaacagctgacgttatcgccagctgcagttcccacacgggccgcatcagacagtgaatgctgcaatatcaaccttgatacagaaactagcccgtgctcaagcgatttcgaggagaacgtgggcaagaagttactgcgaacactctcaggccagaagcgaaagaggagccctgagggtgagaggacgtccgaggacaattcaaacttgaccccactgattacatag

SEQ ID NO: 335439 - DNA, 1824 bp, Artificial Sequence
  derived and/or modified sequence
atggctgctgccttccctgtgtgctaccccctgggccgcctgctggactgggccctgcggcaggagatcagcaccttctacacccgggagaagctgctggagaccctgcgggctgctgacccctacagcgacctggtgaaggaggagctgaacatcatccagggcgccctggagctgcggaccaaggtggtggaggaggtgctgacccccctgggggactgcttcatgctgcggagtgatgctgtgctggactttgccaccgtgtctgagatcctgcggagcggctacacccgcatccctgtgtatgaaggagaccagaggcacaacatcgtggacatcctgtttgtgaaggacctggcctttgtggaccctgatgactgcacccccctgctgactgtgacccgcttctacaaccggcccctgcactgtgtgttcaatgacacccggctggacacagtgctggaggagttcaagaagggcaagagccacctggccatcgtgcagagggtgaacaatgaaggagagggggaccccttctatgaggtgatgggcatcgtgaccctggaggacatcatcgaggagatcatcaagtctgagatcctggatgaaacagacctgtacacagacaacaggaagaagcagagggtgccccagcgggagaggaagagacatgacttcagcctcttcaagctgagtgacacagagatgagggtgaagatcagcccccagctgctgctggccacccaccgcttcatggccacagaggtggagcccttcaagagcctgtacctgtctgagaagatcctgctgcggctgctgaagcaccccaacgtcatccaggagctgaagtttgatgagaagaacaagaaggcccctgagcactacctgtaccagaggaacagacctgtggactactttgtgctgctgctgcagggcaaggtggaggtggaggtgggcaaggagggcctgcgctttgaaaatggagccttcacctactatggagtgcctgccatcatgaccacagcctgcagcgacaatgatgtgaggaaggtgggcagcctggccggcagcagcgtcttcctgcctgtgtctgtgtccaggacctttgctgtgtccagaggagacagcctggccggcagccctgtgaacagaagccccagccgctgcagcggcctgaacagaagtgagagccccaaccgggagaggagtgactttggaggcagcaacacccagctgtacagcagcagcaacaacctgtacatgccagactacagcgtgcacatcctgagtgatgtgcagtttgtgaagatcacccggcagcagtaccagaatgccctgacagcctgccacatggacagcagcccccagagcccagacatggaggccttcacagatggagacagcaccaaggcccccaccacccggggcaccccccagacccccaaggatgatcctgccatcaccctgctgaacaacagaaacagcctgccctgcagcagaagtgatggcctgcggagccccagcgaggtggtgtacctgaggatggaggagctggccttcacccaggaggagatgacagactttgaggagcacagcacccagcagctgaccctgagccctgctgctgtgcccaccagggctgccagtgacagcgagtgctgcaacatcaacctggacacagagaccagcccctgcagcagtgactttgaagaaaatgtgggcaagaagctgctgcggaccctgagcggccagaagaggaagaggagccctgagggggagaggaccagcgaggacaacagcaacctgacccccctcatcacctag

SEQ ID NO: 335440 - DNA, 1824 bp, Artificial Sequence
  derived and/or modified sequence
atggccgccgccttccccgtgtgctaccccctgggccggctgctggattgggccctgcggcaggagatatctactttctacacacgggagaagctgctagagactttgcgcgctgccgatccctattccgacctcgtcaaagaagagctgaatatcattcagggggcactggagctgcgcaccaaggttgttgaggaagttctgactcctctgggagattgtttcatgctccggtccgatgccgtgctggactttgccacagtctctgagatccttagaagcggatatactcgtatcccagtttatgagggggaccagcgacacaacattgtggacatactttttgtcaaggacctcgcctttgtggaccctgatgattgtacccccctcctgactgtgacccggttttacaataggcctttacattgtgtgttcaacgacacccgtctcgataccgtgttggaagagttcaagaaagggaagtcccatctggcgattgttcagcgtgtcaacaatgagggggaaggcgatcctttttacgaggttatggggatcgtgacactcgaggacatcatcgaggagataatcaagtccgagatcctggatgaaacagatctctacactgataacagaaagaagcaaagagtgccacaacgcgagcgaaagagacatgatttcagcctttttaaactgtccgacactgagatgagggttaaaatatccccacagctcttactggccacgcatagatttatggctaccgaagtcgagcccttcaagagcctctacttgtcagagaagattctgctgaggttgctgaagcaccctaatgtcattcaggagctgaagttcgatgaaaagaataaaaaagctccggagcactatctgtaccagcgcaaccgccccgtagattacttcgtactcctcctccaggggaaagtggaggtcgaagtggggaaggagggcctgagatttgaaaacggggcgtttacctattacggcgtgccagcgataatgactacagcctgctcggacaacgacgttcgcaaggtcgggagcctagccggcagttctgtttttttacccgtctctgttagtaggacattcgctgtgagtaggggtgacagtcttgccggatcacccgtgaacaggagtccttcccggtgctctggcctgaaccgaagcgagagccctaatagagagaggtccgacttcggtggctccaatacacaactgtacagttcttctaacaacctgtacatgccagactacagtgttcacatcctttcagacgtgcagtttgtgaagatcaccaggcagcagtatcagaacgcactgaccgcctgccacatggacagttcccctcaaagcccagacatggaggcgttcacagacggtgattccacaaaggctccaaccacccgcgggactccacagacgcccaaggacgaccctgccataacactcctgaacaaccggaactccctcccctgcagccgctccgacggattgcggtccccttccgaggtggtataccttcggatggaagaactggcctttacacaggaggaaatgacggactttgaagagcactctactcagcagctcaccctgtccccagccgccgtgcccacacgggccgcatccgactccgagtgctgcaacattaatttggacaccgagactagcccctgctcctcagactttgaggagaacgttggtaagaagttgctgcgtacgctcagcggtcaaaaaaggaagaggtcgccagagggcgaacgaacatctgaagacaatagtaatctgactcccctgatcacatag

SEQ ID NO: 335441 - DNA, 1824 bp, Artificial Sequence
  derived and/or modified sequence
atggctgccgctttccccgtctgttatcctttagggcgattattagattgggccttaagacaggagatcagtacgttctacacccgagagaagctgttggagaccctccgcgcagccgacccttatagtgatctcgtgaaagaggaactgaacataatccagggcgctctggaactccgtaccaaggtagtagaagaggtactcacacccctgggtgactgtttcatgttgcgatcagacgccgtactagacttcgcaactgtttccgagatcctgcgcagtggttacacacgtattccggtatacgaaggtgatcaaaggcacaacatcgttgatattctgtttgtgaaagatcttgcgtttgtcgaccccgatgactgtacaccacttctgacagtaacaaggttttacaatcgacccttgcactgtgtattcaatgacactcgactcgacacggtgttagaggagttcaagaaggggaagagtcatctggccattgttcaacgggtaaataatgagggggagggcgatccattttacgaagtgatgggaattgtcactcttgaggatataattgaggagattattaagtcagaaatcttggacgagacggacctctatactgacaacagaaaaaaacagcgtgtcccccagcgagaacgcaaaagacatgacttttcgttatttaagctgtctgacactgaaatgagggtcaaaatctcacctcagttgttgttggccacacatagatttatggccacagaggtcgaaccatttaaatccctctatctttccgaaaagatcctgctgagactactgaagcacccaaacgtaattcaggaactgaagttcgacgagaagaacaaaaaggcacctgagcactatctgtatcaaaggaatcggcctgtagactattttgtactgctgttgcaggggaaggtggaggtggaagtggggaaggagggcctgcgcttcgagaatggggcttttacctattatggcgtgcctgcaatcatgacaacagcttgtagcgataacgacgtgagaaaggtcggaagcctggcaggctcttctgtgtttctgcctgtgtcagtatccagaacctttgcggtcagtaggggggatagtttggcgggaagtccggtgaacaggtccccatcccgatgctctgggctcaaccgcagcgaatctcctaaccgggagcgatccgatttcggaggcagcaacacccaattatactccagttccaacaatctgtacatgcctgattactcggtgcacatcctctccgatgtgcagttcgtgaaaattactagacaacagtaccaaaacgctctgaccgcctgccacatggacagcagcccacaatcgcctgatatggaggcctttactgatggggattccaccaaggctccgaccacaagaggtacaccccagaccccgaaggacgaccccgctatcaccttgttaaataaccggaactcgctgccgtgctcaaggtctgacggtctgcggtcaccatccgaggttgtgtatttgcggatggaggaactcgcttttacccaagaggagatgacggattttgaagagcacagcacacagcagctcactctgtcccccgctgccgtcccaacccgggcagcttcagattctgagtgctgcaacataaatctagacacggagacctcaccttgctcaagcgattttgaagagaacgtggggaagaaacttctacgcacccttagtgggcagaaacgaaaacgcagcccagaaggcgagagaacatcagaggacaactctaatcttacccccctgatcacatag

SEQ ID NO: 335442 - DNA, 2399 bp, Artificial Sequence
  derived and/or modified sequence
aagctcttttcactctgcgcctgggatgggcgcgcgtggcaccaccacggcgccgccggcggcttcctgctgcgcgttcgcccgcggttgtacggcccaggcggggacctgctgccccctgcgtggctgcgggcgctcggggcgctcctgctgctagccttgtcggccctgttcagcggcctgcgcctgagcctgctgtcgctggacccggtggagttacgggtgctgcggaacagcggctcggccgccgagcaggagcaggcgcgccgcgtgcaggccgttcgcggcagggggacccatctgctctgcaccctactcctgggccaagccggagccaacgcggccctggctggctggctgtacacctcgctgccgccgggcttcgggggcaccggggaagactacagcgaagaggggatccacttcccgtggctgccggcgctcgtgtgcaccggcgcggtattcctgggcgccgaaatctgcccctactcagtgtgttcgcggcacgggctggccatcgcctcgcacagcgtgtgcctgacccggcttctgatggcagccgccttccccgtgtgctacccgctgggccgcctgctggactgggcgctgcgccaggagataagcaccttctacacgcgggagaagttgctggagacgttgcgggccgcagacccctacagtgacctggtgaaggaggagctcaacatcatacagggtgccctggagctgcgcaccaaagttgtggaggaggtgctgacccccctgggagactgcttcatgctgcgctcagacgcggtgctcgacttcgccactgtctccgagatcctgcgcagcggctacactcgcatcccagtgtacgagggtgaccagcggcacaacattgtggacattttatttgtcaaggacttggccttcgtggaccccgacgactgcaccccgctcctcactgtcacccgcttctacaaccggcccctgcattgtgttttcaatgacacccgactggacacggttctggaggagtttaagaagggaaaatctcacctggccattgtccagcgggtgaataatgagggagaaggggaccctttctatgaggtgatgggcattgtcacgctggaggatatcatagaggagattatcaagtcggagatcctggatgaaactgatctctacactgacaatcggaaaaagcagagggtcccgcaacgggagcggaagcggcatgacttctccttgtttaagctttcggacacggagatgcgggtgaagatctcaccacagcttctgctagccacacaccgcttcatggccacagaagtggagccctttaagtctctgtacctttcggagaagatcctgctccggctcctgaaacatcccaacgtgatccaggagctgaagtttgatgagaagaacaagaaggccccggaacactacctctaccagcgcaaccgccctgtggactactttgtgctgcttctacagggtaaagtggaggtggaggttggtaaggaaggccttcgctttgaaaatggagcctttacttactatggcgtcccagccatcatgaccactgcttgctcagataatgacgtgcggaaggttggaagtctggctggatcttctgtctttctgcctgtctctgtgtctcgtaccttcgctgtcagcagaggggactctctggcaggctccccagtaaaccggtccccttctcgctgcagtgggttgaatcgctctgagtctccaaaccgagagcgcagtgactttgggggcagcaacacccagctgtacagcagcagcaacaacctctacatgcctgactactcagtccacatcctcagcgatgtgcagtttgtgaagatcacacggcagcaatatcagaacgcactcactgcctgccacatggacagctcacctcagtcccctgacatggaggccttcacagacggggactccactaaggcccccacaacccggggcacaccccagacccctaaggatgaccccgccatcacgctcctcaacaacaggaacagcctgccgtgcagccgctcagacgggctgagaagccccagcgaggtagtgtacctgaggatggaggagctggccttcacccaggaagaaatgactgacttcgaggagcacagcacacagcagctcacgctgtctcctgcagccgttcccacgagagcagcatcagatagtgaatgttgtaacatcaacctggatacagagaccagcccctgcagtagcgattttgaggaaaacgtgggcaagaagctgctgagaaccttgagtggccaaaaaaggaagaggtcaccagaaggagagagaacctctgaggacaactccaatttaacacctctgatcacatgacagggcaaagccagcattcactg

SEQ ID NO: 335443 - DNA, 1824 bp, Artificial Sequence
  derived and/or modified sequence
atggccgccgccttccccgtgtgctaccccctgggcagactgctggactgggccctgagacaggagatcagcaccttctacaccagagagaagctgctggagaccctgagagccgccgacccctacagcgacctggtgaaggaggagctgaacatcatccagggcgccctggagctgagaaccaaggtggtggaggaggtgctgacccccctgggcgactgcttcatgctgagaagcgacgccgtgctggacttcgccaccgtgagcgagatcctgagaagcggctacaccagaatccccgtgtacgagggcgaccagagacacaacatcgtggacatcctgttcgtgaaggacctggccttcgtggaccccgacgactgcacccccctgctgaccgtgaccagattctacaacagacccctgcactgcgtgttcaacgacaccagactggacaccgtgctggaggagttcaagaagggcaagagccacctggccatcgtgcagagagtgaacaacgagggcgagggcgaccccttctacgaggtgatgggcatcgtgaccctggaggacatcatcgaggagatcatcaagagcgagatcctggacgagaccgacctgtacaccgacaacagaaagaagcagagagtgccccagagagagagaaagagacacgacttcagcctgttcaagctgagcgacaccgagatgagagtgaagatcagcccccagctgctgctggccacccacagattcatggccaccgaggtggagcccttcaagagcctgtacctgagcgagaagatcctgctgagactgctgaagcaccccaacgtgatccaggagctgaagttcgacgagaagaacaagaaggcccccgagcactacctgtaccagagaaacagacccgtggactacttcgtgctgctgctgcagggcaaggtggaggtggaggtgggcaaggagggcctgagattcgagaacggcgccttcacctactacggcgtgcccgccatcatgaccaccgcctgcagcgacaacgacgtgagaaaggtgggcagcctggccggcagcagcgtgttcctgcccgtgagcgtgagcagaaccttcgccgtgagcagaggcgacagcctggccggcagccccgtgaacagaagccccagcagatgcagcggcctgaacagaagcgagagccccaacagagagagaagcgacttcggcggcagcaacacccagctgtacagcagcagcaacaacctgtacatgcccgactacagcgtgcacatcctgagcgacgtgcagttcgtgaagatcaccagacagcagtaccagaacgccctgaccgcctgccacatggacagcagcccccagagccccgacatggaggccttcaccgacggcgacagcaccaaggcccccaccaccagaggcaccccccagacccccaaggacgaccccgccatcaccctgctgaacaacagaaacagcctgccctgcagcagaagcgacggcctgagaagccccagcgaggtggtgtacctgagaatggaggagctggccttcacccaggaggagatgaccgacttcgaggagcacagcacccagcagctgaccctgagccccgccgccgtgcccaccagagccgccagcgacagcgagtgctgcaacatcaacctggacaccgagaccagcccctgcagcagcgacttcgaggagaacgtgggcaagaagctgctgagaaccctgagcggccagaagagaaagagaagccccgagggcgagagaaccagcgaggacaacagcaacctgacccccctgatcacctag

SEQ ID NO: 335444 - protein, 465 aa, Artificial Sequence
  derived and/or modified sequence
MFLATLYFALPLLDLLLSAEVSGGDRLDCVKASDQCLKEQSCSTKYRTLRQCVAGKETNFSLASGLEAKDECRSAMEALKQKSLYNCRCKRGMKKEKNCLRIYWSMYQSLQGNDLLEDSPYEPVNSRLSDIFRVVPFISDVFQQVEHIPKGNNCLDAAKACNLDDICKKYRSAYITPCTTSVSNDVCNRRKCHKALRQFFDKVPAKHSYGMLFCSCRDIACTERRRQTIVPVCSYEEREKPNCLNLQDSCKTNYICRSRLADFFTNCQPESRSVSSCLKENYADCLLAYSGLIGTVMTPNYIDSSSLSVAPWCDCSNSGNDLEECLKFLNFFKDNTCLKNAIQAFGNGSDVTVWQPAFPVQTTTATTTTALRVKNKPLGPAGSENEIPTHVLPPCANLQAQKLKSNVSGNTHLCISNGNYEKEGLGASSHITTKSMAAPPSCGLSPLLVLVVTALSTLLSLTETS

SEQ ID NO: 335445 - DNA, 1398 bp, Artificial Sequence
  derived and/or modified sequence
atgtttctggcaacactgtactttgccctacctctcttggacctgctcctctccgctgaagtgagtggcggagataggctcgactgtgtaaaggcctccgatcaatgcttaaaggagcagagttgttcgactaagtatcggaccctgagacaatgcgtggccggcaaggaaacaaacttttccctggcctctggactggaagctaaggacgaatgtaggtctgccatggaagcactcaagcagaaatctctctacaactgcaggtgcaagcgtggcatgaagaaggaaaagaattgcttacgcatctattggagcatgtaccagagtctgcagggcaacgacctacttgaggatagtccctacgagcccgtgaacagcagactctccgacatctttcgagtggtgccatttatttcggacgtcttccagcaggtggaacatattccaaagggaaacaattgtcttgatgccgcgaaagcatgcaacttggacgacatatgtaaaaagtatagatcagcttatattacaccatgtaccactagcgtgtctaatgacgtgtgcaaccgccgtaaatgtcataaagccctgcggcagtttttcgacaaagttcctgcaaagcactcttatgggatgctgttttgtagttgtcgggatatagcatgcaccgagcgtcggagacagaccatcgtgcccgtgtgctcatatgaagagagggagaagcccaattgcctgaacttgcaggattcctgcaaaaccaactatatatgtcgtagtagactcgctgattttttcacaaactgtcagccagaatcgcggagtgtcagctcgtgtttgaaggagaactacgccgactgcttactggcttattccggattgatcggaacggtcatgacacctaactatatcgactccagctctctgagcgtcgcaccgtggtgtgactgcagcaactcaggaaacgatctggaggaatgtctgaagtttctgaattttttcaaggataacacctgcctcaagaatgctatccaggccttcgggaatggcagcgacgtgacagtttggcagcccgcatttcctgtgcagactaccacggccacaaccactaccgctctgcgcgtaaagaataagcccctggggccggcgggtagcgaaaacgagatcccgacccacgtgttgccaccgtgtgcaaatctgcaggctcagaaactgaagagtaacgtctcaggtaatacacatctctgcatcagtaacggaaactatgaaaaggagggactgggtgcttcctcacacattactacaaaatcaatggcagcccctcctagttgcgggctgtcccctttgctcgtcctggtggtcaccgcacttagtactctgcttagcttgaccgaaacatcatag

SEQ ID NO: 335446 - DNA, 9561 bp, Artificial Sequence
  derived and/or modified sequence
cagaacactgcgtgtcctgtgcgcgagtacgggtccggccgcgggtcccaccgcaagcgggcgtgtgcagctgcggctgcctggcgggcgagcttaggagggagctggagctgcggagcggcgggaacaggagcaggccgagggtcctctggccagaagaaatctggcctcggaacacgccattctccgcgccgcttccaataaccactaacatccctaacgagcatccgagccgagggctctgctcggaaatcgtcctggcccaactcggcccttcgagctctcgaagattaccgcatctatttttttttcttttttttcttttcctagcgcagataaagtgagcccggaaagggaaggagggggcggggacaccattgccctgaaagaataaataagtaaataaacaaactggctcctcgccgcagctggacgcggtcggttgagtccaggttgggtcggacctgaacccctaaaagcggaaccgcctcccgccctcgccatcccggagctgagtcgccggcggcggtggctgctgccagacccggagtttcctctttcactggatggagctgaactttgggcggccagagcagcacagctgtccggggatcgctgcacgctgagctccctcggcaagacccagcggcggctcgggatttttttgggggggcggggaccagccccgcgccggcaccatgttcctggcgaccctgtacttcgcgctgccgctcttggacttgctcctgtcggccgaagtgagcggcggagaccgcctggattgcgtgaaagccagtgatcagtgcctgaaggagcagagctgcagcaccaagtaccgcacgctaaggcagtgcgtggcgggcaaggagaccaacttcagcctggcatccggcctggaggccaaggatgagtgccgcagcgccatggaggccctgaagcagaagtcgctctacaactgccgctgcaagcggggtatgaagaaggagaagaactgcctgcgcatttactggagcatgtaccagagcctgcagggaaatgatctgctggaggattccccatatgaaccagttaacagcagattgtcagatatattccgggtggtcccattcatatcagatgtttttcagcaagtggagcacattcccaaagggaacaactgcctggatgcagcgaaggcctgcaacctcgacgacatttgcaagaagtacaggtcggcgtacatcaccccgtgcaccaccagcgtgtccaacgatgtctgcaaccgccgcaagtgccacaaggccctccggcagttctttgacaaggtcccggccaagcacagctacggaatgctcttctgctcctgccgggacatcgcctgcacagagcggaggcgacagaccatcgtgcctgtgtgctcctatgaagagagggagaagcccaactgtttgaatttgcaggactcctgcaagacgaattacatctgcagatctcgccttgcggatttttttaccaactgccagccagagtcaaggtctgtcagcagctgtctaaaggaaaactacgctgactgcctcctcgcctactcggggcttattggcacagtcatgacccccaactacatagactccagtagcctcagtgtggccccatggtgtgactgcagcaacagtgggaacgacctagaagagtgcttgaaatttttgaatttcttcaaggacaatacatgtcttaaaaatgcaattcaagcctttggcaatggctccgatgtgaccgtgtggcagccagccttcccagtacagaccaccactgccactaccaccactgccctccgggttaagaacaagcccctggggccagcagggtctgagaatgaaattcccactcatgttttgccaccgtgtgcaaatttacaggcacagaagctgaaatccaatgtgtcgggcaatacacacctctgtatttccaatggtaattatgaaaaagaaggtctcggtgcttccagccacataaccacaaaatcaatggctgctcctccaagctgtggtctgagcccactgctggtcctggtggtaaccgctctgtccaccctattatctttaacagaaacatcatagctgcattaaaaaaatacaatatggacatgtaaaaagacaaaaaccaagttatctgtttcctgttctcttgtatagctgaaattccagtttaggagctcagttgagaaacagttccattcaactggaacattttttttttttccttttaagaaagcttcttgtgatcctttggggcttctgtgaaaaacctgatgcagtgctccatccaaactcagaaggctttgggatatgctgtattttaaagggacagtttgtaacttgggctgtaaagcaaactggggctgtgttttcgatgatgatgatgatcatgatgatgatcatcatgatcatgatgatgatcatcatgatcatgatgatgattttaacagttttacttctggcctttcctagctagagaaggagttaatatttctaaggtaactcccatatctcctttaatgacattgatttctaatgatataaatttcagcctacattgatgccaagcttttttgccacaaagaagattcttaccaagagtgggctttgtggaaacagctggtactgatgttcacctttatatatgtactagcattttccacgctgatgtttatgtactgtaaacagttctgcactcttgtacaaaagaaaaaacacctgtcacatccaaatatagtatctgtcttttcgtcaaaatagagagtggggaatgagtgtgccgattcaatacctcaatccctgaacgacactctcctaatcctaagccttacctgagtgagaagccctttacctaacaaaagtccaatatagctgaaatgtcgctctaatactctttacacatatgaggttatatgtagaaaaaaattttactactaaatgatttcaactattggctttctatattttgaaagtaatgatattgtctcatttttttactgatggtttaatacaaaatacacagagcttctttcccctcataagtagtgttcgctctgatatgaacttcacaaatacagctcatcaaaagcagactctgagaagcctcgtgctgtagcagaaagttctgcatcatgtgactgtggacaggcaggaggaaacagaacagacaagcattgtcttttgtcattgctcgaagtgcaagcgtgcatacctgtggagggaactggtggctgcttgtaaatgttctgcagcatctcttgacacacttgtcatgacacaatccagtaccttggttttcaggttatctgacaaaggcagctttgattgggacatggaggcatgggcaggttctcctttctttggaaacacatccatgctgggatgcacagttcttttcctaaggattgtgtttactcctgactgcaacgtcttggccactgtttggagcagtttggtctgaaggtcattaaggatctgcttgcatcttgtttcatgtcctccgtgacagactgcagaccatgttagaagagaaggaaggtttgtggatcaagagggttgacattaggtttggtgagatgagttgcttggcacagatcagcagaacaggaccctggtgataaggcatctggctttgctaaccacttatcatcttccattattctctttcttaactaagtagacccgaaagtgcacttttgaagtctggtttagatggcgagattccgaatctacaatgatcgagtactggtggccacttttctccaacattaagtaaagaggaggagattccaccttcagaaagtgctgggaagcattggctttcttcccacattggtagaagagatggaggaggaaaccagggtgcacatttctacagatcccctttgcctgctggtgtttgccttgtaagataagtcactggggggaaggggaaatctatgaaatccaagataaaggcatagtctttcagctctattggtgttaaaagtatatttgtgtccaaatgttaatcaacacaaatgtacagtactcagtactgacttttttcacttcaaaatgttttcaagggaaattcagcagacacccaactgtatttaattagtgaaaagatctataaagactcttactttgaataaacacattaagtaagtgtgtcaaaatatttggaatgccagttatctatgagcgcatatctcttacagagtgtattttgttttcattaaggtatctctgtgtatctacactggactaatttcatagggatctgattctatgtgatccactgtagaaagctactgattacttctgcagtaacagcagctctaattagcatcagatgaccaaagcggaaatgggagtttcagcgctaacaagggcagccttcattgaagaatgcatgggtaggcaatatataaattacattttgaaaagcctcatctgtcaccaacaaatatctcatttttcttcagtgataaaagcatattcaagttaccagctcctcaatttgaaaatcagttgctgattaaataaatagggggaagcatcttgttcagggacaacacgttagagagattcttatcaaagcaagccaagcaaggtttccgccattcagtgtgatcttagtttgacacggtgaccctaaaacaccatcatttgccccagaactggagcacaataagttaaatcatttacctgtctcacttcttcttggcgtgcttaaaagcaaaaatgattcgctacttcctgtccttcagtccgggcatttggggtgccactgaagacaggggttatctgctgaggtttgggtgtcttgcaggaagtatctcattgcagttgattttgatgaaaccaaacagtaactagggtccatgcagaccgtgactccctgattacatctagccatgccctacttatttcagagagaaagagagggggaataaaggcagtattgccacactgattagaagcacattcattccactttgatgttgaatatttttgaccgatacatgcttgagtatctttttaatagagcacatgaaggaagaagcacacaatatagagaaggaattgagaatgccaattacatatttatttttccatacctgatttttttcaagtctgtaataaaaaaagtataagttgagattaacataggttatttttcatgaagtatagcaaacgatctagaatgtgataggagtgtggtttccatttctttttttttttttttaacagacttttgtgctgtagtaagaatgtcttagaagttgtgtcttcgagttcctcaaacaccggacagggctcccccagagctgcctcagcctttgatttggtccatattcagacacttcctgtcttgcatacactctgaggatgggccgcttctagctgccgcccgtctccctcttgccttcttgtctctaaatcagacactcccaagcactccatctgctatactaggagagtgggagagccaaagcattttggagtccatgtaaagtgcctgggaaaagagatgtaagagcagtgggagtttatataattagcgaattcttttctcagaattcagcggaaatgtatttctgttgttattatttacaaaattgtggcctcagaggagctgtcttttggaaaataagttttcattcatgcagttagttagacatgcacgatgtacttgaatcaataaactgtggaccagaaaagggctgcttaaatgaattcacgtgttctaattctctttcgaggctgttgatgacctcctggattcatacccccatgatctgtcttgctcttgcctctgttctttgataaagcacatcagactatgtgacacccatcttttcaagaacgacctaaaagcaatgacaacaggcaggagagaattaccactggcctgggcacagtgacagcagaaggcccacctgagcttggagagttggcgagataaggcaaaatcaaggtgcaacagtgggccatgttccaagggtgaatggatctgagagtccgctgatgttccttactgatcagaacagggaccttctaacgaaacagccagagttccttgaatcaggcagaagttctttagagacaggaagccagagctattgataatatccgaacgacagaggaaggaatttcttattagaaattctaaaataaaacaagtggggatttggttggatacccttagaagctacatttttctctcatccctaagatagatatctcaagtgtatatctgacacctcttggctttgacacggctctgcttctcaagtgaccatttgttttaagtctgttgtctagaattctttgtgggggctggacctctgaaaaagattctcactgcagaggctttaaatctgtgtttttttccactccctccgtcctgggatgtattcggtaggacatttcatttatatcaggatattggctgattcagctctctttcatcgttattattcaggcctccctccaccaccttgttctttattgcctaagtattgccctccccaattcttcatcgtaatagctctaaatttagtttgacccaaattaatttttgttccaacagatatattttaagacagagaagcctctctcaggagccagatgatctgaagatgatgctaatccccaaatacgaagttcctccagctaactctcctctgagctccctcttcttagctttgggattggggatggtctcatccttgccaggaatccctttgttgctcccagtgtctctgatgagcttctcctccctcccagagacaatgcaggggtggttttcagcagaatgtgccacctgcacttctgattgttctgagacccagcccagaggggtggagaaggcgcacaaaccctattccaataaactgcctgcagagaaccacagcctgctaatagtcgttgaggtctcagccccctaaggtctccaagctcatttgaccagcgcagctgcgacttcggctgtctgcctctggcaggtgccaatatcagcatcttgtcccactgccatggggagttaatttttgctccagggcagctgccaagcccagcaccggcatcaatagaaggttttctctgattttcttctcttcctctcaggctaggctttcttaccaatccccaattttcttctgtagggcgccaggagactggccagagatctttagactcttacttagtttgaacatctcttgctgctcacacccaggcttcttcagcagaaagcatgacccatagtaggtactcagaaactggttgaatgaaaagccttgacatttaagggctttattctgtcatacggtagcaagaactggcctattggcatcgtattcctggcattgagctgtattgaccctgaatgtgtcctcctgaggtttttgagggtgacctaggagaaagggtctgaaaaagcactgggatccaagtgactttaaatctgcccgtggcatttcctgctgagaggcgagaaactagcatctctcccaacaggctcacatccgccaggaaggacagagcccaaaacgggggtagactttgtgggaaattcgccagttagtccgctgagattttaatctgcctcaagcacaggatgctgacaagaaaggtagaccactcccccgatcccagacaaaccccaggggtgacaacttctccatcagtatcctgagaagcaacatcaaatgcttaccaagtcagcacgtttactgagtgagtactctgacggaataaaccagcatttggagctgaacttgagaacacagggccctctgacagcagcttagggaaacacccatcccttccagattggcagaatccttccatttcatgtccttcggagacgctgtattctctttacaaatcattcatgaaactgagactcagtctcccaggggtaagtcctgggccacgtgcaaacaatggcaaatccagctcttccatgatagagaaggcaaacacacccaccttcatcctgagcctaaaaggccacctctgagcacttgggcagccactcctctgggcctcagagggccatgagcttggccaggtaggcacagcggcggggaagtcacagctgtcaggtaccggccatggtgcaggtgggaataggagatgccagagctgctttagctgaggaaagcaaacagtcagcagtgctcaaaggagcaaaacttcgaatgtgcacattgacccctgacacctgcaagcataacacagatcctaagactagagtgaagtaggaagaagaattagaaaatccagtggatgtcctgagtatagggaaccagggccgttgaaaatcagtaaaggttgattacctggggcgagaccgggtgactgtggcagtgcaggtgaaggtaccctggaccttctcagttcgctggcacataaggctccgccaataaagcgtggttctctctgtcacacacacacacacacacacacacacacacacacacacacacacacacacaatgattggagggctatatgatccagcattagcttcctggtgtgccaagcatgcttgatcgggaatttttttttattattattattttttagctgtagctgaaggcatttctcggatgtggagaggagaatggaaatcgcagaaccaaatcagtttgccctgccatatttggctgtggtctgtcattgggcatttctgatgtgcttttctggattcaggaagagctgattgtcctccgagggttgaaaaaaaaaaaacagtttcagaaacctgaatccagggccttatagttctcctcattatctatcttcttctcccttccctcgcccaagggagtgggggaaacacttttcactgcagagtttgctttaaagttttcccatcttgcgtgcattatcccttgatattaaaattattttctcagtttaatccaactcctgctgagaagctgtgtgagatttaggctgtggggtttttttcttgtactcttttggatggtgttgcatttttcactcttaacccgagggtgtgtttcagcttatgttcgttctgtttcatgcaggtttatagcacggtagagtagaaggcggcttctgatttttagggtatttttagaattcattcctgagtgaggggttcagacacccagtctcctcggaacaggggtgaggggtcgactgagctttgttgagaagcctccagttaggcttcgggcgggtctccatgttatattgtgtgtttactgagcttcccactggtagaagatgacacatttgtccatcgtcctgtgtatctgctttccagaggacaccggagcattctcctggggtcactcccacatggctgcctcacatagctgttttgcaacagcctttattgccaacacccttggaagaacatctcctgtagaagtacaagttttgcaatatggactttggaagtggttttgtgatgttcgaattttctgttagcctattgctcaagcactacagaatgtacatagtccctttggccatcctctcaccccagaatatcctaataaacattgttttctttttt

SEQ ID NO: 335447 - DNA, 1398 bp, Artificial Sequence
  derived and/or modified sequence
atgttcctggccaccctgtactttgccctgcccctgctggacctgctgctgtctgctgaggtgtctggaggagaccggctggactgtgtgaaggccagtgaccagtgcctgaaggagcagagctgcagcaccaagtaccgcaccctgcggcagtgtgtggccggcaaggagaccaacttcagcctggccagcggcctggaggccaaggatgaatgtcgcagcgccatggaggccctgaagcagaagagcctgtacaactgccgctgcaagaggggcatgaagaaggagaagaactgcctgcgcatctactggagcatgtaccagagcctgcagggcaatgacctgctggaggacagcccctatgagcctgtgaacagccggctgagtgacatcttccgggtggtgcccttcatcagtgatgtgttccagcaggtggagcacatccccaagggcaacaactgcctggatgctgccaaggcctgcaacctggatgacatctgcaagaagtaccgcagcgcctacatcaccccctgcaccacctctgtgtccaatgatgtgtgcaacagaaggaagtgccacaaggccctgcggcagttctttgacaaggtgcctgccaagcacagctatggcatgctgttctgcagctgccgggacatcgcctgcacagagcggcggcggcagaccatcgtgcctgtgtgcagctatgaggagcgggagaagcccaactgcctgaacctgcaggacagctgcaagaccaactacatctgccgcagccggctggccgacttcttcaccaactgccagcctgagagccgctctgtgagcagctgcctgaaggagaactatgctgactgcctgctggcctacagcggcctgattggaacagtgatgacccccaactacatcgacagcagcagcctgtctgtggccccctggtgtgactgcagcaacagcggaaatgacctggaggagtgcctgaagttcctgaacttcttcaaggacaacacctgcctgaagaatgccatccaggcctttggaaatggaagtgatgtgacagtgtggcagcctgccttccctgtgcagaccaccacagccaccaccaccacagccctgcgggtgaagaacaagcccctgggccctgctggctctgaaaatgagatccccacccacgtgctgcccccctgtgccaacctgcaggcccagaagctgaagagcaatgtgtctggcaacacccacctgtgcatcagcaatggaaattatgagaaggagggcctgggcgccagcagccacatcaccaccaagtccatggccgccccacccagctgtggcctgagccccctgctggtgctggtggtgacagccctgagcaccctgctgagcctgacagagaccagctag

SEQ ID NO: 335448 - DNA, 1398 bp, Artificial Sequence
  derived and/or modified sequence
atgttcctggccaccctgtacttcgccctgcccctgctggacctgctcctaagtgcagaggtcagcgggggagacagactggactgtgtgaaagcctcagaccagtgtctgaaagaacagtcttgcagtacaaagtaccgaacgctccgtcagtgtgtggcggggaaagaaaccaactttagcttggcctctggcttggaggcgaaggatgaatgtagaagcgcgatggaggctcttaagcagaagtcactttacaactgcagatgcaagcgaggaatgaaaaaggagaaaaactgcttgagaatctactggtcaatgtatcaatcgctgcaggggaatgatttacttgaagacagcccgtatgagcctgtcaatagcaggctcagcgatatcttccgggtggtgcctttcatctctgacgtattccagcaggtggagcatataccaaaaggcaacaactgtttagacgccgctaaagcgtgcaatttagatgacatctgcaagaagtatcgctcggcatatattactccgtgtactacatctgtgagtaacgacgtttgtaacagacgcaagtgtcacaaggctttgcgtcagttcttcgacaaagtaccagccaagcacagctatggcatgttgttctgcagttgtagagatattgcgtgcacagaacggagaaggcagactattgtgcccgtgtgttcctatgaggagagggagaagccaaattgtctgaatttgcaggattcttgcaagacaaactatatttgcagaagtagactagcagatttctttactaattgccagcctgagtcgcgcagtgtatccagctgtctgaaagagaactatgctgattgcctgctcgcttactccggacttattggaaccgtcatgaccccaaactacatcgatagtagtagtctcagcgtcgctccatggtgcgattgttccaattctggtaatgaccttgaggagtgcctaaagtttttaaactttttcaaggacaatacttgcctgaagaacgccatacaggcatttggcaatgggagcgatgtcacagtctggcagccggcttttcctgtgcagaccacgaccgccacaacaactacagctctaagggttaaaaacaagcctctgggccctgcaggatccgagaacgagatccctacccacgtgttacccccttgcgcaaatcttcaagcccagaaactgaaatccaacgtatctgggaatacacacctgtgtatctcaaatggcaattacgagaaggagggactcggggcaagtagccacattactaccaaatctatggctgctccacccagttgcggcttgtcacccttgctggttctggtcgtgactgccctgtcaaccttgctgtccttgacagagactagctag

SEQ ID NO: 335449 - DNA, 1398 bp, Artificial Sequence
  derived and/or modified sequence
atgttcttggctaccctttattttgccctgccgttgctggatctgcttctttccgccgaagtttcaggcggagacagattggattgcgtaaaggccagcgatcagtgcctcaaggagcagtcgtgctcaaccaagtacaggacactaaggcagtgcgttgccggaaaggaaacaaacttctcattggcatcaggcctcgaggcaaaggacgaatgtcgcagcgctatggaggcactgaagcagaagagcctatacaactgccgctgcaaacgaggaatgaaaaaggagaagaactgcctgagaatctattggagcatgtaccaatccctgcaaggaaatgatctattggaggacagtccttacgagccagtgaatagccgtcttagcgacatctttagagtggtgccttttatcagtgatgtgttccagcaggtggagcacattcccaaggggaacaattgtctggacgccgctaaagcttgtaacctggatgatatctgtaagaaataccgttccgcctatatcactccctgcaccacttctgttagcaatgacgtttgcaatcgtcgtaagtgccataaggccctgcgtcagttctttgacaaggtaccagccaagcactcttatggaatgctgttttgttcctgccgcgatatcgcttgtaccgaacggaggcgccagaccattgtgccagtgtgctcctatgaggaaagagaaaaacctaattgcctaaatttgcaggactcttgcaagaccaattacatctgtcgctcccggctggctgatttctttaccaattgccagccagagtctagaagcgtgtctagttgtctaaaagaaaattacgcagactgcttgctggcctactcgggcctgatcggcacggttatgacgccaaactatattgacagctctagcctaagcgtggccccttggtgtgactgcagcaattccggaaatgacctggaggagtgcctcaagttcctcaatttcttcaaggataatacttgtcttaagaacgctattcaggcgtttggcaacggctctgatgtcaccgtctggcaacccgcattccccgtacaaacaactaccgcaacaactacaaccgctctgcgagtgaaaaataagcccttgggccctgccggaagcgagaacgagatccctacacatgtgctgccaccatgcgctaaccttcaggctcagaagttgaagtcaaatgtgtccggcaacacccatttgtgtattagcaatgggaattacgaaaaagaaggcctaggcgcaagtagccatatcactacaaagagcatggctgcccctccctcatgtggactatcccctctgctggtgctcgtggttacagccctgtccacgctgcttagcctgaccgagacgtcttag

SEQ ID NO: 335450 - DNA, 1398 bp, Artificial Sequence
  derived and/or modified sequence
atgttcctggccaccctgtacttcgccctgcccctgctggacctgctgctgagcgccgaggtgagcggcggcgacagactggactgcgtgaaggccagcgaccagtgcctgaaggagcagagctgcagcaccaagtacagaaccctgagacagtgcgtggccggcaaggagaccaacttcagcctggccagcggcctggaggccaaggacgagtgcagaagcgccatggaggccctgaagcagaagagcctgtacaactgcagatgcaagagaggcatgaagaaggagaagaactgcctgagaatctactggagcatgtaccagagcctgcagggcaacgacctgctggaggacagcccctacgagcccgtgaacagcagactgagcgacatcttcagagtggtgcccttcatcagcgacgtgttccagcaggtggagcacatccccaagggcaacaactgcctggacgccgccaaggcctgcaacctggacgacatctgcaagaagtacagaagcgcctacatcaccccctgcaccaccagcgtgagcaacgacgtgtgcaacagaagaaagtgccacaaggccctgagacagttcttcgacaaggtgcccgccaagcacagctacggcatgctgttctgcagctgcagagacatcgcctgcaccgagagaagaagacagaccatcgtgcccgtgtgcagctacgaggagagagagaagcccaactgcctgaacctgcaggacagctgcaagaccaactacatctgcagaagcagactggccgacttcttcaccaactgccagcccgagagcagaagcgtgagcagctgcctgaaggagaactacgccgactgcctgctggcctacagcggcctgatcggcaccgtgatgacccccaactacatcgacagcagcagcctgagcgtggccccctggtgcgactgcagcaacagcggcaacgacctggaggagtgcctgaagttcctgaacttcttcaaggacaacacctgcctgaagaacgccatccaggccttcggcaacggcagcgacgtgaccgtgtggcagcccgccttccccgtgcagaccaccaccgccaccaccaccaccgccctgagagtgaagaacaagcccctgggccccgccggcagcgagaacgagatccccacccacgtgctgcccccctgcgccaacctgcaggcccagaagctgaagagcaacgtgagcggcaacacccacctgtgcatcagcaacggcaactacgagaaggagggcctgggcgccagcagccacatcaccaccaagagcatggccgccccccccagctgcggcctgagccccctgctggtgctggtggtgaccgccctgagcaccctgctgagcctgaccgagaccagctag

SEQ ID NO: 335451 - protein, 194 aa, Artificial Sequence
  derived and/or modified sequence
MHIKPENHCSKLSGNTKSRESIQEPRSDYYNHEVPDIDLSDCEFPHVIEIYDFPQEFHTEDLLRVFCSYQKKGFDIKWVDDTHALGVFSSPITARDALGIKHTMVKIRPLSQATRAAKAKARAYAEFLQPAKERPETSAALARRLVISALGVRSKQSKTEREAELKKLQEARERKRLEAKQREDIWEGRDQSTV

SEQ ID NO: 335452 - DNA, 3418 bp, Artificial Sequence
  derived and/or modified sequence
gcggagacggcggaagcggagagcaacagcgcgccgagacttccagtgtcctactattgaagcctgcacctgctgcattgctgttttcctgagacggagttttgccatgttgtccaggctggtgtcgaaatcctgagctcaagtggtctgcctgcctcggcttcccaaagtgctgggattacaggtgaggctgctgtcagaaaggaacttttacacagtttgccttcagagacagtctatcggcatgttgtagagttttattactaagaaaataaatgttacttacatgattgtggtggtgccatgcagcaagaatcagagagatgcagagttagagccagaaggcctgacatggcactttatgtacctaaagctcgtaggggtgcagtactccttaagacaggtgatgaagaagaaagctgtggttcacctaactctgtggtgaaagaaaagcaaaaagaaagttctctctcccaaaaagaagtctttaaagacaaaccggaggctcgaagactaaatatcaatcctgatagaaaggagcataattgtagagaagaaaagaaatcttcaacaaaattaagaatggacacatgccttcaaaaaacaaatagagtttgttctaagagaggaaccactgaatccaaagaagtattatcccaaggacaacagcagggagccccaaatgctggggttataactaatgcacctttgcagagacattttaaaccaaagaaggtggagtgtttggaagttgaaactacggatgtgacaggacatgagaggatacttctttcacaggcctgtttagaaatcagcgaggctcaagttccaagcaaaccattccaaaatgtggaattctgtgacttcagtaggcatgaacctgatggggaagcatttgaagacaaagatttggaaggcagaattgaaactgataccaaggttttggagatactatatgagtttcctagagtttttagttctgtcatgaaacctgagaatatgattgtaccaataaaactaagctctgattctgaaattgtacaacaaagcatgcaaacatcagatggaatattgaatcccagcagcggaggcatcaccactacttctgttcctggaagtccagatggtgtctttgatcaaacttgcgtagattttgaagttgagagtgtaggtggtatagccaatagtacaggtttcatcttagatcaaaaagatacagattccattcctgcaactatgggtcacatctctctgtcagagagcacaaatgacactgttagtccagtaatgattagagaatgtgagaagaatgacagcactgctgatgagttacatgtaaagcacgaacctcctgatacagctgtccttgctcatgaaacacatagagatagtggatttaagaatgtaggtgacattaccaataaagcatgtatgatggacactacaggtatgtcctgtagtgatcatgtaactgttgatagcccttatgtagttgcagttagaatagctgatgagacctctattaatacacgaagtttctcaaagtttgtaggaatgagtgcagatgcaacccctcttcatgtagctagaagtgggaatgacactgaagatttcagcaacccttctgcttgctcagatatttatggtgagagtatttcatctcattttacagagtcaacaggaaagttgatagagagcttgtcagattgtgcttcctccttacctataaaaaagattgctggtagtaattataacacttttttggactctgaactcagtatgttaaatgggacaaaagttctttcagacagtgccgtgggcattgacctgggtagtactggtgatacaacagaagcattgcacgaactaagaactgccgaagagttcaaaacagaagagcaagatgactcagggagtatagaatttggtgtatcttttcctgatagggaatcatcatctatggaaacatccatcgaaccaaaagcaactgaaacttctcacacagagggaattactgccattgaggagagctgggagtctatgtttaacgatgatggtgactgcctggatccacgtcttctacaagaggggattctgatgcacataaagcccgagaaccactgctcaaagttatcagggaataccaagagcagagagagcatccaggaacctagatctgattactacaatcatgaagttcctgatattgacctcagtgattgtgaattcccacatgtcattgaaatttatgactttccccaagaatttcatactgaagaccttctacgggttttctgcagttatcaaaagaaaggatttgatattaaatgggtggatgatacacatgccctaggagtattctccagtccaattacagctcgtgatgcgttgggtattaaacacaccatggtgaagattcgtcccttgtcacaggccacaagagcagccaaggccaaagctagagcttatgctgagttcctccagccagcaaaggagcgtcctgagacttcagcagccctagccagaaggttagtcatcagtgcccttggggttcgaagtaagcagagcaaaaccgaacgagaagcagagctcaagaaactgcaagaagccagagagagaaagcggttggaagccaagcaacgggaagacatctgggaaggcagagaccagtctacagtttgaacatcactcaatgaaagggataattccatgaatcagaaaatgtttccatagccttcagataagatgatccttccagagctctatgtacatgcagatgtgcatgttaaagagataaagtgatcgagacaaggactgactgggtatagaaggaagacagactcctgtcttcactcctaaatgcagttctttggaatcaccctactgtggtgggcgtagtagggagccatcagctaggaagaaacgtgggagatgtgaattccaagagttgcctggacagggcaagtcatgttagcgtgggtcacacttccaagatatttaaagcaaatacaaaacagaacagaggattcaaaccgcaagtatgggagatttaggccctgcagaggcagaccattccttagtatctcacaaagcagagtaatactggaggcagagtagggggtggttggagagcagttagtacaaagaggcagaacagtgtctggtttacttggcatacacagaatctgcactgccggttccagaactgcaaagttggtgaactacaggagatgtgggtatttagactccaaagtttatactgagctcagtgcctgggaccgctccagctgcactgcagccaggggggataccagcttcattcctcagagtaaaccaaccttgggagctgtgtgccagttccagtgtaagcagtaataccatgttgtaagagggaacattaaagcccattttatgacat

SEQ ID NO: 335453 - protein, 184 aa, Artificial Sequence
  derived and/or modified sequence
MLSGNTKSRESIQEPRSDYYNHEVPDIDLSDCEFPHVIEIYDFPQEFHTEDLLRVFCSYQKKGFDIKWVDDTHALGVFSSPITARDALGIKHTMVKIRPLSQATRAAKAKARAYAEFLQPAKERPETSAALARRLVISALGVRSKQSKTEREAELKKLQEARERKRLEAKQREDIWEGRDQSTV

SEQ ID NO: 335454 - DNA, 585 bp, Artificial Sequence
  derived and/or modified sequence
atgcacatcaagcccgagaaccactgcagcaagctgagcggcaacaccaagagcagagagagcatccaggagcccagaagcgactactacaaccacgaggtgcccgacatcgacctgagcgactgcgagttcccccacgtgatcgagatctacgacttcccccaggagttccacaccgaggacctgctgagagtgttctgcagctaccagaagaagggcttcgacatcaagtgggtggacgacacccacgccctgggcgtgttcagcagccccatcaccgccagagacgccctgggcatcaagcacaccatggtgaagatcagacccctgagccaggccaccagagccgccaaggccaaggccagagcctacgccgagttcctgcagcccgccaaggagagacccgagaccagcgccgccctggccagaagactggtgatcagcgccctgggcgtgagaagcaagcagagcaagaccgagagagaggccgagctgaagaagctgcaggaggccagagagagaaagagactggaggccaagcagagagaggacatctgggagggcagagaccagagcaccgtgtag

SEQ ID NO: 335455 - DNA, 585 bp, Artificial Sequence
  derived and/or modified sequence
atgcacattaagcccgagaaccattgtagcaagctttcagggaacaccaagtctcgggaatccattcaggagccccgcagtgactactataatcacgaggtgcctgatattgacttgtctgactgtgagttcccacatgttattgagatttatgatttcccccaagagtttcatacggaagaccttcttagagtgttctgcagttatcagaagaaggggtttgacattaagtgggtggatgacacccatgccctcggcgtgttctcttcgcccattaccgccagggacgcattgggtatcaaacacaccatggtgaagattagacctcttagccaggctaccagagccgccaaggcaaaggcacgcgcctacgccgagttcctgcagcctgctaaggaaaggccagaaacctccgctgcgctggcacgcagactcgttatcagtgccctgggggtgagatcaaaacagtctaagacggagagggaggccgaactgaagaaactccaggaagccagagagcggaagcgtcttgaagcaaagcagcgcgaagatatttgggagggtcgagaccaaagtaccgtctag

SEQ ID NO: 335456 - DNA, 585 bp, Artificial Sequence
  derived and/or modified sequence
atgcacatcaagccagagaaccactgcagcaagctgagcggcaacaccaagagccgggagagcatccaggagcccaggagtgactactacaaccacgaggtgcctgacatcgacctgagtgactgtgagttcccccacgtgattgagatctatgacttcccccaggagttccacacagaggacctgctgcgggtcttctgcagctaccagaagaagggctttgacatcaagtgggtggatgacacccacgccctgggcgtcttcagcagccccatcacagccagagatgccctgggcatcaagcacaccatggtgaagatccggcccctgagccaggccacccgggccgccaaggccaaggcccgggcctatgcagagttcctgcagcctgccaaggagaggcctgagaccagcgctgccctggcccggcggctggtgatcagcgccctgggcgtgcgcagcaagcagagcaagacagagcgggaggccgagctgaagaagctgcaggaggcccgggagaggaagaggctggaggccaagcagcgggaggacatctgggagggccgggaccagagcacagtgtag

SEQ ID NO: 335457 - DNA, 585 bp, Artificial Sequence
  derived and/or modified sequence
atgcacatcaagcccgagaaccactgcagcaagctgagcggcaacacaaagtcacgggaatccatacaagagccaagatctgactactataatcacgaggtgcctgatattgatctttctgactgcgagttcccgcatgttatcgaaatctacgactttccacaggagttccacaccgaggatttgctgcgtgttttttgcagctaccagaaaaaaggctttgacattaagtgggtggacgacacccacgcccttggagtattttcaagccctatcacagctagagacgctctggggataaagcacaccatggtgaaaattagacccctgtcgcaggctaccagagccgcgaaggctaaagccagggcatatgctgaattcctgcagccagctaaggagcgacccgagacctctgcagctctagcccggcgcttagtcattagcgccctgggggttaggagcaagcagtctaagacagagagagaggcggaactgaaaaaactccaggaagcaagggaaagaaagcgactggaagccaaacaacgagaggatatatgggagggaagagatcagagtacagtctag

SEQ ID NO: 335458 - DNA, 585 bp, Artificial Sequence
  derived and/or modified sequence
atgcatatcaagccagaaaaccattgttcaaaactgagtgggaatacaaaatccagggagagtatccaggaacctagatccgactactacaatcatgaggtacctgatatcgacctgagcgattgtgagtttccgcatgttatcgagatctacgacttcccgcaggaatttcacacagaggatctgctaagggtcttctgctcctaccagaagaagggatttgacatcaaatgggtagacgacacacatgccctgggagtttttagttcaccaattacagcgagagatgcactgggcattaagcatacgatggtgaagattaggccactgagtcaggcaacccgggctgccaaggccaaagcaagggcatatgccgaatttttacaacccgctaaggagcggcctgagacatctgccgcactggccagaagactggtgatctccgccctgggcgtgagatctaagcagtctaaaactgagagggaggcagaactcaagaagctgcaggaagcaagggagcgaaaaaggctggaagccaagcagcgtgaggatatatgggagggcagagatcaatctaccgtttag

SEQ ID NO: 335459 - protein, 778 aa, Artificial Sequence
  derived and/or modified sequence
MQQESERCRVRARRPDMALYVPKARRGAVLLKTGDEEESCGSPNSVVKEKQKESSLSQKEVFKDKPEARRLNINPDRKEHNCREEKKSSTKLRMDTCLQKTNRVCSKRGTTESKEVLSQGQQQGAPNAGVITNAPLQRHFKPKKVECLEVETTDVTGHERILLSQACLEISEAQVPSKPFQNVEFCDFSRHEPDGEAFEDKDLEGRIETDTKVLEILYEFPRVFSSVMKPENMIVPIKLSSDSEIVQQSMQTSDGILNPSSGGITTTSVPGSPDGVFDQTCVDFEVESVGGIANSTGFILDQKDTDSIPATMGHISLSESTNDTVSPVMIRECEKNDSTADELHVKHEPPDTAVLAHETHRDSGFKNVGDITNKACMMDTTGMSCSDHVTVDSPYVVAVRIADETSINTRSFSKFVGMSADATPLHVARSGNDTEDFSNPSACSDIYGESISSHFTESTGKLIESLSDCASSLPIKKIAGSNYNTFLDSELSMLNGTKVLSDSAVGIDLGSTGDTTEALHELRTAEEFKTEEQDDSGSIEFGVSFPDRESSSMETSIEPKATETSHTEGITAIEESWESMFNDDGDCLDPRLLQELSGNTKSRESIQEPRSDYYNHEVPDIDLSDCEFPHVIEIYDFPQEFHTEDLLRVFCSYQKKGFDIKWVDDTHALGVFSSPITARDALGIKHTMVKIRPLSQATRAAKAKARAYAEFLQPAKERPETSAALARRLVISALGVRSKQSKTEREAELKKLQEARERKRLEAKQREDIWEGRDQSTV

SEQ ID NO: 335460 - protein, 185 aa, Artificial Sequence
  derived and/or modified sequence
QKLSGNTKSRESIQEPRSDYYNHEVPDIDLSDCEFPHVIEIYDFPQEFHTEDLLRVFCSYQKKGFDIKWVDDTHALGVFSSPITARDALGIKHTMVKIRPLSQATRAAKAKARAYAEFLQPAKERPETSAALARRLVISALGVRSKQSKTEREAELKKLQEARERKRLEAKQREDIWEGRDQSTV

SEQ ID NO: 335461 - DNA, 3379 bp, Artificial Sequence
  derived and/or modified sequence
gcggagacggcggaagcggagagcaacagcgcgccgagacttccagtgtcctactattgaagcctgcacctgctgcattgctgttttcctgagacggagttttgccatgttgtccaggctggtgtcgaaatcctgagctcaagtggtctgcctgcctcggcttcccaaagtgctgggattacaggtgaggctgctgtcagaaaggaacttttacacagtttgccttcagagacagtctatcggcatgttgtagagttttattactaagaaaataaatgttacttacatgattgtggtggtgccatgcagcaagaatcagagagatgcagagttagagccagaaggcctgacatggcactttatgtacctaaagctcgtaggggtgcagtactccttaagacaggtgatgaagaagaaagctgtggttcacctaactctgtggtgaaagaaaagcaaaaagaaagttctctctcccaaaaagaagtctttaaagacaaaccggaggctcgaagactaaatatcaatcctgatagaaaggagcataattgtagagaagaaaagaaatcttcaacaaaattaagaatggacacatgccttcaaaaaacaaatagagtttgttctaagagaggaaccactgaatccaaagaagtattatcccaaggacaacagcagggagccccaaatgctggggttataactaatgcacctttgcagagacattttaaaccaaagaaggtggagtgtttggaagttgaaactacggatgtgacaggacatgagaggatacttctttcacaggcctgtttagaaatcagcgaggctcaagttccaagcaaaccattccaaaatgtggaattctgtgacttcagtaggcatgaacctgatggggaagcatttgaagacaaagatttggaaggcagaattgaaactgataccaaggttttggagatactatatgagtttcctagagtttttagttctgtcatgaaacctgagaatatgattgtaccaataaaactaagctctgattctgaaattgtacaacaaagcatgcaaacatcagatggaatattgaatcccagcagcggaggcatcaccactacttctgttcctggaagtccagatggtgtctttgatcaaacttgcgtagattttgaagttgagagtgtaggtggtatagccaatagtacaggtttcatcttagatcaaaaagatacagattccattcctgcaactatgggtcacatctctctgtcagagagcacaaatgacactgttagtccagtaatgattagagaatgtgagaagaatgacagcactgctgatgagttacatgtaaagcacgaacctcctgatacagctgtccttgctcatgaaacacatagagatagtggatttaagaatgtaggtgacattaccaataaagcatgtatgatggacactacaggtatgtcctgtagtgatcatgtaactgttgatagcccttatgtagttgcagttagaatagctgatgagacctctattaatacacgaagtttctcaaagtttgtaggaatgagtgcagatgcaacccctcttcatgtagctagaagtgggaatgacactgaagatttcagcaacccttctgcttgctcagatatttatggtgagagtatttcatctcattttacagagtcaacaggaaagttgatagagagcttgtcagattgtgcttcctccttacctataaaaaagattgctggtagtaattataacacttttttggactctgaactcagtatgttaaatgggacaaaagttctttcagacagtgccgtgggcattgacctgggtagtactggtgatacaacagaagcattgcacgaactaagaactgccgaagagttcaaaacagaagagcaagatgactcagggagtatagaatttggtgtatcttttcctgatagggaatcatcatctatggaaacatccatcgaaccaaaagcaactgaaacttctcacacagagggaattactgccattgaggagagctgggagtctatgtttaacgatgatggtgactgcctggatccacgtcttctacaagagttatcagggaataccaagagcagagagagcatccaggaacctagatctgattactacaatcatgaagttcctgatattgacctcagtgattgtgaattcccacatgtcattgaaatttatgactttccccaagaatttcatactgaagaccttctacgggttttctgcagttatcaaaagaaaggatttgatattaaatgggtggatgatacacatgccctaggagtattctccagtccaattacagctcgtgatgcgttgggtattaaacacaccatggtgaagattcgtcccttgtcacaggccacaagagcagccaaggccaaagctagagcttatgctgagttcctccagccagcaaaggagcgtcctgagacttcagcagccctagccagaaggttagtcatcagtgcccttggggttcgaagtaagcagagcaaaaccgaacgagaagcagagctcaagaaactgcaagaagccagagagagaaagcggttggaagccaagcaacgggaagacatctgggaaggcagagaccagtctacagtttgaacatcactcaatgaaagggataattccatgaatcagaaaatgtttccatagccttcagataagatgatccttccagagctctatgtacatgcagatgtgcatgttaaagagataaagtgatcgagacaaggactgactgggtatagaaggaagacagactcctgtcttcactcctaaatgcagttctttggaatcaccctactgtggtgggcgtagtagggagccatcagctaggaagaaacgtgggagatgtgaattccaagagttgcctggacagggcaagtcatgttagcgtgggtcacacttccaagatatttaaagcaaatacaaaacagaacagaggattcaaaccgcaagtatgggagatttaggccctgcagaggcagaccattccttagtatctcacaaagcagagtaatactggaggcagagtagggggtggttggagagcagttagtacaaagaggcagaacagtgtctggtttacttggcatacacagaatctgcactgccggttccagaactgcaaagttggtgaactacaggagatgtgggtatttagactccaaagtttatactgagctcagtgcctgggaccgctccagctgcactgcagccaggggggataccagcttcattcctcagagtaaaccaaccttgggagctgtgtgccagttccagtgtaagcagtaataccatgttgtaagagggaacattaaagcccattttatgacatata

SEQ ID NO: 335462 - DNA, 3036 bp, Artificial Sequence
  derived and/or modified sequence
gacgcgcgccccagcggcgcgagcggaagagatagagcttcgcggagacggcggaagcggagagcaacagcgcgccggtgaggctgctgtcagaaaggaacttttacacagtttgccttcagagacagtctatcggcatgttgtagagttttattactaagaaaataaatgttacttacatgatggttttactcagcatttggtgtggtggatcttacataaacctttagaacttacattagagtgttcaagtcttctgagactccagagtcacctaagattgtggtggtgccatgcagcaagaatcagagagatgcagagttagagccagaaggcctgacatggcactttatgtacctaaagctcgtaggggtgcagtactccttaagacaggtgatgaagaagaaagctgtggttcacctaactctgtggtgaaagaaaagcaaaaagaaagttctctctcccaaaaagaagtctttaaagacaaaccggaggctcgaagactaaatatcaatcctgatagaaaggagcataattgtagagaagaaaagaaatcttcaacaaaattaagaatggacacatgccttcaaaaaacaaatagagtttgttctaagagaggaaccactgaatccaaagaagtattatcccaaggacaacagcagggagccccaaatgctggggttataactaatgcacctttgcagagacattttaaaccaaagaaggtggagtgtttggaagttgaaactacggatgtgacaggacatgagaggatacttctttcacaggcctgtttagaaatcagcgaggctcaagttccaagcaaaccattccaaaatgtggaattctgtgacttcagtaggcatgaacctgatggggaagcatttgaagacaaagatttggaaggcagaattgaaactgataccaaggttttggagatactatatgagtttcctagagtttttagttctgtcatgaaacctgagaatatgattgtaccaataaaactaagctctgattctgaaattgtacaacaaagcatgcaaacatcagatggaatattgaatcccagcagcggaggcatcaccactacttctgttcctggaagtccagatggtgtctttgatcaaacttgcgtagattttgaagttgagagtgtaggtggtatagccaatagtacaggtttcatcttagatcaaaaagatacagattccattcctgcaactatgggtcacatctctctgtcagagagcacaaatgacactgttagtccagtaatgattagagaatgtgagaagaatgacagcactgctgatgagttacatgtaaagcacgaacctcctgatacagctgtccttgctcatgaaacacatagagatagtggatttaagaatgtaggtgacattaccaataaagcatgtatgatggacactacaggtatgtcctgtagtgatcatgtaactgttgatagcccttatgtagttgcagttagaatagctgatgagacctctattaatacacgaagtttctcaaagtttgtaggaatgagtgcagatgcaacccctcttcatgtagctagaagtgggaatgacactgaagatttcagcaacccttctgcttgctcagatatttatggtgagagtatttcatctcattttacagagtcaacaggaaagttgatagagagcttgtcagattgtgcttcctccttacctataaaaaagattgctggtagtaattataacacttttttggactctgaactcagtatgttaaatgggacaaaagttctttcagacagtgccgtgggcattgacctgggtagtactggtgatacaacagaagcattgcacgaactaagaactgccgaagagttcaaaacagaagagcaagatgactcagggagtatagaatttggtgtatcttttcctgatagggaatcatcatctatggaaacatccatcgaaccaaaagcaactgaaacttctcacacagagggaattactgccattgaggagagctgggagtctatgtttaacgatgatggtgactgcctggatccacgtcttctacaagagttatcagggaataccaagagcagagagagcatccaggaacctagatctgattactacaatcatgaagttcctgatattgacctcagtgattgtgaattcccacatgtcattgaaatttatgactttccccaagaatttcatactgaagaccttctacgggttttctgcagttatcaaaagaaaggatttgatattaaatgggtggatgatacacatgccctaggagtattctccagtccaattacagctcgtgatgcgttgggtattaaacacaccatggtgaagattcgtcccttgtcacaggccacaagagcagccaaggccaaagctagagcttatgctgagttcctccagccagcaaaggagcgtcctgagacttcagcagccctagccagaaggttagtcatcagtgcccttggggttcgaagtaagcagagcaaaaccgaacgagaagcagagctcaagaaactgcaagaagccagagagagaaagcggttggaagccaagcaacgggaagacatctgggaaggcagagaccagtctacagtttgaacatcactcaatgaaagggataattccatgaatcagaaaatgtttccatagccttcagataagatgatccttccagagctctatgtacatgcagatgtgcatgttaaagagataaagtgatcgagacaaggactgactgggtatagaaggaagacagactcctgtcttcactcctaaatgcagttctttggaatcaccctactgtggtgggcgtagtagggagccatcagctaggaagaaacgtgggagatgtgaattccaagagttgcctggacagggcaagtcatgttagcgtgggtcacacttccaagatatttaaagcaaatacaaaacagaacagaggattcaaaccgcaagtatgggagatttaggccctgcagaggcagaccattccttagtatctcac

SEQ ID NO: 335463 - DNA, 1340 bp, Artificial Sequence
  derived and/or modified sequence
gcttcgcggagacggcggaagcggagagcaacagcgcgccgagacggagttttgccatgttgtccaggctggtgtcgaaatcctgagctcaagtggtctgcctgcctcggcttcccaaagtgctgggattacaggtgaggctgctgtcagaaaggaacttttacacagtttgccttcagagacagtctatcggcatgttgtagagttttattactaagaaaataaatgttacttacatgattgtggtggtgccatgcagcaagaatcagagagatgcagagttagagccagaaggcctgacatggcactttatgtacctaaagctcgtaggggtgcagtactccttaagacaggtgatgaagaagaaagctgtggttcacctaactctgtggtgaaagaaaagcaaaaagaaagttctctctcccaaaaagaagtctttaaagacaaaccggaggctcgaagactaaatatcaatcctgatagaaaggagcataattgtagagaagaaaagaaatcttcaacaaaattaagaatggacacatgccttcaaaaaacaaatagagtttgttctaagagaggaaccactgaatccaaagaagtattatcccaaggacaacagcagggagccccaaatgctggggttataactaatgcacctttgcagagacattttaaaccaaagaaggtggagtgtttggaagttgaaactacggatgtgacaggacatgagaggatacttctttcacaggcctgtttagaaatcagcgaggctcaagttccaagcaaaccattccaaaatgtggaattctgtgacttcagtaggcatgaacctgatggggaagcatttgaagacaaagatttggaaggcagaattgaaactgataccaaggttttggagatactatatgagtttcctagagtttttagttctgtcatgaaacctgagaatatgattgtaccaataaaactaagctctgattctgaaattgtacaacaaagcatgcaaacatcagatggaatattgaatcccagcagcggaggcatcaccactacttctgttcctggaagtccagatggtgtctttgatcaaacttgcgtagattttgaagttgagagtgtaggtggtatagccaatagtacaggtttcatcttagatcaaaagatacagattccattcctgcaactatgggtcacatctctctgtcagagagcacaaatgacactgttagtccagtaatgattagagaatgtgagaagaatgacagcactgctgatgagttacatgtaaagcacgaacctcctgatacagctgtccttgctcatgaaacacatagagatag

SEQ ID NO: 335464 - DNA, 2337 bp, Artificial Sequence
  derived and/or modified sequence
atgcagcaggagagcgagagatgcagagtgagagccagaagacccgacatggccctgtacgtgcccaaggccagaagaggcgccgtgctgctgaagaccggcgacgaggaggagagctgcggcagccccaacagcgtggtgaaggagaagcagaaggagagcagcctgagccagaaggaggtgttcaaggacaagcccgaggccagaagactgaacatcaaccccgacagaaaggagcacaactgcagagaggagaagaagagcagcaccaagctgagaatggacacctgcctgcagaagaccaacagagtgtgcagcaagagaggcaccaccgagagcaaggaggtgctgagccagggccagcagcagggcgcccccaacgccggcgtgatcaccaacgcccccctgcagagacacttcaagcccaagaaggtggagtgcctggaggtggagaccaccgacgtgaccggccacgagagaatcctgctgagccaggcctgcctggagatcagcgaggcccaggtgcccagcaagcccttccagaacgtggagttctgcgacttcagcagacacgagcccgacggcgaggccttcgaggacaaggacctggagggcagaatcgagaccgacaccaaggtgctggagatcctgtacgagttccccagagtgttcagcagcgtgatgaagcccgagaacatgatcgtgcccatcaagctgagcagcgacagcgagatcgtgcagcagagcatgcagaccagcgacggcatcctgaaccccagcagcggcggcatcaccaccaccagcgtgcccggcagccccgacggcgtgttcgaccagacctgcgtggacttcgaggtggagagcgtgggcggcatcgccaacagcaccggcttcatcctggaccagaaggacaccgacagcatccccgccaccatgggccacatcagcctgagcgagagcaccaacgacaccgtgagccccgtgatgatcagagagtgcgagaagaacgacagcaccgccgacgagctgcacgtgaagcacgagccccccgacaccgccgtgctggcccacgagacccacagagacagcggcttcaagaacgtgggcgacatcaccaacaaggcctgcatgatggacaccaccggcatgagctgcagcgaccacgtgaccgtggacagcccctacgtggtggccgtgagaatcgccgacgagaccagcatcaacaccagaagcttcagcaagttcgtgggcatgagcgccgacgccacccccctgcacgtggccagaagcggcaacgacaccgaggacttcagcaaccccagcgcctgcagcgacatctacggcgagagcatcagcagccacttcaccgagagcaccggcaagctgatcgagagcctgagcgactgcgccagcagcctgcccatcaagaagatcgccggcagcaactacaacaccttcctggacagcgagctgagcatgctgaacggcaccaaggtgctgagcgacagcgccgtgggcatcgacctgggcagcaccggcgacaccaccgaggccctgcacgagctgagaaccgccgaggagttcaagaccgaggagcaggacgacagcggcagcatcgagttcggcgtgagcttccccgacagagagagcagcagcatggagaccagcatcgagcccaaggccaccgagaccagccacaccgagggcatcaccgccatcgaggagagctgggagagcatgttcaacgacgacggcgactgcctggaccccagactgctgcaggagctgagcggcaacaccaagagcagagagagcatccaggagcccagaagcgactactacaaccacgaggtgcccgacatcgacctgagcgactgcgagttcccccacgtgatcgagatctacgacttcccccaggagttccacaccgaggacctgctgagagtgttctgcagctaccagaagaagggcttcgacatcaagtgggtggacgacacccacgccctgggcgtgttcagcagccccatcaccgccagagacgccctgggcatcaagcacaccatggtgaagatcagacccctgagccaggccaccagagccgccaaggccaaggccagagcctacgccgagttcctgcagcccgccaaggagagacccgagaccagcgccgccctggccagaagactggtgatcagcgccctgggcgtgagaagcaagcagagcaagaccgagagagaggccgagctgaagaagctgcaggaggccagagagagaaagagactggaggccaagcagagagaggacatctgggagggcagagaccagagcaccgtgtag

SEQ ID NO: 335465 - DNA, 2337 bp, Artificial Sequence
  derived and/or modified sequence
atgcagcaggagtccgagcggtgtcgtgtaagagcgcgtagacccgacatggcactgtacgtcccaaaggcaagaaggggagccgtgttgttaaagaccggagatgaagaggaatcttgcggtagccctaacagcgtggtgaaagagaaacagaaggagagttccctgtcccagaaagaagtcttcaaggataagccagaggctcgccggctgaacattaacccagatagaaaggaacataactgtcgagaggagaaaaagagttccaccaaactgcgtatggatacttgccttcagaagaccaacagggtctgttccaagagagggaccaccgagagtaaggaggtgttgagccaaggacagcagcaaggcgctcctaacgctggcgtaattactaacgctcctctacaacggcacttcaaacctaagaaggtcgagtgcctggaggtcgagactaccgacgtgaccgggcatgagcgcatccttctaagccaggcatgcttagaaattagcgaggctcaggtcccatctaaaccgtttcagaatgtcgagttctgtgacttttctagacatgaaccagatggggaggcattcgaagacaaggacctggaggggcgcatagaaactgataccaaggtgctggagatcctctatgagtttcccagagtattcagctcggtcatgaaaccagaaaacatgatcgtgccgatcaagttgtcctccgactctgaaatcgtccagcagagtatgcagaccagcgacgggattctgaatccctctagtggaggcatcacgactactagcgtgcctggatcccccgacggcgtgttcgaccaaacctgcgttgacttcgaagtggagtcagttggcggaatagccaactcaacgggctttattctagaccaaaaagacactgactccatcccggctactatggggcacattagcctgtcagaaagtacgaacgacaccgtgtcgcccgttatgattcgcgaatgtgagaagaatgacagcacggcagatgaactgcacgttaagcatgaaccacctgatacagctgtgcttgcccatgagacccacagagattccgggttcaaaaatgtcggggacataaccaacaaggcctgtatgatggatacgactggaatgtcatgttccgatcatgttacagtggattctccctatgtcgttgcagtcagaatcgctgacgagactagcatcaataccagatctttttcaaagttcgttggcatgagcgccgatgccacgcctctgcatgttgcgcgctctggtaacgacacagaagacttttctaacccatctgcttgcagcgacatttatggtgaatccatttcatcccactttactgagagcaccggcaaattaatagagtcgttatcagactgcgcctccagcttacccatcaaaaagatcgctggatccaactataatactttcctggactcggagctcagcatgctcaatggaaccaaggttttgtccgactccgcagttggaattgatttgggaagtacgggcgacacgaccgaggctcttcacgagctacgtactgctgaggagttcaagaccgaagagcaagacgattctgggagtatcgagttcggcgtctcatttcctgaccgcgagagcagtagcatggagacaagtattgagccgaaggcaacggagaccagtcacacggaaggaatcaccgcaatcgaggaaagctgggaaagcatgttcaacgacgacggcgattgcctggacccccgtctgctgcaagagctctcaggtaacacaaaaagcagggagtccatccaggaaccccggtctgattattacaaccacgaggtgccggacatcgatttaagcgactgtgaatttccacacgtcatagagatctacgacttcccgcaggagtttcacacagaggatctgctgagagtcttctgctcgtaccagaagaaagggtttgacattaaatgggtcgatgacacacacgctctaggcgtctttagcagccccatcacagcccgcgatgctctaggaatcaaacatacgatggttaagattaggcctctgagccaggccacgagagccgccaaggccaaagcccgggcgtatgccgagttccttcaacccgctaaggaacggccagaaacatccgcagctctggcacggcggcttgtgatttccgcattaggagtgagatccaagcagtccaaaacagagagagaggccgaactaaagaagctgcaggaggcccgtgagagaaaacgcctggaagccaaacagcgcgaagacatttgggagggacgcgatcagagtacggtgtag

SEQ ID NO: 335466 - DNA, 2337 bp, Artificial Sequence
  derived and/or modified sequence
atgcagcaggaatcagagcggtgccgcgtccgggcacgtcggcctgatatggcattgtacgtcccgaaagcaagacgcggcgccgtgctgctaaaaactggagacgaagaagaatcctgcggcagccctaatagcgtggtcaaggagaagcaaaaggaatcgtctctgtcccagaaggaggtgttcaaggacaaacccgaagcaagacggcttaacatcaaccctgaccgaaaggaacacaactgcagagaagaaaaaaagtccagtacaaagctgaggatggacacatgtcttcagaagaccaatagggtttgttctaaaagaggcactacagaatctaaggaagttctgtctcaggggcaacagcagggcgcgcccaatgcaggtgtaataactaatgcccctctacaacggcactttaaaccaaagaaggtcgagtgtctggaggtcgaaaccaccgacgttaccggtcacgaacgtatactgctgtcccaagcctgtctagagatctctgaggcccaagtgccaagcaaacccttccagaacgtggagttctgcgatttctcgcgtcatgaacccgacggagaagccttcgaagataaagatctcgaaggaagaattgagactgataccaaagtactggagattttatacgaattccctcgggtcttctcctcagtgatgaagcccgaaaatatgatcgtgcccataaagttgagcagcgatagcgagattgtgcagcagagtatgcaaacctccgacgggattctcaaccccagcagcggcggaattaccacgacttcagttccagggtctccggacggagtcttcgaccaaacttgcgtggactttgaggtcgagagcgttggcgggattgctaattcaacggggtttatactcgatcaaaaagacactgactccatccccgcaaccatgggacacatcagcttaagcgaaagcacaaatgacacggtgtcacccgtgatgattcgggagtgtgagaagaatgatagcaccgccgacgaactgcacgtcaagcacgagccacctgacacggcagtattggcccacgaaacacacagggactcaggttttaagaatgtcggcgacataactaacaaagcttgcatgatggacactactggtatgtcttgcagcgaccacgttaccgtggacagcccttatgtggtcgcagttcggattgccgatgagacctctattaacacccgttctttcagcaagtttgttggtatgagcgctgacgctactcccttgcacgtggcccgctccgggaatgacacagaggacttttccaatccttccgcctgtagcgacatctacggggagtccatttcatcgcactttacggagtccaccggcaagttgatcgaaagcctcagcgactgtgccagctcacttcccatcaagaagatcgccggctctaattacaacaccttcctggattcagagctgtctatgcttaatggtacaaaggtactaagcgactctgcggtcggaatcgatcttgggtcaacaggcgatactacagaggctctgcacgagctgcgcacagctgaagaatttaagaccgaagagcaggacgactccggcagtatcgaattcggagtctcattcccagatagagagagtagttccatggaaactagcatagagccgaaagctaccgagactagccacaccgagggcataaccgccatcgaggagtcttgggagtccatgttcaatgacgacggagactgcctggatcccagactgctgcaggaactgtcaggaaataccaaaagccgcgaatcaatccaagaacctcggagtgattattataaccacgaggttccggatatagatctttccgactgcgagtttccccatgtcatcgaaatatacgacttcccccaggaattccacacagaggacctgctgcgcgttttctgtagttatcagaaaaagggcttcgacattaaatgggtcgacgacacacacgccctgggagtattttcaagccctattacggcccgagatgctttgggtatcaagcacactatggtgaagatcagaccattgtcccaagctaccagggccgcaaaagccaaagcccgcgcatacgccgagttcttacagccagcaaaagagcggccagaaaccagcgccgcgctcgcccgacgcctggtaataagtgccctcggcgtgcgcagtaagcagtctaagaccgagagggaggccgagctgaagaaacttcaggaggccagagagcggaagagactggaagccaaacagcgggaagacatatgggagggccgcgaccagtccaccgtgtag

SEQ ID NO: 335467 - DNA, 2337 bp, Artificial Sequence
  derived and/or modified sequence
atgcagcaggagagcgagcgctgccgggtgcgggcccggcggccagacatggccctgtatgtgcccaaggccaggagaggagctgtgctgctgaagacaggagatgaggaggagagctgtggcagccccaacagcgtggtgaaggagaagcagaaggagagcagcctgagccagaaggaggtgttcaaggacaagccagaggcccggcggctgaacatcaacccagacaggaaggagcacaactgccgggaggagaagaagagcagcaccaagctgaggatggacacctgcctgcagaagaccaacagagtgtgcagcaagaggggcaccacagagagcaaggaggtgctgagccagggccagcagcagggcgccccaaatgctggggtcatcaccaatgcccccctgcagaggcacttcaagcccaagaaggtggagtgcctggaggtggagaccacagatgtgacaggccacgagcgcatcctgctgagccaggcctgcctggagatcagcgaggcccaggtgcccagcaagcccttccagaatgtggagttctgtgacttcagcagacatgagccagatggagaggcctttgaggacaaggacctggagggcagaattgaaacagacaccaaggtgctggagatcctgtatgagttccccagggtcttcagctctgtgatgaagccagagaacatgattgtgcccatcaagctgagcagtgacagcgagatcgtgcagcagagcatgcagaccagtgatggcatcctgaaccccagcagcggcggcatcaccaccacctctgtgcccggcagcccagatggagtgtttgaccagacctgtgtggactttgaggtggagagcgtgggcggcatcgccaacagcacaggcttcatcctggaccagaaggacacagacagcatcccagccaccatgggccacatcagcctgtctgagagcaccaatgacacagtgtcccctgtgatgatccgggagtgtgagaagaatgacagcacagcagatgagctgcacgtgaagcatgagcccccagacacagctgtgctggcccacgagacccaccgggacagcggcttcaagaatgtgggggacatcaccaacaaggcctgcatgatggacaccaccggcatgagctgcagcgaccacgtgacagtggacagcccctacgtggtggccgtgagaattgctgatgagaccagcatcaacaccaggagcttcagcaagtttgtgggcatgtctgcagatgccacccccctgcacgtggcccggtctggaaatgacacagaggacttcagcaaccccagcgcctgcagcgacatctatggagagagcatcagcagccacttcacagagagcacaggcaagctgattgagagcctgagtgactgtgccagcagcctgcccatcaagaagattgctggcagcaactacaacaccttcctggacagcgagctgtccatgctgaatggcaccaaggtgctgagtgacagcgctgtgggcatcgacctgggcagcactggagacaccacagaggccctgcacgagctgaggacagctgaggagttcaagacagaggagcaggatgacagcggcagcattgaatttggagtgtccttcccagaccgggagagcagctccatggagaccagcattgagcccaaggccacagagaccagccacacagagggcatcacagccatcgaggagagctgggagagcatgtttaatgatgatggagactgcctggacccccggctgctgcaggagctgagcggcaacaccaagagccgggagagcatccaggagcccaggagtgactactacaaccacgaggtgcctgacatcgacctgagtgactgtgagttcccccacgtgattgagatctatgacttcccccaggagttccacacagaggacctgctgcgggtcttctgcagctaccagaagaagggctttgacatcaagtgggtggatgacacccacgccctgggcgtcttcagcagccccatcacagccagagatgccctgggcatcaagcacaccatggtgaagatccggcccctgagccaggccacccgggccgccaaggccaaggcccgggcctatgcagagttcctgcagcctgccaaggagaggcctgagaccagcgctgccctggcccggcggctggtgatcagcgccctgggcgtgcgcagcaagcagagcaagacagagcgggaggccgagctgaagaagctgcaggaggcccgggagaggaagaggctggaggccaagcagcgggaggacatctgggagggccgggaccagagcacagtgtag

SEQ ID NO: 335468 - DNA, 2337 bp, Artificial Sequence
  derived and/or modified sequence
atgcagcaggagagcgagcggtgccgggtgcgggcccggcggcccgatatggcactgtacgtacctaaggcgaggcggggagcggtgctgctcaaaacaggggacgaggaggaatcctgcggatcaccaaactccgtggtgaaagaaaagcagaaggaatcctccctctctcaaaaggaagtttttaaagacaagccagaagcgagaagactgaacattaatcctgaccgcaaagagcataactgtcgagaggagaaaaagtcaagcaccaagctccggatggatacttgcctccagaagaccaaccgggtgtgctcaaaaagagggaccaccgaatcgaaggaagtgctgtcacaggggcagcagcaaggtgcaccgaacgcgggcgtcatcacaaatgcccccctccagagacatttcaagccaaagaaagtcgagtgtttagaggtggagactaccgatgtgaccgggcatgaacggatcctgctcagtcaagcttgtctagaaatatctgaggcccaggttccctcaaagccttttcaaaatgtggagttctgcgatttttcaaggcacgagcctgatggagaggcttttgaggacaaagacctggagggacgtatcgagaccgatactaaagttctcgagattctgtacgagttcccccgtgttttcagcagtgtgatgaagcctgaaaacatgattgtgccgatcaagctgagctctgactctgagatcgtgcaacagtccatgcagacaagtgacgggattttgaatccttcctctggcgggattaccaccacatccgtgccgggaagtcctgatggagtctttgaccaaacttgtgtggatttcgaggtggagtcggttggtggtattgccaattccactggattcatcctggaccaaaaagacaccgatagtatacccgccactatgggacacatcagcctgagcgaatcaaccaacgataccgtaagccctgtcatgattagagagtgtgagaaaaatgattctaccgctgatgagttgcacgttaagcacgaacctccagatactgccgtgcttgcgcacgagacacaccgagatagcgggttcaaaaatgtcggggacatcacgaataaggcgtgcatgatggatacaacgggaatgtcatgcagtgaccatgtcaccgtggactcaccgtatgtggtggccgtgcggatagccgacgagacgtctatcaacactcggtcttttagcaaattcgtgggcatgagtgccgacgccacccccctgcatgttgcaaggagcggcaacgacacagaagatttcagtaacccatctgcctgttctgacatatacggtgagtctatctccagtcattttaccgagagcactggcaagctgattgagtccctgtcagattgtgcgtcctcactgccaattaagaagattgctggcagcaactacaacacatttctggactctgaattgagcatgttgaacggaaccaaggtgctttccgattcagccgttggaatagaccttgggagcaccggtgatacaacagaagcactgcacgagttgcggaccgctgaagaattcaagacagaagagcaagacgatagcgggagcattgaatttggtgtgagcttccccgatagagaatcaagtagtatggaaacatcgattgaaccaaaggctacggagaccagtcacaccgagggaataacagctatcgaagaatcttgggaatcaatgttcaatgacgacggtgactgtctcgatcccagattgctccaggagctgtccggcaatactaagagcagagaatcgattcaggaaccgaggtctgactactacaaccacgaggtacccgatatcgatctctctgattgcgaatttccacatgttatcgaaatctatgacttcccccaagaatttcataccgaagatctgttgcgcgtcttttgttcttatcaaaaaaaaggttttgatatcaagtgggtggatgacactcatgccctgggcgtgttttcatcccctattacagctcgagatgccctggggataaaacatactatggtgaagatccgtcctttatcccaggccactagggcagcaaaggcaaaggcgagggcttacgccgaatttcttcagcctgcaaaggaaaggcccgaaacatccgcagcactggccaggcgattggtgatctctgcactgggggttcggtcgaaacagtccaaaaccgagagagaagcagaattaaagaagctgcaggaagccagggaaagaaaaaggttagaggccaaacaaagggaggacatttgggaaggaagagaccagagcacagtctag

SEQ ID NO: 335469 - DNA, 2337 bp, Artificial Sequence
  derived and/or modified sequence
atgcagcaggagagcgagcggtgccgggtgcgggcccggcggcccgatatggcactgtacgtgcccaaagctaggaggggagcagtgctcctcaagacaggggatgaggaggaatcttgtggtagccccaacagtgttgtgaaagagaaacagaaggaaagcagcctcagtcagaaggaagttttcaaggataaaccagaagcgcgccgactcaacatcaaccccgatcgcaaggaacacaattgccgagaggagaaaaaatctagcactaaattgcgcatggatacgtgcctacagaagaccaatcgcgtctgtagcaaacgaggaacaaccgagagcaaagaagtactatctcaggggcagcagcagggtgctcctaacgccggggtgattacaaatgctcctctacagcgacactttaaacctaaaaaggtcgaatgcttggaggtggaaaccacagatgtcactggacacgaacggattcttctcagccaggcttgtctagagattagcgaggcccaggtgccctcaaaaccgttccagaatgtggagttctgtgactttagtaggcacgaaccagatggcgaggccttcgaagataaggaccttgaaggacgtatagagacagacaccaaggtactagagatcctctatgaattcccgcgcgtgttcagtagtgtaatgaagcctgagaatatgatcgttcccattaagttgagctccgactctgagattgttcagcagtctatgcagacaagcgacggtatactgaaccctagctcaggaggtattactacaactagtgttcctggcagtcctgatggagtttttgatcagacctgcgtggattttgaggtagagtccgtagggggcatagccaactccacaggctttatcctggatcagaaagatacagacagcattccagctactatgggccatatcagcttgtcagagtcaactaacgacactgtgtcacccgtgatgatccgagaatgtgagaagaacgacagcaccgccgacgaattgcatgtgaagcatgagcccccggacactgccgtgttggctcatgagacgcatagagatagcggatttaaaaatgtgggtgacattactaacaaggcctgcatgatggacactactggaatgtcttgttccgaccacgttactgtggactctccgtacgtggtggcggtgcggatcgccgacgagacctccatcaatacgagatccttcagcaaattcgttgggatgagtgccgatgctacacccctgcatgtggctcgctcgggtaatgacacagaggacttcagtaacccttcagcctgtagtgatatctatggcgaaagcataagttcccattttacagaatctactggcaagcttatcgaaagcctgtctgactgcgccagtagcctgccgataaagaagatcgcgggatccaattataatacttttttagactcggaactgtctatgttaaatggtaccaaggttctatccgactccgccgtgggtattgatttaggctccactggcgacacgacagaggctctccatgagctgcgaacagctgaggagtttaagactgaggagcaggatgattcaggatcgatagagttcggcgtgtctttccccgaccgggaaagttcctccatggaaaccagtatcgaacccaaagctacggagacttcgcacacggaaggcattaccgctatcgaagaatcctgggagtctatgttcaacgacgatggagactgtctggacccacgactgctccaggagttgtccggaaacaccaagtctcgagaatcaattcaagagccacggtctgattactataaccatgaagtgccagacattgatttatcagattgtgaattcccacatgtgatcgagatttatgatttcccgcaggaatttcacacggaggatttgctccgagtcttttgcagctaccagaagaagggcttcgacatcaaatgggtggacgatacacacgcactaggcgtgttctcttcccccatcactgctcgggatgctctcggcatcaagcatactatggtgaaaataaggccacttagtcaggccactcgcgcagccaaagctaaagcccgcgcatacgctgagtttctccagccggccaaagagaggccggaaacatcggccgctctggccaggaggcttgttattagcgccctgggagtccgcagcaaacagtcaaagacagaaagggaagcagaattaaaaaagctgcaggaggctcgcgagcgcaaacgattggaagctaaacagcgcgaggacatctgggaggggagggatcagtctactgtatag

SEQ ID NO: 335470 - DNA, 2337 bp, Artificial Sequence
  derived and/or modified sequence
atgcagcaggagagcgagagatgtcgggtgcgcgctcggcgaccagacatggccctgtacgtccccaaagctcgtaggggagccgtgctgctgaaaactggggatgaggaggaatcgtgtggctccccaaattcagtggtgaaggaaaagcagaaagaatcatctctgtctcagaaggaagtgttcaaggacaagcccgaggctcgacgactgaatattaatccagaccggaaagaacacaattgccgggaggaaaaaaaatcctccacaaagttgcgaatggacacgtgcctacagaaaacaaaccgggtctgcagcaaaagggggaccactgagtccaaagaggtgctgtctcaaggtcagcagcagggagcccctaacgccggtgtgatcaccaatgcccctttacagagacatttcaagcctaagaaggtagagtgtctcgaggttgagacaacagatgtgacaggccatgagcggatcctgctgtcccaagcctgcctcgaaatatccgaagcacaagtcccttcaaagcctttccagaatgtcgaattctgtgatttttcccggcacgaacccgacggggaggctttcgaggacaaggacctggaggggcgtatcgaaactgatactaaggtactggaaatactgtatgagtttcctagagtgttctcatcggtgatgaaaccagaaaacatgatcgtccccattaagttgtcctcggacagtgaaattgtgcaacagtctatgcagactagcgatggcattctcaaccccagcagcggcggaatcacgaccaccagtgtgcccggttctccagatggtgtttttgaccagacttgcgttgacttcgaggttgaatcggtaggcggaatcgcaaacagtaccggttttatcctcgatcagaaagatacagattcaatccctgccactatgggacatatcagcttgagcgaatctaccaatgacaccgtatcacctgtcatgatccgcgaatgtgagaagaatgatagcactgcggatgagctgcacgtgaaacacgaaccacctgacacagccgttctcgctcacgaaacccatcgagattcagggttcaaaaatgtcggagacatcactaataaagcttgcatgatggataccacgggcatgtcttgtagcgatcacgtgactgtggattccccctatgtagtggctgtaagaattgcagacgagactagcataaatacgcggagctttagtaagtttgtaggcatgtctgcagatgctaccccactgcacgtcgctagatcaggcaacgacaccgaggacttcagtaacccttctgcctgcagcgacatctacggcgagtccattagctcccattttaccgaatcaacaggcaagctgattgaatccctgtctgactgcgcgagtagtttacctataaagaaaattgccggaagcaattataatacgttcctcgacagcgaacttagcatgcttaacggcacgaaggtgttgtcggattctgccgttgggatcgatttggggtccacaggagacaccacggaggccctgcatgaactaaggaccgccgaagagtttaaaacggaagagcaggatgatagcggctccatcgagttcggagtatcattccccgatagggaaagttccagtatggaaacctccatagagcccaaagccacagaaaccagccacaccgagggtattaccgccatcgaagaaagctgggagtccatgtttaatgacgacggagattgtctcgaccctcggttgctgcaggaactgtccgggaatacaaaatccagagagtccatccaggaaccaagatctgactactacaaccacgaagttcctgatatcgatctaagcgactgcgagtttcctcatgttatagaaatatacgacttcccacaggagttccacactgaggatctgttaagagtcttttgtagctaccagaagaagggctttgacatcaagtgggtcgacgatacccacgccctcggagtgtttagttcccctatcaccgcacgcgacgcactagggatcaaacacacaatggttaaaatcaggccgttgagccaggccaccagagccgcaaaagctaaagcacgcgcatatgctgagttcctgcagccagcgaaagaacggccagagacaagtgcagcactggcgagaaggcttgtgattagcgctctcggagtcagaagtaaacagagcaagaccgaaagagaggctgagctgaaaaagctacaggaagcgagggaacggaaacggttagaagcaaaacagcgcgaggacatctgggaaggtcgtgatcagagcacagtctag

SEQ ID NO: 335471 - DNA, 2337 bp, Artificial Sequence
  derived and/or modified sequence
atgcaacaggagagcgagcgctgtcgcgtccgggcacgccgacccgatatggccctgtatgtgcccaaggcccgtagaggagctgttttactcaagacgggcgatgaagaggaatcttgcggttctcccaattccgtggtgaaagagaagcagaaggaaagctcccttagtcagaaagaggttttcaaggacaagcctgaggctcgaaggctgaacattaatccagatagaaaagagcataattgcagggaggagaagaaatcctccaccaagctgagaatggatacctgtcttcaaaagaccaatcgggtatgttcgaagagaggaaccactgaatccaaagaagtgctctctcaggggcagcagcagggcgcacccaacgccggagtgatcacgaacgcaccactgcagcgacactttaagcccaaaaaagtggagtgtctggaggtagagaccacggacgtgacagggcatgagaggatcttactgagccaagcctgcctggagatctctgaagcgcaagtaccttcaaagcctttccagaacgtcgaattctgcgactttagtaggcacgaaccagacggcgaagcatttgaagataaagacctagaagggagaattgagaccgatactaaagtgctcgagattttgtacgagtttcccagagtcttcagttccgtgatgaaacctgagaacatgatcgtgcccatcaagctctcctctgattccgaaattgttcagcagagtatgcagacatccgacggaatcctgaaccctagtagtggcggtatcaccacaacttctgtcccgggatcacccgatggtgtgtttgatcaaacatgtgtggacttcgaggtggaatccgtgggaggcatcgcaaattccactggcttcattctggaccaaaaagataccgatagcattcctgcgactatggggcacatatcactatcagagtccaccaacgatacggtttcacccgtgatgatacgggagtgcgaaaagaatgactccacggctgacgagttacacgtcaagcacgagccgccagacacagcagtgctcgcccatgaaacacaccgagactctgggtttaaaaacgtgggggacatcactaacaaagcttgcatgatggatactactggaatgtcttgttctgaccacgttacagtggattcgccttacgtagtagccgttcgcatcgcagacgaaacctccatcaacacccggagtttcagcaagttcgtcggtatgtctgcggacgccacgcccctgcatgtggcaagatctggcaatgacactgaagacttttctaatcctagcgcctgtagcgacatttatggagaatccattagcagccactttaccgagtctaccgggaaattgatcgagtccttgtccgactgcgcttcttccctcccaatcaaaaaaatcgccggaagcaattataatacgttcttagacagcgagctttcaatgctaaacggcacaaaggtgctgtcagacagcgccgtgggaattgacttggggtccactggggacactacggaagccctccacgagctccgcaccgcagaggagttcaagactgaggaacaggacgattcagggtccatcgagttcggagttagcttccctgatagagagtctagttccatggagacctctatcgaacctaaagccactgaaactagccataccgagggaatcacagcaatcgaggagagttgggaatcaatgttcaacgacgatggcgactgcctggaccctaggttgctgcaagagttgtccggcaacactaaaagtagagaatctatccaagaacccaggtccgattactataatcacgaggtccccgacatcgacctaagcgactgcgagttccctcacgtaattgaaatctatgatttccctcaagaatttcacacagaggatttgctccgtgtcttctgtagctaccagaaaaaaggttttgatatcaaatgggtcgatgacacacatgccctgggcgtcttctcgagccccattactgcaagggatgccttgggtatcaagcatacaatggtgaagattcgccctctgagccaggccactcgggcagcaaaggcaaaagctcgcgcttatgctgaatttttacagcccgcaaaagaaagaccagagacctccgcggctctagcacgaaggctggttatttcagccctcggcgtgaggtctaagcagtctaagactgaaagagaggccgagctgaagaagctgcaggaggctcgggagagaaagcgcttggaggcaaaacaacgggaagatatctgggagggaagagaccagagcaccgtatag

SEQ ID NO: 335472 - protein, 470 aa, Artificial Sequence
  derived and/or modified sequence
MDPRGILKAFPKRQKIHADASSKVLAKIPRREEGEEAEEWLSSLRAHVVRTGIGRARAELFEKQIVQHGGQLCPAQGPGVTHIVVDEGMDYERALRLLRLPQLPPGAQLVKSAWLSLCLQERRLVDVAGFSIFIPSRYLDHPQPSKAEQDASIPPGTHEALLQTALSPPPPPTRPVSPPQKAKEAPNTQAQPISDDEASDGEETQEACSIPGIGKRMAEKIIEILESGHLRKLDHISESVPVLELFSNIWGAGTKTAQMWYQQGFRSLEDIRSQASLTTQQAIGLKHYSDFLERMPREEATEIEQTVQKAAQAFNSGLLCVACGSYRRGKATCGDVDVLITHPDGRSHRGIFSRLLDSLRQEAVPSVGPGFLTDDLVSQEENGQQQKYLGVCRLPGPGRRHRRLDIIVVPYSEFACALLYFTGSAHFNRSMRALAKTKGMSLSEHALSTAVVRNTHGCKVGPGRVLPTPT

SEQ ID NO: 335473 - DNA, 1413 bp, Artificial Sequence
  derived and/or modified sequence
atggaccccagaggcatcctgaaggccttccccaagagacagaagatccacgccgacgccagcagcaaggtgctggccaagatccccagaagagaggagggcgaggaggccgaggagtggctgagcagcctgagagcccacgtggtgagaaccggcatcggcagagccagagccgagctgttcgagaagcagatcgtgcagcacggcggccagctgtgccccgcccagggccccggcgtgacccacatcgtggtggacgagggcatggactacgagagagccctgagactgctgagactgccccagctgccccccggcgcccagctggtgaagagcgcctggctgagcctgtgcctgcaggagagaagactggtggacgtggccggcttcagcatcttcatccccagcagatacctggaccacccccagcccagcaaggccgagcaggacgccagcatcccccccggcacccacgaggccctgctgcagaccgccctgagccccccccccccccccaccagacccgtgagccccccccagaaggccaaggaggcccccaacacccaggcccagcccatcagcgacgacgaggccagcgacggcgaggagacccaggaggcctgcagcatccccggcatcggcaagagaatggccgagaagatcatcgagatcctggagagcggccacctgagaaagctggaccacatcagcgagagcgtgcccgtgctggagctgttcagcaacatctggggcgccggcaccaagaccgcccagatgtggtaccagcagggcttcagaagcctggaggacatcagaagccaggccagcctgaccacccagcaggccatcggcctgaagcactacagcgacttcctggagagaatgcccagagaggaggccaccgagatcgagcagaccgtgcagaaggccgcccaggccttcaacagcggcctgctgtgcgtggcctgcggcagctacagaagaggcaaggccacctgcggcgacgtggacgtgctgatcacccaccccgacggcagaagccacagaggcatcttcagcagactgctggacagcctgagacaggaggccgtgcccagcgtgggccccggcttcctgaccgacgacctggtgagccaggaggagaacggccagcagcagaagtacctgggcgtgtgcagactgcccggccccggcagaagacacagaagactggacatcatcgtggtgccctacagcgagttcgcctgcgccctgctgtacttcaccggcagcgcccacttcaacagaagcatgagagccctggccaagaccaagggcatgagcctgagcgagcacgccctgagcaccgccgtggtgagaaacacccacggctgcaaggtgggccccggcagagtgctgcccacccccacctag

SEQ ID NO: 335474 - DNA, 1413 bp, Artificial Sequence
  derived and/or modified sequence
atggaccctcgaggcatactgaaggctttcccaaagcgccagaagattcatgctgatgcctcttctaaagtgctggccaaaatcccaagaagggaggagggcgaagaagcggaggagtggctgtccagtcttcgtgcccatgtcgtgagaactgggatcgggcgagcccgtgcagagctttttgagaagcaaattgttcagcacggaggtcagctgtgtcccgcgcagggccctggcgtcacccatatagtcgtggacgaggggatggactatgaaagggctctgcgtctgttgagattaccgcagctgccccccggcgcacagctggtgaagtccgcctggcttagtctgtgcttgcaagagcggcgactggtcgatgtagccggcttttctatctttattcccagccgctacctggaccatccccagccttctaaagcagagcaggatgcctccattcccccaggaactcacgaggctctcctgcagacagctctgtcgcctcctccaccaccgacgaggccggtatctccccctcagaaagcgaaagaagcccctaacactcaagctcagcctattagcgatgacgaggcctcagacggggaagaaacgcaggaggcctgtagtattcccggaatcggcaagaggatggccgagaagattatcgaaatcctagagtctgggcatcttaggaagctggaccatatcagcgaaagtgtgcccgtcctcgagctgttcagcaatatttggggagccggcacgaaaactgctcagatgtggtaccagcagggatttcgctcactggaggacatacgtagtcaggcctccttaactactcagcaggccataggattgaagcactatagcgactttttggagaggatgcccagagaggaagcgactgaaattgagcagaccgtacagaaagcggcccaagcattcaattcaggactcttgtgtgtggcttgtggtagctaccgcagaggaaaagccacttgcggagacgtggatgtattgattacacaccctgacggccgatctcaccgcgggattttctctaggctcctcgatagtctgcggcaggaggccgtgccttctgtgggccctggattcttgacggacgatcttgtgagtcaagaggaaaatgggcagcagcaaaaatatctgggagtttgtcgccttccgggacctggaaggcggcatcggcgtctggacataatcgtggtcccctacagcgagttcgcctgcgcgctattgtactttacaggctccgcccacttcaatcgctcgatgcgcgctctagccaagacaaagggaatgtccctttccgagcacgctctgagcacagcggtggtacggaatacccacggttgcaaagtcggaccaggaagggtattgcctacgccaacatag

SEQ ID NO: 335475 - DNA, 1413 bp, Artificial Sequence
  derived and/or modified sequence
atggacccccggggcatcctgaaggccttccccaagaggcagaagatccacgcagatgccagcagcaaggtgctggccaagatcccccggcgggaggagggggaggaggccgaggagtggctgagcagcctgcgggcccacgtggtgaggactggaattggccgggcccgggcagagctgtttgagaagcagatcgtgcagcacggcggccagctgtgcccagcccagggccctggggtgacccacatcgtggtggatgagggcatggactatgagcgggccctgcggctgctgcggctgccccagctgcccccaggggcccagctggtgaagagcgcctggctgagcctgtgcctgcaggagcggcggctggtggatgtggccggcttcagcatcttcatccccagccgctacctggaccacccccagcccagcaaggccgagcaggatgccagcatccccccaggcacccatgaggccctgctgcagacagccctgagccccccacctccacccaccaggcctgtgagccccccccagaaggccaaggaggcccccaacacccaggcccagcccatcagtgatgatgaggccagtgatggagaggagacccaggaggcctgcagcatccctggcatcggcaagaggatggccgagaagatcatcgagatcctggagagcggccacctgaggaagctggaccacatcagcgagagcgtgcctgtgctggagctgttcagcaacatctggggcgccggcaccaagacagcccagatgtggtaccagcagggcttccgcagcctggaggacatccgcagccaggccagcctgaccacccagcaggccatcggcctgaagcactacagcgacttcctggagaggatgccccgggaggaggccacagaaattgagcagacagtgcagaaggccgcccaggccttcaacagcggcctgctgtgtgtggcctgtggcagctacagaagaggcaaggccacctgtggagatgtggatgtgctgatcacccacccagatggccgcagccaccggggcatcttcagccggctgctggacagcctgcggcaggaggccgtgcccagcgtgggccctggcttcctgacagatgacctggtgtcccaggaggagaatggccagcagcagaagtacctgggcgtgtgccgcctgcccggccctggaagaagacaccggcggctggacatcatcgtggtgccctacagcgagtttgcctgtgccctgctgtacttcaccggcagcgcccacttcaacagatccatgagggccctggccaagaccaagggcatgagcctgtctgaacatgccctgagcacagctgtggtgaggaacacccacggctgcaaggtgggccctggccgggtgctgcccacccccacctag

SEQ ID NO: 335476 - DNA, 1413 bp, Artificial Sequence
  derived and/or modified sequence
atggacccccggggcatcctgaaggccttccccaagcggcagaagatacacgccgacgcaagctcaaaagttctcgcgaagattccacgcagagaagagggggaggaggccgaagaatggctttcttcccttcgggctcacgttgtcaggactgggatagggcgtgcccgagccgaactattcgaaaagcagattgttcagcatggtgggcagctttgtcccgcgcagggcccaggcgtcacgcacatcgtggtcgatgaaggaatggattatgagcgagcacttagactgttgcgactgccacagctgccccccggcgcccaactagtcaagtcagcctggctgagtctctgtctgcaggagcgcaggctggtggatgtggcaggattctctatctttatccccagtagatatctggaccacccccaaccgagcaaagcagagcaagatgcgtccattccacccggcactcatgaggctctcttacaaaccgccttatccccgcccccccccccaaccaggccagtttcacccccacagaaagccaaagaggctcctaatacccaggcacagcctatctccgacgacgaggcgtccgatggcgaggaaactcaagaggcatgctccataccaggtataggcaagaggatggccgagaagattatcgagatattggaaagtggacatctgaggaaactggatcatattagcgagagtgtgcctgtcctggagctgttttccaatatttggggcgcggggacaaagaccgctcagatgtggtatcagcagggatttagaagcttggaagacattaggagtcaagcttctcttaccacccagcaggccattgggctcaagcactactcagattttctggagcggatgccaagggaagaggctacggaaattgagcagacggtccagaaagcggcacaagcttttaactccggacttctctgtgtggcttgcggcagctatagaagggggaaagccacatgcggagacgttgatgtgttgataacccaccccgatgggcgcagccaccggggaatcttttcccgtctgctagactccctgcgccaggaggctgtgccatcagttggccctgggttcctaaccgacgatcttgtatcccaagaggaaaacggtcagcaacaaaagtacctaggagtgtgtcgactgcctggacctggcaggcgacaccggagattggacattatagtagtcccctatagtgagtttgcttgtgcgctgctgtactttacggggtcagctcatttcaaccggtcaatgcgggccctggctaaaacaaaagggatgtccctatccgagcacgccttatcaactgcagtggttaggaacactcatggctgcaaagtcgggcctggcagagtgttgcctaccccaacttag

SEQ ID NO: 335477 - DNA, 1413 bp, Artificial Sequence
  derived and/or modified sequence
atggatcccaggggcatattgaaagcctttcctaaaagacaaaagatccatgctgacgcatcaagtaaggtgctggctaagataccaaggcgggaagaaggggaagaggccgaggagtggctgagctctctcagagcgcacgtggtgagaaccggtatcggccgagctagggcagagctctttgagaagcaaatcgtccagcacggcggacagctctgccccgcacaaggccctggcgtgacccacatagtggtagacgaagggatggactacgagcgcgctttgcggctcctccgtctgcctcaattgccaccaggcgcacaactggtcaaaagcgcttggttgtcgttgtgcctccaggagcggaggctggtagacgtggctggctttagcattttcatccctagccgctatctggaccatcctcagccatccaaggctgagcaggatgcctccatccctccgggtactcatgaggcactattgcagaccgccctgtctcctccccctcctcctacccgaccagtctccccaccgcagaaagctaaggaagccccaaatacccaggcccagccgatctctgatgacgaggccagcgacggagaggaaacccaagaggcctgtagcattcctggcatcggaaagcggatggctgagaaaattatagaaattctagaatcgggtcatttacgcaagctggatcacatctcagagtcagtgcctgtgttagaactgttcagcaatatatggggggcagggactaagacggcccaaatgtggtatcagcaggggttccgcagcctggaagacataagatctcaagccagcctcaccacccagcaggctattggcctgaagcattattctgatttcctggaacggatgccacgcgaagaagcaacagaaattgaacagacagtccaaaaggctgcacaggcatttaattctggcctgctgtgcgtggcttgcggttcatacaggagaggcaaggccacatgcggtgacgttgacgtcctgatcacgcatccggatggacgtagtcatcgtggaattttctcacgattactagacagcctgcggcaggaagcagttccgtcggtgggccctgggttccttacagacgacctggtgtctcaggaggagaatggacaacaacagaaatacctcggcgtctgccgccttcccggaccgggacgtcgacatcgtagattggacattatcgtagtgccctattcagagtttgcttgcgcccttctgtattttactggtagcgcgcacttcaaccgtagtatgagggcacttgctaagactaagggaatgtcgctgagtgagcacgctctctccaccgccgtcgtgagaaatacccacgggtgcaaggttggcccaggcagggttttacctaccccgacctag

SEQ ID NO: 335478 - DNA, 1457 bp, Artificial Sequence
  derived and/or modified sequence
cagccctgaccaacgctccaataggccgggatccagccatacttcaatggatcccaggggtatcttgaaggcatttcccaagcggcagaaaattcatgctgatgcatcatcaaaagtacttgcaaagattcctaggagggaagagggagaagaagcagaagagtggctgagctcccttcgggcccatgttgtgcgcactggcattggacgagcccgggcagaactctttgagaagcagattgttcagcatggcggccagctatgccctgcccagggcccaggtgtcactcacattgtggtggatgaaggcatggactatgagcgagccctccgccttctcagactaccccagctgcccccgggtgctcagctggtgaagtcagcctggctgagcttgtgccttcaggagaggaggctggtggatgtagctggattcagcatcttcatccccagtaggtacttggaccatccacagcccagcaaggcagagcaggatgcttctattcctcctggcacccatgaggccctgcttcagacagccctttctcctcctcctcctcccaccaggcctgtgtctcctccccaaaaggcaaaagaggcaccaaacacccaagcccagcccatctctgatgatgaagccagtgatggggaagaaacccaggaggcctgcagtatccctgggattgggaagcggatggctgagaaaatcatagagatcctggagagcgggcatttgcggaagctggaccatatcagtgagagcgtgcctgtcttggagctcttctccaacatctggggagctgggaccaagactgcccagatgtggtaccaacagggcttccgaagtctggaagacatccgcagccaggcctccctgacaacccagcaggccatcggcctgaagcattacagtgacttcctggaacgtatgcccagggaggaggctacagagattgagcagacagtccagaaagcagcccaggcctttaactctgggctgctgtgtgtggcatgtggttcataccgacggggaaaggcgacctgtggtgatgtcgacgtgctcatcactcacccagatggccggtcccaccggggtatcttcagccgcctccttgacagtcttcggcaggaagcagtcccctctgttgggccagggttcctcacagatgacttggtgagccaagaggagaatggtcagcaacagaagtacttgggggtgtgccggctcccagggccagggcggcggcaccggcgcctggacatcatcgtggtgccctatagcgagtttgcctgtgccctgctctacttcaccggctctgcacacttcaaccgctccatgcgagccctggccaaaaccaagggcatgagtctgtcagaacatgccctcagcactgctgtggtccggaacacccatggctgcaaggtggggcctggccgagtgctgcccactcccactg

SEQ ID NO: 335479 - DNA, 567 bp, Artificial Sequence
  derived and/or modified sequence
atggaccccagaggcatcctgaaggccttccccaagagacagaagatccacgccgacgccagcagcaaggtgctggccaagatccccagaagagaggagggcgaggaggccgaggagtggctgagcagcctgagagcccacgtggtgagaaccggcatcggcagagccagagccgagctgttcgagaagcagatcgtgcagcacggcggccagctgtgccccgcccagggccccggcgtgacccacatcgtggtggacgagggcatggactacgagagagccctgagactgctgagactgccccagctgccccccggcgcccagctggtgaagagcgcctggctgagcctgtgcctgcaggagagaagactggtggacgtggccggcttcagcatcttcatccccagcagatacctggaccacccccagcccagcaaggccgagcaggacgccagcatcccccccggcacccacgaggccctgctgcagaccgccctgagccccccccccccccccaccagacccgtgagccccccccagaaggccaaggaggcccccaacacctag

SEQ ID NO: 335480 - DNA, 567 bp, Artificial Sequence
  derived and/or modified sequence
atggacccacgagggattctgaaggcgtttccaaagcgacagaaaattcacgccgatgctagctcaaaagtcctggccaagatccccaggagggaggagggggaggaagctgaggagtggctgtcttctctgagagctcacgtggttaggacaggcatcggacgcgcgcgggcggagctcttcgagaagcagatcgtgcaacacgggggccaactttgtcccgctcaaggacctggggtgacgcacatcgtagtggatgaaggcatggactatgagagggccctgcgcctgcttcgactgccccagctcccgccaggagcccagctggtgaaatcagcttggctgagcctttgtctgcaggagcgccgactggtggatgtggcagggttctccatttttatacctagccgctatctcgatcacccgcagccctcgaaggcagaacaggacgcttccattcctcctggcacgcatgaggccttgctccaaacagccctctctcctccgccgcctcccacaaggccagtttcccccccccagaaagcaaaggaagcacccaatacatag

SEQ ID NO: 335481 - DNA, 567 bp, Artificial Sequence
  derived and/or modified sequence
atggacccccggggcatcctgaaggccttccccaagaggcagaagatccacgcagatgccagcagcaaggtgctggccaagatcccccggcgggaggagggggaggaggccgaggagtggctgagcagcctgcgggcccacgtggtgaggactggaattggccgggcccgggcagagctgtttgagaagcagatcgtgcagcacggcggccagctgtgcccagcccagggccctggggtgacccacatcgtggtggatgagggcatggactatgagcgggccctgcggctgctgcggctgccccagctgcccccaggggcccagctggtgaagagcgcctggctgagcctgtgcctgcaggagcggcggctggtggatgtggccggcttcagcatcttcatccccagccgctacctggaccacccccagcccagcaaggccgagcaggatgccagcatccccccaggcacccatgaggccctgctgcagacagccctgagccccccacctccacccaccaggcctgtgagccccccccagaaggccaaggaggcccccaacacctag

SEQ ID NO: 335482 - DNA, 567 bp, Artificial Sequence
  derived and/or modified sequence
atggacccccggggcatcctgaaggccttccccaagcggcagaagatccatgcagatgctagctccaaagtcttggcaaagattccgaggcgagaagaaggggaggaggccgaggaatggctgtcgtcactgcgagcccatgtagtgaggaccggaatcggaagagcaagagctgagttattcgagaaacagatcgttcagcatgggggccaattatgccctgctcagggccccggagtaactcacatcgtggtggacgagggtatggattacgaacgtgccttaagattgctgcgcctgccacagctacctcctggtgcacaactggttaaatccgcctggctgagcctctgtctgcaagagagaaggctggtggatgtggccggattctctatctttatccctagtaggtacctggatcatccccagccttcgaaggctgagcaggacgcctcaataccaccgggtactcacgaggccctgttgcagactgcgctctccccgcccccccctcccacccgaccagtgtctcccccgcagaaggctaaggaggctccaaatacctag

SEQ ID NO: 335483 - DNA, 567 bp, Artificial Sequence
  derived and/or modified sequence
atggatccaagaggtatacttaaagcatttccaaagcgacagaagatccacgccgatgcttcttccaaggtactcgcaaagatccccagacgtgaggagggcgaagaggccgaggagtggctgtcctcactacgtgcccatgtcgtgcgcactggaattggcagggcacgagctgagcttttcgagaaacaaattgtacagcacgggggacagctctgcccagcccagggtcccggagtgacacacattgttgtagatgagggtatggattacgagcgcgctcttagactgctcaggcttccacaactgcctccgggagcacagctggtcaaaagtgcgtggctgtcactgtgtctgcaagaaagacgcctggtggacgtggcaggcttctccatttttattcccagtaggtatctcgatcaccctcagccgtcaaaagccgaacaggacgcaagtataccgccaggcacacacgaagccctattacagaccgcgctgagtcctccacctccgcctacacggccagtttcacccccacagaaggccaaggaagctcctaacacgtag

SEQ ID NO: 335484 - DNA, 1022 bp, Artificial Sequence
  derived and/or modified sequence
cccttcgtccgctctcattggctctgctggtaagtggtctattcctgcccacccccgggtgactagcttggccagtagtcgaccccacccggggaccgactctgggggttggagagactcttggggccggggtcgggcactccagctttcttctagccccgagctgggattccctggcctgcgccagctgcgtacacggcgagtacaccgcacctgcccgggacttcacccgcagctgcgagactcctccattcccggagggctccccacacctgctgcggccgtgccccatctccccgcagctgcggcgctgagcacccccatgtcgagaggctgagaccaggacaggtgcagggcgttcccactcacccccgaaagtcctcctccttcctctgcgagtctgtgttggagcagccctgaccaacgctccaataggccgggatccagccatacttcaatggatcccaggggtatcttgaaggcatttcccaagcggcagaaaattcatgctgatgcatcatcaaaagtacttgcaaagattcctaggagggaagagggagaagaagcagaagagtggctgagctcccttcgggcccatgttgtgcgcactggcattggacgagcccgggcagaactctttgagaagcagattgttcagcatggcggccagctatgccctgcccagggcccaggtgtcactcacattgtggtggatgaaggcatggactatgagcgagccctccgccttctcagactaccccagctgcccccgggtgctcagctggtgaagtcagcctggctgagcttgtgccttcaggagaggaggctggtggatgtagctggattcagcatcttcatccccagtaggtacttggaccatccacagcccagcaaggcagagcaggatgcttctattcctcctggcacccatgaggccctgcttcagacagccctttctcctcctcctcctcccaccaggcctgtgtctcctccccaaaaggcaaaagaggcaccaaacaccc

SEQ ID NO: 335485 - DNA, 1499 bp, Artificial Sequence
  derived and/or modified sequence
atctgcagcccgaatttattcttcgcagggaggtagagaggggacatctccttgcagaccgcccctccgcttggtggtcctgaggctcccgtgggcacaaggactggaacttctgaggttctccctctgagggggcccccagacctgtgctgccctctgtcaacctgctcacccagagatggagcttataccttcctgccgaagactgtcaaggaggcggctgaagataccccggtgggaccggccatctgggaatctttgcaagtacttttgatgatgcatcagcatgaattttctgccgcttgggaaatgccttcaagatacccctgggatccattgaagtatggctggatcccggcctattggagcgttggtcagggctgctgcacgtggaaatccagaattgaggccctccaacccctttgcctatggagactcgcagaggaaggaggaggactttcgggggtgagtgggaacgccctgcacctgtcctggtctcagcctctcgacatgggggtgctcagcgccgcagctgcggggagatggggcacggccgcagcaggtgtggggagccctccgggaatggaggagtctcgcagctgcgggtgaagtcccgggcaggtgcggtgtactcgccgtgtacgcagctggcgcaggccagggaatcccagctcggggctagaagaaagctggagtgcccgaccccggccccaagagtctctccaacccccagagtcggtccccgggtggggtcgactactggccaagctagtcacccgggggtgggcaggaatagaccacttaccagcagagccaatgagagcggacgaaggggggaaggagggcaaatggccagaatagcttccgagtcagccggaagtgaccctctggaacggttgccatggcagcggctgggcgtgctgcttagcaggggaaagatggcggtgacgggctggttggagagtctgcggacagcccagaagactgcgctgctgcaggacggtaactcgagggtccccacgggctccttcgtttttttccctcagggtccggccctccgggaagggcctcagggcctgggtcggcagagctggaagggtctcggcggtcagccgggccaggtcctgcatttgcagatgaggagactgaggttcacagagatgacatgactggaacacatgtctccggacaccccttagattcctctacaccatctcgctccgctctgatttctgttgctaatatagtaatttcttttacattcattatctcatttgctcctcaccactgtcctgagaggctaattttcaccccgttttacagaagaggaaactgaaatccaagaatgttttagactttagagaggagagaggcctgggctctagttccgactgtgccattaattcaccacgggcgcttcagtcggctcctttacttgtttgggcctcactttcctcatctataaaatgaagtggatggactaccattgttatctctga

SEQ ID NO: 335486 - protein, 171 aa, Artificial Sequence
  derived and/or modified sequence
MDYERALRLLRLPQLPPGAQLVKSAWLSLCLQERRLVDVAGFSIFIPSSPSLMMKPVMGKKPRLVQLIWKPSSVATTPPPLREIVSLAQPLLSWISGSVHSPQARRRPITTSISQRSWKFWPKPTVFRETSGGPWAMPRPSMPSRASISLSPRTRRPAVSLGLGSGWLRKS

SEQ ID NO: 335487 - protein, 152 aa, Artificial Sequence
  derived and/or modified sequence
MDYERALRLLRLPQLPPGAQLVKSAWLSLCLQERRLVDVAGFSIFIPSSPSLMMKPVMGKKPRLVQLIWKPSSVATTPPPLREIVSLAQPLLSWISGSVHSPQARRRPITTSISQRSWKFWPKPTVFRETSGGPWAMPRPSMPSRASISLSP

SEQ ID NO: 335488 - DNA, 516 bp, Artificial Sequence
  derived and/or modified sequence
atggattacgagagagcactgagactgttgcgacttccacagcttccgcccggcgctcaattggtgaagtctgcctggctttcactctgtctgcaagaaaggagactggtggacgttgccggattctcaatattcatcccttccagcccaagcctgatgatgaaacctgtgatgggtaagaaaccccgtctagtccagctgatctggaagccttcttctgtggccaccacccctcccccgctgagagaaatagtctccctggcgcagccactgctttcttggatctccggaagcgtgcattctccacaggcacggagaagacccatcacaacttctatctctcagagatcctggaaattttggcctaagcctaccgtgttccgcgagacgtcggggggcccatgggcaatgccacgtcccagtatgccctctcgtgcctctatcagtctctccccgcggactagacggcccgcagtgtccctgggcctgggctccggatggctgaggaagtcctag

SEQ ID NO: 335489 - DNA, 516 bp, Artificial Sequence
  derived and/or modified sequence
atggactacgagcgggccctgcggctgctgcggctgccccagctgccccctggggctcagttagtgaagtctgcctggctcagcctgtgtcttcaggaaaggagactggtcgacgtagccggattttctatatttattccctccagtccctccctcatgatgaaacctgtgatgggaaagaagcctaggctcgtgcagttgatttggaagcctagcagcgttgcaactactccacctccccttcgggagattgtgagcctcgcccaacccctgctctcctggatcagcggctcagtgcattccccacaggctaggcgtaggccaatcaccacctcgatatcacagaggtcttggaaattctggcccaagccaaccgtctttagggaaactagtgggggcccctgggccatgcctaggccatcaatgcccagcagagcttctatttctctgagccccaggaccaggagaccagctgtatctctcggtctgggaagcggatggctgagaaagtcgtag

SEQ ID NO: 335490 - DNA, 516 bp, Artificial Sequence
  derived and/or modified sequence
atggattacgagcgcgctctccggctgctgcgcctaccacagctcccccctggcgctcaattggtgaaaagtgcctggttgagcctgtgtctccaggagcgaaggctcgtggatgtcgccggtttctcaattttcatcccatcaagcccttcccttatgatgaaacccgtcatgggcaaaaaacccagattagttcagctgatctggaaaccttcgagcgtcgctaccacccccccaccactcagagagatcgtctccctcgcccaaccactcctaagctggattagcgggtcagtccatagcccacaggctagacgccgacctatcacaacgtccattagtcagcggtcatggaagttttggccgaaaccaacagtattccgggaaacaagcggcggaccatgggcgatgcctcgcccaagtatgccaagccgcgcttctatcagcctcagtccaaggacacgcagacctgctgtgagtttgggcctgggatctgggtggctcagaaaatcttag

SEQ ID NO: 335491 - DNA, 516 bp, Artificial Sequence
  derived and/or modified sequence
atggactacgagagagccctgagactgctgagactgccccagctgccccccggcgcccagctggtgaagagcgcctggctgagcctgtgcctgcaggagagaagactggtggacgtggccggcttcagcatcttcatccccagcagccccagcctgatgatgaagcccgtgatgggcaagaagcccagactggtgcagctgatctggaagcccagcagcgtggccaccacccccccccccctgagagagatcgtgagcctggcccagcccctgctgagctggatcagcggcagcgtgcacagcccccaggccagaagaagacccatcaccaccagcatcagccagagaagctggaagttctggcccaagcccaccgtgttcagagagaccagcggcggcccctgggccatgcccagacccagcatgcccagcagagccagcatcagcctgagccccagaaccagaagacccgccgtgagcctgggcctgggcagcggctggctgagaaagagctag

SEQ ID NO: 335492 - DNA, 459 bp, Artificial Sequence
  derived and/or modified sequence
atggactacgagagagccctgagactgctgagactgccccagctgccccccggcgcccagctggtgaagagcgcctggctgagcctgtgcctgcaggagagaagactggtggacgtggccggcttcagcatcttcatccccagcagccccagcctgatgatgaagcccgtgatgggcaagaagcccagactggtgcagctgatctggaagcccagcagcgtggccaccacccccccccccctgagagagatcgtgagcctggcccagcccctgctgagctggatcagcggcagcgtgcacagcccccaggccagaagaagacccatcaccaccagcatcagccagagaagctggaagttctggcccaagcccaccgtgttcagagagaccagcggcggcccctgggccatgcccagacccagcatgcccagcagagccagcatcagcctgagcccctag

SEQ ID NO: 335493 - DNA, 516 bp, Artificial Sequence
  derived and/or modified sequence
atggactacgagagggctctgaggctgctgcggttaccccagctaccgcctggcgctcagctggtgaaatctgcctggctgagcttgtgccttcaggagcgacgtctggtagacgttgcggggttcagcatctttatcccgtcttctccaagtctgatgatgaaaccagtgatggggaagaaaccccgtttagtgcagctaatctggaaaccatcctcagtagccaccacacccccccccctgagggagatcgtgagtctggcccagccacttctgagttggatatctgggtccgtgcacagcccccaggcgcgtaggcggcctattacaacaagcatttcacagcgttcatggaagttttggcctaagccaactgtatttcgtgagacatccggtggcccttgggcaatgccccggccatcaatgcctagtcgcgcctctattagcctttcaccgaggacgaggcgtccagccgtctctttgggactgggctctggatggttgagaaaatcttag

SEQ ID NO: 335494 - DNA, 459 bp, Artificial Sequence
  derived and/or modified sequence
atggattatgaaagggccctcagactgttgcgcctgccacagctcccccctggagctcagttagtgaagagtgcctggctgtccctttgtctgcaggaaagacgcctcgtggatgtggcaggatttagcatcttcatcccttcatcccccagcctcatgatgaagcctgtgatgggcaaaaaaccgcgtttggtgcagctcatttggaagccttcatctgtggctaccacacctccgcctttacgtgagatcgtctcactggcccagccactgctttcctggatctcaggtagtgtgcactccccccaggctagacggcgaccgatcactacatctatctcgcagcgaagctggaagttctggcctaaacccacagtgtttcgagaaacctccgggggaccctgggcaatgccacggccctcaatgccatctcgggcctcaatctcgctcagcccctag

SEQ ID NO: 335495 - DNA, 516 bp, Artificial Sequence
  derived and/or modified sequence
atggactatgagcgggccctgcggctgctgcggctgccccagctgcccccaggggcccagctggtgaagagcgcctggctgagcctgtgcctgcaggagcggcggctggtggatgtggccggcttcagcatcttcatccccagcagccccagcctgatgatgaagcctgtgatgggcaagaagccccggctggtgcagctgatctggaagcccagctctgtggccaccaccccaccacccctgcgggagatcgtgtccctggcccagcccctgctgtcctggatcagcggctctgtgcacagcccccaggcccggcggcggcccatcaccaccagcatcagccagaggtcctggaagttctggcccaagcccaccgtcttccgggagaccagcggcggcccctgggccatgccccggcccagcatgcccagccgggccagcatcagcctgagccccaggaccaggaggcctgctgtgtccctgggcctgggcagcggctggctgaggaagagctag

SEQ ID NO: 335496 - DNA, 459 bp, Artificial Sequence
  derived and/or modified sequence
atggactatgagcgggccctgcggctgctgcggctgccccagctgcccccaggggcccagctggtgaagagcgcctggctgagcctgtgcctgcaggagcggcggctggtggatgtggccggcttcagcatcttcatccccagcagccccagcctgatgatgaagcctgtgatgggcaagaagccccggctggtgcagctgatctggaagcccagctctgtggccaccaccccaccacccctgcgggagatcgtgtccctggcccagcccctgctgtcctggatcagcggctctgtgcacagcccccaggcccggcggcggcccatcaccaccagcatcagccagaggtcctggaagttctggcccaagcccaccgtcttccgggagaccagcggcggcccctgggccatgccccggcccagcatgcccagccgggccagcatcagcctgagcccctag

SEQ ID NO: 335497 - DNA, 516 bp, Artificial Sequence
  derived and/or modified sequence
atggactacgagcgggccctgcggctgctgcggctgccccagctgccccctggagcacagttagtgaaatccgcctggctatctctgtgcctgcaggaaaggagactggtggatgtggctgggttcagcattttcataccgagttcccccagtcttatgatgaagccagtcatgggcaaaaagcctcgactggtccaactgatttggaagccatcctcagtggccacaactcccccgcctctgcgagagatcgtctctcttgctcagcccttgcttagctggatcagcgggtctgtgcactccccccaggctaggaggcgcccaataactacaagtatttcgcagagatcttggaaattctggcccaaaccaacagtgttccgcgagacctctggcggcccttgggcaatgcccaggccctccatgccctccagggctagtatctccttgagccctaggactaggcgccctgcagttagtctgggcttaggtagtggctggctccgcaaatcctag

SEQ ID NO: 335498 - DNA, 459 bp, Artificial Sequence
  derived and/or modified sequence
atggactacgagcgggccctgcggctgctgcggctgccccagctgccccctggcgcacaattagttaaatcagcatggcttagtctgtgcttgcaggagagacgcctcgtagatgtggcgggattcagcattttcatcccctcttcacccagtctgatgatgaaacctgtgatgggaaagaagccccgtctggtacaacttatttggaagccttcctcagtcgcaacaactcctcctcccctgcgcgaaatcgtctctctggcccagcctcttttaagctggattagcggcagcgtgcacagccctcaggctagaaggagacctatcactacttcgatctctcagagatcatggaagttctggccaaaaccgaccgtcttcagggagacttctggcggtccctgggctatgcccagaccttcaatgcccagcagggccagtataagcctctctccctag

SEQ ID NO: 335499 - DNA, 516 bp, Artificial Sequence
  derived and/or modified sequence
atggattatgagcgcgcactgcggctccttcgcctgcctcagctgccacctggcgctcaactcgtcaaatccgcatggctgagtctgtgtctgcaggaaagaagactggtggatgtcgcaggcttttcaattttcattccttcctccccaagcttaatgatgaagcctgtaatgggtaagaaaccccgtctggttcagcttatatggaaaccgagctccgtggcaaccactcctcccccactaagagaaattgttagccttgcccagccattgctctcttggatcagtggcagcgtccacagtcctcaggcccgaaggcgacccatcactacctccattagtcaaagatcttggaaattctggcctaagcctacggtatttcgcgagacgagcggtggaccctgggctatgcccaggcctagtatgcctagccgggcttcaatatcattgagcccgaggacccggaggccagcagttagtcttgggttagggtctggctggctgcgtaagagctag

SEQ ID NO: 335500 - DNA, 459 bp, Artificial Sequence
  derived and/or modified sequence
atggactacgagcgcgctttgcgtttgcttagattacctcagctcccacctggtgctcagttggtgaaatctgcctggttatctctgtgtctgcaggaacgccgtctggtggatgtggccggattcagcattttcatcccatcctcccctagcttaatgatgaaacctgtcatgggcaagaagccaaggctcgtgcagctgatctggaagccttctagcgtggcgaccactccaccccctctgcgcgaaatagtgagtctggcccagcccctgctctcgtggatcagtggctcggtccattctccccaggccagaagacgccctatcacaacctccatttcccaaaggtcctggaagttctggcctaaaccgaccgtattccgggaaacctccggcggtccttgggccatgccccgaccgtctatgcccagcagagcgtcaataagtctgtccccctag

SEQ ID NO: 335501 - DNA, 2505 bp, Artificial Sequence
  derived and/or modified sequence
ctgctggtaagtggtctattcctgcccacccccgggtgactagcttggccagtagtcgaccccacccggggaccgactctgggggttggagagactcttggggccggggtcgggcactccagctttcttctagccccgagctgggattccctggcctgcgccagctgcgtacacggcgagtacaccgcacctgcccgggacttcacccgcagctgcgagactcctccattcccggagggctccccacacctgctgcggccgtgccccatctccccgcagctgcggcgctgagcacccccatgtcgagaggctgagaccaggacagcagccctgaccaacgctccaataggccgggatccagccatacttcaatggatcccaggggtatcttgaaggcatttcccaagcggcagaaaattcatgctgatgcatcatcaaaagtacttgcaaagattcctaggagggaagagggagaagaagcagaagagtggctgagctcccttcgggcccatgttgtgcgcactggcattggacgagcccgggcagaactctttgagaagcagattgttcagcatggcggccagctatgccctgcccagggcccaggtgtcactcacattgtggtggatgaaggcatggactatgagcgagccctccgccttctcagactaccccagctgcccccgggtgctcagctggtgaagtcagcctggctgagcttgtgccttcaggagaggaggctggtggatgtagctggattcagcatcttcatccccagtagcccatctctgatgatgaagccagtgatggggaagaaacccaggttagtgcagctgatctggaagccctcatcagtggccactaccccacctcccttgagggagattgtgagcctagcccagcccctgctgtcctggataagtgggtctgtgcacagccctcaagccagaaggcgaccaatcacaacctccatatcacagagaagctggaagttctggccaaagcctacagtgttcagggagacaagtggagggccctgggctatgccaaggccatcaatgccctcaagagcttccataagcctgtcacctcgtaccaggaggcctgcagtatccctgggattgggaagcggatggctgagaaaatcatagagatcctggagagcgggcatttgcggaagctggaccatatcagtgagagcgtgcctgtcttggagctcttctccaacatctggggagctgggaccaagactgcccagatgtggtaccaacagggcttccgaagtctggaagacatccgcagccaggcctccctgacaacccagcaggccatcggcctgaagcattacagtgacttcctggaacgtatgcccagggaggaggctacagagattgagcagacagtccagaaagcagcccaggcctttaactctgggctgctgtgtgtggcatgtggttcataccgacggggaaaggcgacctgtggtgatgtcgacgtgctcatcactcacccagatggccggtcccaccggggtatcttcagccgcctccttgacagtcttcggcaggaagggttcctcacagatgacttggtgagccaagaggagaatggtcagcaacagaagtacttgggggtgtgccggctcccagggccagggcggcggcaccggcgcctggacatcatcgtggtgccctatagcgagtttgcctgtgccctgctctacttcaccggctctgcacacttcaaccgctccatgcgagccctggccaaaaccaagggcatgagtctgtcagaacatgccctcagcactgctgtggtccggaacacccatggctgcaaggtggggcctggccgagtgctgcccactcccactgagaaggatgtcttcaggctcttaggcctcccctaccgagaacctgctgagcgggactggtgacccatggctgggggtgctgaggagagccgagttggactggctacccctcctggccacccagtactccctccagcctcagctggctgaacctcgccgctccaaccaccagcttcctcagcgagcagggcccagggctctgggcctgaagcaagagccagcccggctcccagtgtctgcccggctcccagtgtctgcccagccctctcccagacaggagcaggctgccaccccttctacctcaccactgcccctcgaagaattttgcaaatggccccttgccccattttaagcaggagcaggtggctggtttgaagccccaggtatcccccttccctgctatgggaaaggccaagctgctgggtggggacagaagctgcaggggagagggaagcagccgtgctgtcaacatcatccggcaccctctggggtaggagaacagccattccacatgtgttccctctatccgtcctgcttcctgggcagctggtggtgctgggaatggggtgccccagccttggtgaggacagtgttgggaggcccaggggcccagtaaagtgcatttgacattg

SEQ ID NO: 335502 - DNA, 1257 bp, Artificial Sequence
  derived and/or modified sequence
tctggccatttgccctccttccccccttcgtccgctctcattggctctgctgagtggctgagctcccttcgggcccatgttgtgcgcactggcattggacgagcccgggcagaactctttgagaagcagattgttcagcatggcggccagctatgccctgcccagggcccaggtgtcactcacattgtggtggatgaaggcatggactatgagcgagccctccgccttctcagactaccccagctgcccccgggtgctcagctggtgaagtcagcctggctgagcttgtgccttcaggagaggaggctggtggatgtagctggattcagcatcttcatccccagtagcccatctctgatgatgaagccagtgatggggaagaaacccaggttagtgcagctgatctggaagccctcatcagtggccactaccccacctcccttgagggagattgtgagcctagcccagcccctgctgtcctggataagtgggtctgtgcacagccctcaagccagaaggcgaccaatcacaacctccatatcacagagaagctggaagttctggccaaagcctacagtgttcagggagacaagtggagggccctgggctatgccaaggccatcaatgccctcaagagcttccataagcctgtcacctcgtaccaggaggcctgcagtatccctgggattgggaagcggatggctgagaaaatcatagagatcctggagagcgggcatttgcggaagctggaccatatcagtgagagcgtgcctgtcttggagctcttctccaacatctggggagctgggaccaagactgcccagatgtggtaccaacaggtcacaccctggctcagcccctacttcagttttgctgtgtctcagagttcctgccccagatgtgtgctgtgctctgccccagatccctatgctgtgctctgatgggaatgcacccacagtatagggagaccatttttcaagcggaccaggactcatatagacccctcagctcccagaacagccttgttgcttggtatccttaagaaggagtagacagggacaagaagtatgtttctcagtctccccagaccagcaagggccttcctgaggaggccaggccttgacactgcgtgtctagagcagtggttcccaatcctggctctgcccacaatcaccagggcagcttggtaaggatgaagatgacaaggtccatcctcagactgatggaatcatgaacgagcatcttaggatagtggca

SEQ ID NO: 335503 - DNA, 683 bp, Artificial Sequence
  derived and/or modified sequence
ccttcatgtgcttcagccctacgttgtttatgtccagaatcagatattggagctgactctgcctgtccagggcctgcagagtggctgagctcccttcgggcccatgttgtgcgcactggcattggacgagcccgggcagaactctttgagaagcagattgttcagcatggcggccagctatgccctgcccagggcccaggtgtcactcacattgtggtggatgaaggcatggactatgagcgagccctccgccttctcagactaccccagctgcccccgggtgctcagctggtgaagtcagcctggctgagcttgtgccttcaggagaggaggctggtggatgtagctggattcagcatcttcatccccagtagcccatctctgatgatgaagccagtgatggggaagaaacccaggttagtgcagctgatctggaagccctcatcagtggccactaccccacctcccttgagggagattgtgagcctagcccagcccctgctgtcctggataagtgggtctgtgcacagccctcaagccagaaggcgaccaatcacaacctccatatcacagagaagctggaagttctggccaaagcctacagtgttcagggagacaagtggagggccctgggctatgccaaggccatcaatgccctcaagagcttccataagcctgtcacc

SEQ ID NO: 335504 - DNA, 747 bp, Artificial Sequence
  derived and/or modified sequence
atggaggccctgtgcgtgtgcagcctgatgcccctgcactggagctggatcctgaccgccagccacctggccgccttcttccagggcttcagaagcctggaggacatcagaagccaggccagcctgaccacccagcaggccatcggcctgaagcactacagcgacttcctggagagaatgcccagagaggaggccaccgagatcgagcagaccgtgcagaaggccgcccaggccttcaacagcggcctgctgtgcgtggcctgcggcagctacagaagaggcaaggccacctgcggcgacgtggacgtgctgatcacccaccccgacggcagaagccacagaggcatcttcagcagactgctggacagcctgagacaggagggcttcctgaccgacgacctggtgagccaggaggagaacggccagcagcagaagtacctgggcgtgtgcagactgcccggccccggcagaagacacagaagactggacatcatcgtggtgccctacagcgagttcgcctgcgccctgctgtacttcaccggcagcgcccacttcaacagaagcatgagagccctggccaagaccaagggcatgagcctgagcgagcacgccctgagcaccgccgtggtgagaaacacccacggctgcaaggtgggccccggcagagtgctgcccacccccaccgagaaggacgtgttcagactgctgggcctgccctacagagagcccgccgagagagactggtag

SEQ ID NO: 335505 - DNA, 747 bp, Artificial Sequence
  derived and/or modified sequence
atggaagcactctgtgtttgctctctaatgcccctacactggtcctggatactcaccgcatcccatctcgccgccttctttcagggttttcgttcacttgaagatatcagatctcaggcctccctgaccacacagcaggccattgggcttaaacattattccgatttcctcgagaggatgcccagggaggaagccacggaaatcgagcaaaccgttcagaaggccgcccaggcctttaactccgggctgttgtgtgtcgcttgcgggtcctatcgcaggggcaaggccacctgcggagatgttgacgtgctgatcacacacccagacggccggtcacacagggggattttcagcaggctgctggattcgctgcgccaggagggcttcctgacagacgacctggtgtctcaggaagagaacggacagcagcaaaagtacttgggtgtgtgtcgcctccccgggccaggaagacgccaccggcggctagatataatcgtcgttccctactcggagtttgcctgtgctctgctgtactttaccgggtctgcccactttaaccgctcgatgcgcgccctagccaaaactaagggtatgagcctctccgagcacgcgcttagcacggctgtcgtccgaaatacccatggatgcaaggtggggcccgggcgagtactgcccacccctaccgaaaaagacgtcttcaggctactgggactaccctatcgcgagcctgccgaaagagactggtag

SEQ ID NO: 335506 - DNA, 747 bp, Artificial Sequence
  derived and/or modified sequence
atggaggccctgtgtgtgtgcagcctgatgcccctgcactggagctggatcctgacagccagccacctggccgccttcttccagggcttccgcagcctggaggacatccgcagccaggccagcctgaccacccagcaggccatcggcctgaagcactacagcgacttcctggagaggatgccccgggaggaggccacagaaattgagcagacagtgcagaaggccgcccaggccttcaacagcggcctgctgtgtgtggcctgtggcagctaccgccggggcaaggccacctgtggagatgtggatgtgctgatcacccacccagatggccgcagccaccggggcatcttcagccggctgctggacagcctgcggcaggagggcttcctgacagatgacctggtgtcccaggaggagaatggccagcagcagaagtacctgggcgtgtgccgcctgcccggccctggaagaagacaccggcggctggacatcatcgtggtgccctacagcgagtttgcctgtgccctgctgtacttcaccggcagcgcccacttcaacagatccatgagggccctggccaagaccaagggcatgagcctgtctgaacatgccctgagcacagctgtggtgaggaacacccacggctgcaaggtgggccctggccgggtgctgcccacccccacagagaaggatgtgttccggctgctgggcctgccctaccgggagcctgctgagcgggactggtag

SEQ ID NO: 335507 - DNA, 747 bp, Artificial Sequence
  derived and/or modified sequence
atggaggccctgtgcgtgtgcagcctgatgcccctgcactggagctggattctgacggcgtcccacctcgctgcgttttttcagggttttagatcactggaagatatcaggagtcaagcttcactaactacccagcaggccatcggcctgaagcattacagcgatttcctggagcgtatgcctcgagaggaagccaccgaaatcgagcaaaccgttcagaaggctgcccaggctttcaacagtggattactctgcgtggcatgtggctcatatagacgtggtaaggctacgtgtggggacgttgatgtgctgataacccaccccgatggtcgctcccaccggggaatcttttcccggctgcttgacagcctccggcaggaggggttcctgacagatgatttagtgtcacaggaagaaaacgggcagcagcaaaagtacctcggagtgtgtaggctcccaggccctggacgacggcatagacgattagatatcatcgtggtcccctactctgagttcgcctgtgccctcttgtacttcacgggtagcgcccatttcaataggtctatgagggccctggccaagaccaagggcatgtcactttctgagcatgctttgtccactgcagtcgtgcggaatacccatggctgtaaggtcggccccggccgtgtcttacctacgccaactgagaaggacgtctttaggctgcttggactgccctatagagaacccgctgagcgcgactggtag

SEQ ID NO: 335508 - DNA, 747 bp, Artificial Sequence
  derived and/or modified sequence
atggaggctttgtgtgtgtgctctctgatgcccctccactggtcttggatactgaccgccagccacctggctgcgttctttcaaggcttccgatccctggaagatatccgatcacaagcctctctgaccactcagcaagctattgggctcaagcactactctgactttctggaaagaatgcccagggaagaggcaactgagattgaacagactgtgcagaaggccgctcaggctttcaattcggggctgctgtgcgtcgcttgtggaagctaccggcgaggtaaagcgacctgtggcgacgtcgacgtgcttataacacaccctgatggccgttcacaccggggaattttcagccgactcctggactccctccgccaggaggggtttttgacggacgatctcgtttcccaggaggaaaacggacagcagcaaaagtatctgggagtatgccgtctgcctggacccggtcgcagacacaggcggctggatatcatagtagtgccatattctgaatttgcctgtgctctgctttattttacaggtagcgcccactttaaccgaagcatgcgggcattggctaaaactaaaggtatgtccctttcagaacatgcgctcagcacagccgtcgtgagaaatacgcatggatgtaaggtgggccctggcagagtcttgcccacacctaccgagaaggatgtttttcgcctcctcggcctgccatatcgtgaaccagctgaacgcgactggtag

SEQ ID NO: 335509 - DNA, 1536 bp, Artificial Sequence
  derived and/or modified sequence
cctggctctgcccacaatcaccagggcagcttggtaaggatgaagatgacaaggtccatcctcagactgatggaatcatgaacgagcatcttaggatagtggcagggctggatgatggcatgtttcccatgctccctgcctttcccaagtcctgctgagtacagacccaactgcccctaggttggtcctgcctctagccttccctagagtctggggcgatggaagccttgtgtgtgtgctcactcatgcctcttcattggtcctggatccttacagcttcccatctggctgcttttttccagggcttccgaagtctggaagacatccgcagccaggcctccctgacaacccagcaggccatcggcctgaagcattacagtgacttcctggaacgtatgcccagggaggaggctacagagattgagcagacagtccagaaagcagcccaggcctttaactctgggctgctgtgtgtggcatgtggttcataccgacggggaaaggcgacctgtggtgatgtcgacgtgctcatcactcacccagatggccggtcccaccggggtatcttcagccgcctccttgacagtcttcggcaggaagggttcctcacagatgacttggtgagccaagaggagaatggtcagcaacagaagtacttgggggtgtgccggctcccagggccagggcggcggcaccggcgcctggacatcatcgtggtgccctatagcgagtttgcctgtgccctgctctacttcaccggctctgcacacttcaaccgctccatgcgagccctggccaaaaccaagggcatgagtctgtcagaacatgccctcagcactgctgtggtccggaacacccatggctgcaaggtggggcctggccgagtgctgcccactcccactgagaaggatgtcttcaggctcttaggcctcccctaccgagaacctgctgagcgggactggtgacccatggctgggggtgctgaggagagccgagttggactggctacccctcctggccacccagtactccctccagcctcagctggctgaacctcgccgctccaaccaccagcttcctcagcgagcagggcccagggctctgggcctgaagcaagagccagcccggctcccagtgtctgcccggctcccagtgtctgcccagccctctcccagacaggagcaggctgccaccccttctacctcaccactgcccctcgaagaattttgcaaatggccccttgccccattttaagcaggagcaggtggctggtttgaagccccaggtatcccccttccctgctatgggaaaggccaagctgctgggtggggacagaagctgcaggggagagggaagcagccgtgctgtcaacatcatccggcaccctctggggtaggagaacagccattccacatgtgttccctctatccgtcctgcttcctgggcagctggtggtgctgggaatggggtgccccagccttggtgaggacagtgttgggaggcccaggggcccagtaaagtgcatttgacattgaa

SEQ ID NO: 335510 - DNA, 774 bp, Artificial Sequence
  derived and/or modified sequence
gaaaacttcatcgtggaaggcttcggcaacgtggggctgcacagtatgagatacttgcacaggttcggcgctaaatgcattgctgtcggcgagagtgatggctctatctggaacccagacggtattgacccgaaagagttggaagactttaagctacagcacgggtccattctgggttttcctaaggcaaaaccttatgaagggtctatcctggaagcagattgtgatattctgatcccagcagcctccgaaaagcagctgaccaagtcgaatgccccccgtgtcaaggcgaagattatcgcagaaggagccaatgggccaaccacacccgaagccgacaagattttcctggaaagaaacattatggttatccccgacctatatctgaatgcaggcggggtaaccgtgtcttacttcgagtggctgaagaacctgaaccacgtgagttatggaaggctcactttcaagtatgagcgagattctaactatcatctgctgatgagtgtccaggagtcgctcgagcgcaagttcgggaaacacggcggcacaattccaatcgtccctacagcagaattccaggacaggatatcgggcgctagtgagaaggatatcgtccactcagggctggcgtacactatggagcgttcggccaggcaaatcatgcgcacggcaatgaagtacaatcttgggctggaccttagaacagccgcttacgttaatgctatcgagaaggtcttcaaagtctataacgaagccggcgttacgtttacctag

SEQ ID NO: 335511 - DNA, 1176 bp, Artificial Sequence
  derived and/or modified sequence
atgacgtacaagtgtgccgttgttgatgtccccttcggcggagcaaaggcaggagtgaagatcaatccgaaaaactacacagacaacgagctggaaaagatcacccgccggttcacgatggagctggcaaaaaagggattcatcgggcccgggatcgatgtacccgcaccagacatgagtacaggggaacgcgaaatgtcctggatcgccgacacatacgcttctacaatcggacactatgatattaatgcgcacgcgtgtgttacagggaagcccatctctcagggcgggatccacggacgtatctctgcgacaggaaggggcgttttccacggtattgagaactttatcaatgaagcctcctatatgagcatacttgggatgactcccgggtttggcgacaagacctttgtcgtgcaagggttcggcaacgtcggactgcattctatgcggtatctgcaccggttcggggcgaaatgtattgctgttggcgagagtgacgggagcatctggaatcccgatggcatcgatcctaaagaactggaagatttcaaactgcagcatggatccatactcggcttccctaaggcgaagccttacgaaggttcaatcctggaggctgattgtgatatactcataccagctgcgtctgagaaacagctcacgaaatccaatgcgccgcgcgtgaaggctaaaatcatagcagagggagctaacggccctactactcccgaagcagataaaattttcttggagaggaacataatggtcattcccgacctgtatctgaatgctggcggcgttaccgtttcatatttcgagtggctgaagaacctgaatcacgtgagttatgggagactaacgtttaaatatgagcgcgactcaaactatcatctgctgatgagcgtacaggagagtttggaacgcaagtttggcaaacacggtggtactattcctatagtgccaacagcggaatttcaggatcgcatttctggggccagtgagaaagacattgtgcactctggcctggcatataccatggaacgatctgctcgccagatcatgcggactgctatgaagtacaacttggggctggatctaagaacagctgcatatgtgaatgcgatcgagaaagtattcaaggtctataatgaagcgggtgtgacgtttacttag

SEQ ID NO: 335512 - DNA, 2035 bp, Artificial Sequence
  derived and/or modified sequence
gagaattttattgttgaaggatttggtaatgtgggcctacactctatgagatatttacatcgttttggtgctaaatgtattgctgttggtgagtctgatgggagtatatggaatccagatggtattgacccaaaggaactggaagacttcaaattgcaacatgggtccattctgggcttccccaaggcaaagccctatgaaggaagcatcttggaggccgactgtgacatactgatcccagctgccagtgagaagcagttgaccaaatccaacgcacccagagtcaaagccaagatcattgctgaaggtgccaatgggccaacaactccagaagctgacaagatcttcctggagagaaacattatggttattccagatctctacttgaatgctggaggagtgacagtatcttactttgagtggctgaagaatctaaatcatgtcagctatggccgtttgaccttcaaatatgaaagggattctaactaccacttgctcatgtctgttcaagagagtttagaaagaaaatttggaaagcatggtggaactattcccattgtacccacggcagagttccaagacaggatatcgggtgcatctgagaaagacatcgtgcactctggcttggcatacacaatggagcgttctgccaggcaaattatgcgcacagccatgaagtataacctgggattggacctgagaacagctgcctatgttaatgccattgagaaagtcttcaaagtgtacaatgaagctggtgtgaccttcacatagatggatcatggctgacttcctcactatcctcttcacatgtaacttctgcagacctatcacaagtttacatgtaaccacagaaatccctttctctcctgactcattaataatggataccattctcaacaagtcaatccaagtcagcccgttaaggagaaagaaattaaggttagcggatcatgtacaagctgagtgtgaaagtagaaatcacctacaccagagagccattttggtattttgcctttaaataaaaagcctcctttatctggctgtgcagccttgctctgtggcttttcccaacacaatcagtgctagtgctggggaggaacagtcaagagcagtcagttgcttgcttattttttctggatgagtctgggacacactgtaactttaacacatttaagaagtaggtgtgtggccttttcagaaggtggcatggtcctcaagtgagttcttagtattttatatcagcaaaataattcaattttgcaggttgcaaacaaatataaaacctgtttctgtttatgaatattattcttttagaatagaataagtacatgctgctgtaataaaattgcctttaatcacttaacaagcctaaccttgactcaaacagtgaatgcctatagaaataataaatgaaaaaaactagtatttttatatcataaaacaatgtcatttatagcttatcattcatgtattgtccagcagacattaaaagccctgtggataattaagttatcttcatacctgcaaaatggtggaggctattttcattaaaactgtcagaatttgcttactataattatgatacagtccaaagaatgcagtcactttttatcatgttaactaattgttctcttttgaagatctatggttgactaattaaacaataattcaagtagagtgtcccagaaaaaaaccacttgggctccctgtttggagtctggctggctctgagcattgccaatggcccctactcacctgactttgtatcctctccttttagaggctttgcattctgcacccagcttcactaacagtgggctgaaaacatccttgggttgagtgtttcatttgggagttatttggccagggccttttgaacagtagtgtccccatgaagtgctagataatatatgtgtaagagtcagctttttttttttttttaactctaacacccttcagaaatttctaactactttgtaactgcatggcttaacctggtgataaaagcagttattaaaagtctacgttttcc

SEQ ID NO: 335513 - DNA, 774 bp, Artificial Sequence
  derived and/or modified sequence
gaaaacttcatcgtggagggctttggaaatgtgggcctgcacagcatgagatacctgcacagatttggagccaagtgcatcgctgtgggggagagtgatggcagcatctggaacccagatggcatcgaccccaaggagctggaggacttcaagctgcagcacggcagcatcctgggcttccccaaggccaagccctatgagggcagcatcctggaggccgactgtgacatcctgatcccagctgccagcgagaagcagctgaccaagagcaatgccccccgggtgaaggccaagatcatcgccgagggcgccaacggccccaccaccccagaggccgacaagatcttcctggagaggaacatcatggtgatcccagacctgtacctgaatgctgggggcgtgacagtgtcctactttgagtggctgaagaacctgaaccacgtgtcctatggccgcctgaccttcaagtatgagcgggacagcaactaccacctgctgatgtctgtgcaggagagcctggagaggaagtttgggaagcacggcggcaccatccccatcgtgcccacagctgagttccaggaccgcatcagcggggccagcgagaaggacatcgtgcacagcggcctggcctacaccatggagaggtctgcccggcagatcatgaggacagccatgaagtacaacctgggcctggacctgaggacagctgcctacgtgaatgccatcgagaaggtgttcaaggtgtacaatgaggccggcgtgaccttcacctag

SEQ ID NO: 335514 - DNA, 1176 bp, Artificial Sequence
  derived and/or modified sequence
atgacctacaagtgtgctgtggtggatgtgccctttggaggagccaaggccggcgtgaagatcaaccccaagaactacacagacaatgagctggagaagatcacccggcgcttcaccatggagctggccaagaagggcttcatcggccctggcattgatgtgcctgccccagacatgagcactggagagcgggagatgtcctggattgctgacacctacgccagcaccatcggccactatgacatcaatgcccacgcctgtgtgacaggcaagcccatcagccagggcggcatccacggccgcatcagcgccaccggccggggcgtcttccatggaattgagaacttcatcaatgaggccagctacatgagcatcctgggcatgaccccaggctttggagacaagacctttgtggtgcagggctttggaaatgtgggcctgcacagcatgagatacctgcacagatttggagccaagtgcatcgctgtgggggagagtgatggcagcatctggaacccagatggcatcgaccccaaggagctggaggacttcaagctgcagcacggcagcatcctgggcttccccaaggccaagccctatgagggcagcatcctggaggccgactgtgacatcctgatcccagctgccagcgagaagcagctgaccaagagcaatgccccccgggtgaaggccaagatcatcgccgagggcgccaacggccccaccaccccagaggccgacaagatcttcctggagaggaacatcatggtgatcccagacctgtacctgaatgctgggggcgtgacagtgtcctactttgagtggctgaagaacctgaaccacgtgtcctatggccgcctgaccttcaagtatgagcgggacagcaactaccacctgctgatgtctgtgcaggagagcctggagaggaagtttgggaagcacggcggcaccatccccatcgtgcccacagctgagttccaggaccgcatcagcggggccagcgagaaggacatcgtgcacagcggcctggcctacaccatggagaggtctgcccggcagatcatgaggacagccatgaagtacaacctgggcctggacctgaggacagctgcctacgtgaatgccatcgagaaggtgttcaaggtgtacaatgaggccggcgtgaccttcacctag

SEQ ID NO: 335515 - DNA, 774 bp, Artificial Sequence
  derived and/or modified sequence
gagaacttcatcgtggagggcttcggcaacgtgggcctgcacagcatgcggtacctacatcggtttggtgccaagtgcattgccgtcggagagtctgatggcagcatctggaatcctgacgggatcgatcctaaagaactcgaggatttcaagctccagcacggatccatactcggattccccaaagcgaagccttacgagggcagtatactggaggcagattgtgatatactcatacccgccgcctctgaaaagcaactgacaaaaagcaacgccccaagagttaaagccaaaatcatcgctgagggagcaaatgggccgacgactcccgaggcagacaaaatcttcctggagagaaacatcatggttatacccgacctgtatctgaacgcgggcggcgtgaccgtgagctacttcgagtggcttaagaacctgaatcacgtgtcatacgggcggttaacctttaaatatgaacgggattcaaactaccacctcctgatgtcagtgcaggaatccctcgaacgtaaattcgggaagcacggaggaactatcccaatcgttcctacggcagaattccaggatcggattagcggagcatccgagaaggatatagtgcacagcggattagcgtacaccatggaacgaagcgcccgccagatcatgaggactgccatgaaatacaacctcggcctggatctgcgcacggcagcttacgttaacgcgatcgagaaggtgttcaaggtgtacaacgaggctggcgtcaccttcacatag

SEQ ID NO: 335516 - DNA, 1176 bp, Artificial Sequence
  derived and/or modified sequence
atgacctacaagtgcgccgtggtggacgtgcccttcggcggcgccaaagcaggagttaagataaatcctaagaactacactgataacgaacttgagaaaatcacacgaagattcactatggagttagcaaagaaaggtttcatcgggcccggcatagacgtccccgctcctgatatgagcacaggtgaaagggagatgtcatggatcgccgatacatacgcaagcacaatcgggcactacgatattaatgctcatgcttgtgtgaccggaaagcccataagccagggtggaattcacggtcggatctctgccaccgggagaggggtcttccatggcattgaaaattttatcaacgaagctagctacatgtccatcttgggaatgacccccgggttcggtgacaagaccttcgtggtacagggcttcggaaacgtggggctgcattctatgagatatctccaccggttcggcgctaaatgcattgccgtgggagaatccgacgggtcgatctggaacccggatggtattgatcccaaggagctagaagattttaagctgcagcatggctcgattctgggattccctaaagccaagccctacgagggttctattctggaggccgattgcgacatcctcatccccgccgcatccgaaaaacagcttactaaaagcaatgctccgcgtgtgaaggcgaaaatcatcgccgagggagcaaacggtccaaccacccccgaggccgataagatatttttggaacgcaatataatggttattcccgatttgtacctcaacgccgggggagtgacggtgtcgtacttcgagtggctcaaaaatttaaatcacgtgtcttacgggagactgaccttcaagtacgaaagggactctaattatcacctgctcatgtctgtccaagagtccttagaaaggaagtttgggaaacacggcggtacaataccgatagtgccaacggccgagtttcaagaccggatctctggtgcatctgaaaaggacatcgtccatagcggattggcatacactatggagcgtagcgctcgccagattatgcgcacagcaatgaagtacaacttgggccttgatctacgaactgctgcatatgtgaacgctatcgaaaaggtcttcaaggtgtataatgaagccggagtcacgtttacatag

SEQ ID NO: 335517 - DNA, 774 bp, Artificial Sequence
  derived and/or modified sequence
gagaacttcattgtggagggattcgggaacgtggggctgcattcaatgaggtatctgcaccgcttcggagccaaatgtatcgccgttggcgagagcgacggaagcatttggaatcccgacggaattgacccgaaagagttagaggacttcaagctccagcatggttctatactgggttttccgaaggcgaaaccctatgagggaagcattttggaagctgattgcgacattctaatacccgctgccagcgaaaaacagttgacaaaaagtaatgcgcctagggtaaaagctaagatcatagcggaaggggcaaacgggcctacgacgccggaggccgacaaaattttcttggaacgaaacattatggtgatcccagacctttacctcaatgccggtggcgtgaccgtctcatattttgagtggctcaagaatctgaatcacgtcagctacgggcgtctgacctttaaatacgagagggactctaattatcatttgctgatgtctgtgcaagagtctcttgagcggaagttcggaaagcacggcggaactattcctatcgtcccaaccgcggaattccaggaccggatttccggggcaagtgaaaaagacattgtgcatagtggcctcgcctacactatggagcgctccgcgaggcagattatgagaaccgctatgaagtacaacttaggccttgacttaaggacagctgcttacgttaacgcgattgagaaagttttcaaggtctataacgaggctggcgtcacttttacttag

SEQ ID NO: 335518 - DNA, 1176 bp, Artificial Sequence
  derived and/or modified sequence
atgacctacaagtgtgccgttgttgatgtccccttcggcggagctaaagctggcgtgaagattaacccgaagaattacaccgacaatgagcttgaaaaaataacccggaggtttacaatggaactggctaagaagggcttcatcgggcctggaatagacgtgccagcccctgacatgtcaacaggagagcgagagatgtcctggatcgcagatacctacgccagcaccatcgggcactatgacataaacgcccacgcttgtgtgacaggaaagcccattagccaaggagggatacatggcagaataagtgctacagggcgaggcgtgttccacggcatcgaaaattttatcaatgaggctagctacatgtcaatcctgggcatgacccctggtttcggagacaaaacttttgtggtgcaaggattcgggaatgtgggcttgcactcaatgagatacctccaccggttcggtgcaaaatgtatcgcagtgggggaaagtgacggatctatatggaatcccgatggtatcgatccgaaagaactggaagatttcaaactgcagcacggatctatcctgggctttcccaaggcaaaaccctacgaggggtctatcctggaagccgactgcgacatccttattccggctgcttctgagaagcagctaactaaatccaatgcccctagggtgaaggccaagatcatcgccgaaggagccaacggacctacaactccagaagccgacaagatcttcctggagcgcaacattatggtcattcccgacttatacctgaatgccggaggcgtgactgttagctacttcgaatggctcaagaatttaaatcatgtgtcatacgggcgtctaaccttcaaatatgagagagactcaaattatcacctcctgatgtccgtgcaggaaagcctagagcgaaagttcggaaagcatggaggaaccattcctatagtgcctaccgcagagttccaggaccgcatctcaggcgcatccgagaaggatattgtgcattcgggattagcttataccatggaaagatcagccagacaaataatgaggacagccatgaaatataacctcggactggacctaagaacagctgcctacgtgaacgccatcgaaaaggtgtttaaggtttacaacgaggctggagtgaccttcacttag

SEQ ID NO: 335519 - DNA, 774 bp, Artificial Sequence
  derived and/or modified sequence
gagaacttcatcgtggagggcttcggcaacgtgggcctgcacagcatgagatacctgcacagattcggcgccaagtgcatcgccgtgggcgagagcgacggcagcatctggaaccccgacggcatcgaccccaaggagctggaggacttcaagctgcagcacggcagcatcctgggcttccccaaggccaagccctacgagggcagcatcctggaggccgactgcgacatcctgatccccgccgccagcgagaagcagctgaccaagagcaacgcccccagagtgaaggccaagatcatcgccgagggcgccaacggccccaccacccccgaggccgacaagatcttcctggagagaaacatcatggtgatccccgacctgtacctgaacgccggcggcgtgaccgtgagctacttcgagtggctgaagaacctgaaccacgtgagctacggcagactgaccttcaagtacgagagagacagcaactaccacctgctgatgagcgtgcaggagagcctggagagaaagttcggcaagcacggcggcaccatccccatcgtgcccaccgccgagttccaggacagaatcagcggcgccagcgagaaggacatcgtgcacagcggcctggcctacaccatggagagaagcgccagacagatcatgagaaccgccatgaagtacaacctgggcctggacctgagaaccgccgcctacgtgaacgccatcgagaaggtgttcaaggtgtacaacgaggccggcgtgaccttcacctag

SEQ ID NO: 335520 - DNA, 1176 bp, Artificial Sequence
  derived and/or modified sequence
atgacctacaagtgcgccgtggtggacgtgcccttcggcggcgccaaggccggcgtgaagatcaaccccaagaactacaccgacaacgagctggagaagatcaccagaagattcaccatggagctggccaagaagggcttcatcggccccggcatcgacgtgcccgcccccgacatgagcaccggcgagagagagatgagctggatcgccgacacctacgccagcaccatcggccactacgacatcaacgcccacgcctgcgtgaccggcaagcccatcagccagggcggcatccacggcagaatcagcgccaccggcagaggcgtgttccacggcatcgagaacttcatcaacgaggccagctacatgagcatcctgggcatgacccccggcttcggcgacaagaccttcgtggtgcagggcttcggcaacgtgggcctgcacagcatgagatacctgcacagattcggcgccaagtgcatcgccgtgggcgagagcgacggcagcatctggaaccccgacggcatcgaccccaaggagctggaggacttcaagctgcagcacggcagcatcctgggcttccccaaggccaagccctacgagggcagcatcctggaggccgactgcgacatcctgatccccgccgccagcgagaagcagctgaccaagagcaacgcccccagagtgaaggccaagatcatcgccgagggcgccaacggccccaccacccccgaggccgacaagatcttcctggagagaaacatcatggtgatccccgacctgtacctgaacgccggcggcgtgaccgtgagctacttcgagtggctgaagaacctgaaccacgtgagctacggcagactgaccttcaagtacgagagagacagcaactaccacctgctgatgagcgtgcaggagagcctggagagaaagttcggcaagcacggcggcaccatccccatcgtgcccaccgccgagttccaggacagaatcagcggcgccagcgagaaggacatcgtgcacagcggcctggcctacaccatggagagaagcgccagacagatcatgagaaccgccatgaagtacaacctgggcctggacctgagaaccgccgcctacgtgaacgccatcgagaaggtgttcaaggtgtacaacgaggccggcgtgaccttcacctag

SEQ ID NO: 335521 - protein, 844 aa, Artificial Sequence
  derived and/or modified sequence
MSKRGMSSRAKGDKAEALAALQAANEDLRAKLTDIQIELQQEKSKVSKVEREKNQELRQVREHEQHKTAVLLTELKTKLHEEKMKELQAVRETLLRQHEAELLRVIKIKDNENQRLQALLSALRDGGPEKVKTVLLSEAKEEAKKGFEVEKVKMQQEISELKGAKRQVEEALTLVIQADKIKAAEIRSVYHLHQEEITRIKKECEREIRRLMEEIKFKDRAVFVLERELGVQAGHAQRLQLQKEALDEQLSQVREADRHPGSPRRELPHAAGAGDASDHSGSPEQQLDEKDARRFQLKIAELSAIIRKLEDRNALLSEERNELLKRVREAESQYKPLLDKNKRLSRKNEDLSHALRRMENKLKFVTQENIEMRQRAGIIRRPSSLNDLDQSQDEREVDFLKLQIVEQQNLIDELSKTLETAGYVKSVLERDKLLRFRKQRKKMAKLPKPVVVETFFGYDEEASLESDGSSVSYQTDRTDQTPCTPDDDLEEGMAKEETELRFRQLTMEYQALQRAYALLQEQVGGTLDAEREVKTREQLQAEVQRAQARIEDLEKALAEQGQDMKWIEEKQALYRRNQELVEKIKQMETEEARLRHEVQDARDQNELLEFRILELEERERKSPAISFHHTPFVDGKSPLQVYCEAEGVTDIVVAELMKKLDILGDNANLTNEEQVVVIQARTVLTLAEKWLQQIEETEAALQRKMVDLESEKELFSKQKGYLDEELDYRKQALDQANKHILELEAMLYDALQQEAGAKVAELLSEEEREKLKVAVEQWKRQVMSELRERDAQILRERMELLQLAQQRIKELEERIEAQKRQIKELEEKFLFLFLFFSLAFILWS

SEQ ID NO: 335522 - DNA, 2535 bp, Artificial Sequence
  derived and/or modified sequence
atgagcaagagaggcatgagcagcagagccaagggcgacaaggccgaggccctggccgccctgcaggccgccaacgaggacctgagagccaagctgaccgacatccagatcgagctgcagcaggagaagagcaaggtgagcaaggtggagagagagaagaaccaggagctgagacaggtgagagagcacgagcagcacaagaccgccgtgctgctgaccgagctgaagaccaagctgcacgaggagaagatgaaggagctgcaggccgtgagagagaccctgctgagacagcacgaggccgagctgctgagagtgatcaagatcaaggacaacgagaaccagagactgcaggccctgctgagcgccctgagagacggcggccccgagaaggtgaagaccgtgctgctgagcgaggccaaggaggaggccaagaagggcttcgaggtggagaaggtgaagatgcagcaggagatcagcgagctgaagggcgccaagagacaggtggaggaggccctgaccctggtgatccaggccgacaagatcaaggccgccgagatcagaagcgtgtaccacctgcaccaggaggagatcaccagaatcaagaaggagtgcgagagagagatcagaagactgatggaggagatcaagttcaaggacagagccgtgttcgtgctggagagagagctgggcgtgcaggccggccacgcccagagactgcagctgcagaaggaggccctggacgagcagctgagccaggtgagagaggccgacagacaccccggcagccccagaagagagctgccccacgccgccggcgccggcgacgccagcgaccacagcggcagccccgagcagcagctggacgagaaggacgccagaagattccagctgaagatcgccgagctgagcgccatcatcagaaagctggaggacagaaacgccctgctgagcgaggagagaaacgagctgctgaagagagtgagagaggccgagagccagtacaagcccctgctggacaagaacaagagactgagcagaaagaacgaggacctgagccacgccctgagaagaatggagaacaagctgaagttcgtgacccaggagaacatcgagatgagacagagagccggcatcatcagaagacccagcagcctgaacgacctggaccagagccaggacgagagagaggtggacttcctgaagctgcagatcgtggagcagcagaacctgatcgacgagctgagcaagaccctggagaccgccggctacgtgaagagcgtgctggagagagacaagctgctgagattcagaaagcagagaaagaagatggccaagctgcccaagcccgtggtggtggagaccttcttcggctacgacgaggaggccagcctggagagcgacggcagcagcgtgagctaccagaccgacagaaccgaccagaccccctgcacccccgacgacgacctggaggagggcatggccaaggaggagaccgagctgagattcagacagctgaccatggagtaccaggccctgcagagagcctacgccctgctgcaggagcaggtgggcggcaccctggacgccgagagagaggtgaagaccagagagcagctgcaggccgaggtgcagagagcccaggccagaatcgaggacctggagaaggccctggccgagcagggccaggacatgaagtggatcgaggagaagcaggccctgtacagaagaaaccaggagctggtggagaagatcaagcagatggagaccgaggaggccagactgagacacgaggtgcaggacgccagagaccagaacgagctgctggagttcagaatcctggagctggaggagagagagagaaagagccccgccatcagcttccaccacacccccttcgtggacggcaagagccccctgcaggtgtactgcgaggccgagggcgtgaccgacatcgtggtggccgagctgatgaagaagctggacatcctgggcgacaacgccaacctgaccaacgaggagcaggtggtggtgatccaggccagaaccgtgctgaccctggccgagaagtggctgcagcagatcgaggagaccgaggccgccctgcagagaaagatggtggacctggagagcgagaaggagctgttcagcaagcagaagggctacctggacgaggagctggactacagaaagcaggccctggaccaggccaacaagcacatcctggagctggaggccatgctgtacgacgccctgcagcaggaggccggcgccaaggtggccgagctgctgagcgaggaggagagagagaagctgaaggtggccgtggagcagtggaagagacaggtgatgagcgagctgagagagagagacgcccagatcctgagagagagaatggagctgctgcagctggcccagcagagaatcaaggagctggaggagagaatcgaggcccagaagagacagatcaaggagctggaggagaagttcctgttcctgttcctgttcttcagcctggccttcatcctgtggagctag

SEQ ID NO: 335523 - DNA, 2535 bp, Artificial Sequence
  derived and/or modified sequence
atgagtaagagggggatgagcagtagagcaaaaggcgacaaagccgaagcactcgccgccctacaagcagcaaatgaggatcttcgtgcaaaacttacagatatccagatcgagttgcagcaggaaaagtcaaaggtttccaaggtggagcgcgagaagaaccaggaacttaggcaggtccgcgaacatgagcagcacaaaactgctgtgcttctgactgaactgaagacaaaactgcatgaagaaaagatgaaggagttgcaggccgtcagagagacgctgctgcgccaacatgaagctgaactgctgcgcgtgattaagattaaagataatgaaaatcagcgcctgcaggcactcctcagcgcactcagagatggcgggccggagaaagttaaaacagtgctgttaagtgaggctaaggaagaagccaagaaaggatttgaagtggagaaggtcaagatgcaacaggagatttccgaactgaaaggtgctaagaggcaggtggaggaagccctgacactcgtcatccaagctgacaagattaaagcagccgagattcgatcggtgtatcacttacatcaggaggagataacaagaattaaaaaagaatgtgagcgtgaaatccgccgcctgatggaggaaatcaagttcaaagatagagcggtcttcgtgttagagagagagctcggggtccaggcaggacatgcgcagcggctgcagctgcaaaaagaggcactggacgagcagttgtcacaagtcagagaggccgatcggcacccggggtcaccacgccgtgagctgccacatgcggccggagctggggacgcaagcgaccacagcggcagcccagaacaacagctcgatgaaaaggacgcccggaggttccaactcaagatcgctgagctatccgcgatcatccgcaagctggaagaccgaaatgcactgctttctgaagaacgcaatgaacttctgaaacgcgtgcgggaagctgagtcccagtataaaccgctgctggataaaaataaaaggctttctaggaagaacgaggacttgtcacatgcactgaggcggatggagaacaaactaaagtttgtgacccaggagaatattgaaatgcgtcagcgcgctgggataatcaggcggccttcctcattaaacgatctcgatcagtctcaggacgagcgtgaagtggacttcctcaagctccagattgtggagcagcagaatttaattgacgagctctctaaaactctagagactgcaggatatgtcaagtccgtcctcgaaagggataagctcctgcggttcaggaaacaacgaaagaaaatggctaaattacccaagccagtggtggtggaaacattctttgggtacgatgaggaagcctcactggagagtgatgggtccagtgtttcataccagacagaccgcaccgaccagacaccatgcacaccagacgacgacctagaggagggtatggcaaaggaggagactgaactacggtttcggcagctgactatggagtaccaggccctccaacgcgcatatgcattgctccaggagcaagtaggaggcactttagacgctgagagggaagtcaagacgcgtgaacaactgcaagccgaggtgcagcgagcccaggctaggatcgaagatctggagaaggccctagcggagcagggccaggacatgaaatggatcgaggagaagcaggctctttacaggaggaaccaggaactggtagagaaaattaagcagatggaaacagaggaggccaggttgaggcacgaggttcaggacgcgcgggaccagaatgagctcctggaatttagaatactcgaactcgaggaacgggagcgaaaatcccccgctatctcatttcaccacacaccttttgtggacggcaagtcaccgctccaggtgtattgcgaggcggaaggcgtcacagacattgtggttgccgagttaatgaaaaaattagacattctgggcgacaacgcaaacctgaccaacgaggagcaggtagtggtgattcaggcacgcacggtgttgaccttggccgagaaatggctccagcaaattgaggagacggaagccgccctgcagagaaagatggtggatctggagtccgagaaggagctatttagtaaacagaagggctacctcgacgaggaactggactatcgtaagcaggcgctggatcaggccaacaagcacatactggagctggaagctatgctttacgatgctctgcagcaggaagccggcgccaaggtggccgaactgctcagcgaggaggagagagaaaaactgaaggtagccgtcgaacagtggaagcgacaagttatgtcggagctgagagaaagagatgcccagatccttcgtgaaagaatggaactccttcagctcgcccagcagcggattaaagagctggaagagagaatcgaggctcagaagaggcaaatcaaggagctggaagaaaagttcctgttcctgttcctgtttttctccttggcttttatactctggagctag

SEQ ID NO: 335524 - DNA, 6626 bp, Artificial Sequence
  derived and/or modified sequence
ggtgaatgagaagatgtagtgtgacagcagcccgggtgacacctgctgggagcttggcgtggacaccccagccacccccagcccagcccagccggagcaccctacccctgggcatccccctggccatccagcctcaccatgtccaagaggggcatgagcagccgggccaagggggacaaggcagaggccctcgcggcgctgcaggcggccaacgaggatcttcgagccaagctcacagacatccagatcgagctgcagcaggagaagagcaaggtcagcaaagtggaacgcgagaagaaccaggagctgcggcaggtgcgcgagcatgagcagcataagaccgcggtcttgctcacggagctcaagacaaagctgcacgaggagaagatgaaggagctacaggctgtgcgtgagacgctgctgcggcagcatgaggctgagctgctcagggtcatcaagatcaaggacaacgagaaccagcggctgcaggcactgctcagtgccctgcgtgatggcggccccgaaaaggtcaagaccgtgctgctgtccgaggccaaggaggaggccaagaaggggttcgaggtggagaaggtcaagatgcagcaggagatctccgagctcaagggcgccaaaaggcaggtggaggaggcgctgacgctggtgatccaagcggacaagatcaaggccgcagagatccgcagcgtgtaccacctgcaccaggaggagatcacccgcatcaagaaggagtgcgagcgggagatccgcaggctgatggaggagataaaatttaaagacagagcagtcttcgtgctggagagagagttaggggttcaagccgggcatgctcagagactgcagctccaaaaagaggctctagatgagcagctgtcccaggtccgagaggccgaccggcacccgggcagccccagacgggaacttcctcatgcagctggtgcaggagacgcttcagaccactcgggaagccctgaacagcagttggatgaaaaagatgcccggcgcttccagcttaaaatcgcggagttaagtgcgattatccgcaaactggaggaccgcaatgcattgctgtcggaagagaggaatgagctgttgaagcgcgtaagagaagctgagagtcagtacaagcctctgctggataaaaacaagcgcctcagtcggaagaacgaggatttgtctcatgctttacgccgaatggaaaacaagttaaaatttgtcacccaggagaacatagaaatgagacagagagctggaatcatacggagacccagttccttgaatgaccttgatcaaagtcaggatgagagagaagtcgatttcttgaagcttcagattgtggagcagcaaaacctcatagatgaactgtctaagacccttgagaccgccggctacgtgaagagcgtgttagagcgggacaagctgttaagattccggaagcaaagaaagaaaatggcaaaacttcccaagccggtggttgtggagaccttctttggatacgacgaagaggcttccctggaatccgacggctcctccgtctcttaccaaacagacaggacggaccagaccccgtgcaccccggacgatgacttggaggagggcatggccaaggaggagacggagctgaggttccggcagctgaccatggagtaccaggccctgcagcgtgcctacgctttgttgcaggagcaggttggagggacgctggacgcagagcgagaagttaagacccgtgagcagctacaagccgaagtgcagagggcacaggcgcggatagaggacctggagaaggccctggcggagcaggggcaggatatgaagtggattgaagagaagcaggcactgtaccggagaaatcaagagcttgtggaaaagatcaaacaaatggagacggaagaggctcggctcagacacgaggtgcaggacgccagagaccaaaacgagctgctggagttcaggatcctggagcttgaggagagggagaggaagtcacccgccatcagcttccaccacacgcccttcgtggacgggaagagccccctccaggtgtactgcgaggccgaaggtgtgacggacattgtggttgcggagctgatgaagaagctggacatcctgggcgataacgccaacctgaccaatgaggagcaggtggttgtcatacaagccaggacagtcctgaccttggccgaaaagtggctccagcagattgaggagacagaggcggcgctgcagcggaagatggtggatctggagagcgagaaggagctgttcagtaagcagaagggctacctggacgaggagctggactaccggaaacaggccttggaccaggccaacaagcacatcctggagctggaagccatgctgtatgatgccctgcagcaggaggccggggctaaggtggctgagctgctgtcagaggaggagcgcgagaagctcaaggtggccgtggagcagtggaagcgccaggtcatgagtgagctgcgcgagcgggacgcccagatcctgcgggagcgcatggagctgctgcagctggctcagcagagaattaaagagttagaagaaagaatagaagctcagaagagacaaataaaggaactggaggaaaagtttctatttttgttcttatttttctccttagctttcattctctggtcatagtccgtcttggcaccctgacgtgccccacattgaatcggacccttttcctccagtgggaccagaaagcagggacaaaatgggacgtcgcgtctccatcctgaagacccagggagatttggtctctgcacgcccgtcccgtggaggaagagtgagaaggggcagtgtgtggggcgtggagctgccgtccacgtgggatgtgccagaactagaactggctctgccgacttctcgggggcttctccgggacgggcctggccttggctgctggaccctgggtcccttctcccggacggcagcccccatcccatttccagggatgtgtagcattccctgccaagcaggggtgagaactgcttctgtgcagaagcaccagccgcgggtcccctcctctctcttggttctcacagtagctgccactggtgtctggaggaagattttcagaaacaacagaggcttggcctgatgacaagatgaaagctggacggtgaccttcattcaggggaacctggaggctccctgggatggtcctgggagggctccccgacgcctcaggggcccctccgatgctgcaatatgttgctggggtcctgagcacccgctggccaacagaccccacatccaccctcgttcatcatcatctctgtggggacagacaagagccgtggccgccgcgggccgcgtggtgccatcaaccctctgcctccctactcaacctgagacaggaaggccaagatcccgcccaagccgccagctgggagcaccgcgggactgagccaaggaaggcgtggggagcgtggtgacaggaggtgggacgagggggcggagctggctggaacacggatgccagaggctgcctccatagtgaatctccagaagtcacagaggccctgggcacccagagccacccagcctggaagcccctgcacgggccagccctgcaggccatggaccccggcgggcaccgaagcctcaccccaagcctttgcacacaaggagcagcccaggtggggatggcgggcgcaagaagggaaccgcggggacggcctttcccctcccgccctgtgtggggacgctgcacgagccgtggaccaagaggctgacaggaggggtccgcagcgaggaggaggtgcgaagggggcggcggctccgtcttgcaggtcccctggggcgcgttcttcaggtgcgtggtggacgaggcggcgtcctcgcggggtcgggacctgggtacccagcagcatctggctcctgcatccaccaagggcgcccaggcacagcctcaggccagaaggttcgctgcagaggttcattctagaaggagcgggagaccagcagtcccagccctgtccaaggacgcccgctgcttggcacacgagggcgccgcaggcccaccatccctcaggacatggctgccgagtccccagagacttctggtcccacagcaagagctggagctccaagcataacatctctaactgtgcggcaaggacagcgcagccagagagaggaagcagtgcattggtgaaggcaacgttaggtgtgatttccattcctgctgggagacccgggacgcagcccgggagcttcgtccagcctgtggatggagcctgactggctgcagatggaacttctgtgtcctcccaccctaggtgggctaaggttctgctctcagagctgaattgacaggaggtgtgtgtgtgtgctcacttgtgtgcacaagcatgcgtttatgcatgttttcacgcaaccagaagagccattcgtgggatttagccatttcgaggcacctagaagttgaggcagccagctgtgcagccaggtgtgactgttactggcagcattgtataaaagacacgactcagctgccgtagggaggactgggttgtctggaagtattaggctcattttatatttgtgtcagaagaaatgtctgactttggggcagatgacacggtggctgcggaccaggcatggctccctaggttgaaatcagggaaaagctaatagtatcagacagatatgctttttctttggtggctgcaggatttttgctggaaaatgcactattaatcagcacttgtccaagaaagacccatccatttctgttgtcattcaagccacagttcctgatttactcggcaagatactgggccagttcagtgtctctagctgagcctgacctcggggtttgcgtctcgagtctgaaatcctgtttagtcctctgtgcatagttttgtctcattttaacgactgcatcttcttggcacatttattatactcacaactgaatggcacacaatagccttgtgttaataaaagctaccgtggcgctgtgggtgaaccgctgggttgaagtccgatggactctacgatgcaggcatccagaaatatgttgtaactctacctggctccctgccagcctggcctcctcctctgggagagctcctggcatggtcccaatgtgtacctgcatgggaacaacagctgcatgggccagctgtttcggatctaaagatgtgcagtgaaactcacattcccagattcacatccctcatgtttatttgggtcatcatggtttagcatgttgtatatatgtctggagcacttcatacacctctatccaccacagacactcttaatcacagttctgtaataataataaggcaaactatacggcaaagagaagcatgtaaatatgtaccaaatccttatgaagttgtaattgtttatatgtaaaaagtatgtatataggaacgggagaaggtgcaaggaatgtgctgaataacatccaaactgcatcgcgtctctgccccattcctgaaagcacacatctagttggagcgtcagttcctctccttagatatcattgttttcactcgtctatcataggcaccttctttacatctgattacaatacccagcatttcagaactgggtttttgcccccaaaaaggtaaatatgagcatttatcactgactcctcctggtccagtgagcagcagcagaattcaagtatttaaaaataaggtgcatttctaaattgcaggctataccttcttttccaaaccaatgggctagagtgaatttcctccaagtacttgggctgtcttactgctagctcttctaacaggggaagtctgtatgaatgcatcaccccctaataaggcaagaggaaggaccctgaaatgttgccagaaatgtactgttacatcaacatttacattatattaacatcatcacactctgtgttcaacacacagaacaacatagatactttagtttgtctaaagtaaaaatccacataaatagcagattcctttgttgacaccagtgtgttgtttaccttgtgcccatggtccagattttgagctggagaaggactatggctgttccttaaagtctctgcccttgcagaatctgtagccttcaggataccccgagtgccttacagggcttgtgaacaccgatactagaagtcaaaaagaagagagtgcccaagtgtgggtttggaggcactgacgcattcgccaactcaccgtcatcccatccttgaaaccctgagagagagtgtgtgttttatcacagtaatggaattcagtttagcctcaggaaactcatattgtgaatataggtatcaaatcatatatttgtttactgtatattttttaaaaagctttattgtaaatttatgcaaaaactaaccgggcctgttttcttacggcggcatgccaggtagtgtgtgtattctcccaggcactcccttcatagtcaccctctaaccacgtgacattccgttccatgctaagcagtattcacaggcctaaaataggtttgtatggtgatctacaagattttacaaatatttttgtattgtgattcctatgatatataccagagaattttttactcgtttgtaaattattgtacagttttaataaaaaatgttttaaatctta

SEQ ID NO: 335525 - DNA, 2535 bp, Artificial Sequence
  derived and/or modified sequence
atgagcaagaggggcatgagcagccgggccaagggggacaaggccgaggccctggccgccctgcaggccgccaatgaagacctgcgggccaagctgacagacatccagatcgagctgcagcaggagaagagcaaggtgtccaaggtggagcgggagaagaaccaggagctgcggcaggtgcgggagcacgagcagcacaagacagctgtgctgctgacagagctgaagaccaagctgcacgaggagaagatgaaggagctgcaggccgtgcgggagaccctgctgcggcagcacgaggccgagctgctgcgggtcatcaagatcaaggacaatgaaaaccagaggctgcaggccctgctgagcgccctgagagatggcggccctgagaaggtgaagacagtgctgctgtctgaggccaaggaggaggccaagaagggctttgaggtggagaaggtgaagatgcagcaggagatcagcgagctgaagggggccaagaggcaggtggaggaggccctgaccctggtgatccaggccgacaagatcaaggctgctgagatccgctctgtgtaccacctgcaccaggaggagatcacccgcatcaagaaggaatgtgagcgggagatccggcggctgatggaggagatcaagttcaaggacagagctgtgtttgtgctggagcgggagctgggcgtgcaggccggccacgcccagaggctgcagctgcagaaggaggccctggatgagcagctgagccaggtgcgggaggccgacagacaccctggcagcccccggcgggagctgccccacgccgccggggctggagatgccagtgaccacagcggcagccctgagcagcagctggatgagaaggatgcccggcgcttccagctgaagattgctgagctgagcgccatcatcaggaagctggaggacagaaatgccctgctgtctgaggagagaaatgagctgctgaagagggtgcgggaggccgagagccagtacaagcccctgctggacaagaacaagaggctgagcaggaagaatgaagacctgagccacgccctgcggaggatggagaacaagctgaagtttgtgacccaggagaacatcgagatgaggcagagagctggcatcatccggcggcccagcagcctgaatgacctggaccagagccaggatgagcgggaggtggacttcctgaagctgcagatcgtggagcagcagaacctgattgatgagctgagcaagaccctggagacagctggctacgtgaagtctgtgctggagcgggacaagctgctgcgcttcaggaagcagaggaagaagatggccaagctgcccaagcctgtggtggtggagaccttcttcggctatgatgaggaggccagcctggagagtgatggcagctctgtgtcctaccagacagacagaacagaccagaccccctgcaccccagatgatgacctggaggagggcatggccaaggaggagacagagctgcgcttccggcagctgaccatggagtaccaggccctgcagagggcctatgccctgctgcaggagcaggtgggcggcaccctggatgctgagcgggaggtgaagacccgggagcagctgcaggccgaggtgcagagggcccaggccagaattgaggacctggagaaggccctggccgagcagggccaggacatgaagtggattgaggagaagcaggccctgtacagaagaaaccaggagctggtggagaagatcaagcagatggagacagaggaggcccggctgcggcatgaggtgcaggatgcccgggaccagaatgagctgctggagttccgcatcctggagctggaggagcgggagaggaagagccctgccatctccttccaccacaccccatttgtggatggcaagagccccctgcaggtgtactgtgaggccgagggcgtgacagacatcgtggtggccgagctgatgaagaagctggacatcctgggggacaatgccaacctgaccaatgaggagcaggtggtggtgatccaggccaggacagtgctgaccctggccgagaagtggctgcagcagatcgaggagacagaagctgccctgcagaggaagatggtggacctggagagcgagaaggagctgttcagcaagcagaagggctacctggatgaggagctggactacaggaagcaggccctggaccaggccaacaagcacatcctggagctggaggccatgctgtatgatgccctgcagcaggaggccggggccaaggtggccgagctgctgtctgaggaggagcgggagaagctgaaggtggccgtggagcagtggaagaggcaggtgatgtctgagctgcgggagagagatgcccagatcctgcgggagaggatggagctgctgcagctggcccagcagaggatcaaggagctggaggagagaattgaggcccagaagaggcagatcaaggagctggaggagaagttcctgttcctgttcctgttcttcagcctggccttcatcctgtggagctag

SEQ ID NO: 335526 - DNA, 2535 bp, Artificial Sequence
  derived and/or modified sequence
atgagcaagcggggcatgagcagccgggccaagggcgacaaggccgaagctctcgcagctctgcaagctgcgaacgaggacttgagagctaaactaactgatatccaaattgagttgcagcaagaaaagtccaaggtgagcaaggtcgagcgtgaaaagaatcaggaactgcgccaggtgagagaacatgagcaacacaaaaccgccgtactactcacagagctgaaaaccaagctgcacgaagaaaaaatgaaggagcttcaggctgtgagagagactcttcttcgacagcacgaggcagagctcttgagggtgataaaaatcaaagataatgaaaatcagcgcctccaagctctgctgagcgcattgcgcgacggaggccctgagaaagtgaagaccgtcctgctgtcagaagccaaagaagaagcaaagaaagggtttgaggtggagaaagttaagatgcagcaagagattagtgagttgaagggggcaaaaaggcaggtcgaggaggcccttaccctcgtcattcaggccgacaaaattaaggcagcagaaatcaggtcagtgtaccatctgcatcaagaggaaatcacacgcatcaaaaaggaatgcgagagggagattcgaaggctaatggaggagatcaagttcaaagaccgagcagtcttcgtgctcgagagggagctgggagttcaggcgggccacgcacagagactgcaacttcagaaggaggccctagatgaacagctatcacaggtccgggaggctgatagacaccctggctcccccagacgggaactgccccacgccgccggggccggcgatgccagcgaccactcaggatcacccgagcagcagctcgacgaaaaggacgcccgacgctttcagcttaaaatagccgaactgagcgctattatccggaaactggaagaccgcaatgcactgttgagcgaggaaaggaacgagctgctcaagagagtaagagaggccgagtctcaatataaaccccttctggacaagaataaacggctgtcgcgcaaaaatgaggacctctcccacgccctccgccgcatggagaataaactgaagttcgtcacgcaggagaacattgagatgcgtcagagagctggcattattcgacgccctagcagtctgaacgatcttgatcaatctcaggatgagcgcgaggtggactttctgaaactgcagatcgtcgagcaacaaaatctcatcgacgaactgagcaaaacgcttgaaaccgcaggctatgtcaagtccgtacttgagagggataagctcctgaggttcagaaaacagcgtaagaaaatggcgaaactgccgaagcccgtggtcgtcgagaccttttttgggtacgacgaggaggcatctctcgaaagcgatggctcttccgtatcataccaaactgatcgcaccgatcagacaccctgcacccctgatgacgacctggaggagggcatggcgaaggaggagaccgagttacgctttcggcagttaacgatggagtaccaagcactgcaacgagcttatgcacttctccaggaacaggttggtgggacccttgacgcggaaagagaagtgaaaacccgagaacagctgcaagcagaggttcaacgcgcacaggcgagaatagaagacctagagaaagcactggctgaacagggccaggatatgaagtggattgaagaaaagcaggcattgtaccggcgcaatcaggagctcgtggagaaaatcaaacaaatggagacagaggaggcgagacttaggcatgaggtccaagatgcccgggaccaaaacgagctgctggagttccgaatcctggagctggaggagcgggaacgaaaaagcccggccatcagctttcaccatacacctttcgtggacggcaagtcacccctccaggtatattgtgaggccgaaggagttactgatattgtcgttgcggaattaatgaagaagctcgatatcctcggagataatgcaaacctcacaaatgaggagcaggttgtagtcattcaggctagaaccgtgctaaccctggcagaaaagtggctccagcagatcgaagagacagaagccgctcttcagagaaaaatggtggatttggagagtgaaaaagaacttttcagcaagcagaaagggtacctcgacgaggagctggactatagaaagcaagcgctggatcaggcaaacaaacacattctggaactggaagcgatgctatacgatgctctccagcaggaggctggggccaaagtcgccgagctgctgtccgaggaagaacgtgagaagctgaaggtggcagttgagcaatggaagcggcaggttatgtccgaactgagagagagggatgcccagattctgcgggaaaggatggagctcctccagctcgcgcaacagaggatcaaggaactggaggagcggatcgaagctcaaaaacgacagattaaggagctagaggagaagttcctgttcctgtttctctttttttctctcgcctttattctttggtcctag

SEQ ID NO: 335527 - DNA, 2535 bp, Artificial Sequence
  derived and/or modified sequence
atgtccaagcgaggtatgagctcacgggctaagggagataaagctgaagctctcgctgcactgcaggctgcaaatgaggatcttcgggctaagctgacagatatccagatcgagctgcagcaggaaaaaagcaaagtgtctaaggtcgaaagagaaaaaaatcaggaacttcgccaagtcagggagcatgaacagcataaaactgccgtgctattgacagaattgaagactaaactgcacgaggagaagatgaaagagttgcaagctgtgcgagaaaccctcctcaggcaacacgaagcggagttactgcgggtgatcaagattaaagataatgagaaccagcgattacaggctctcttgtcggccctgcgggacggcggtcccgagaaagtgaaaacagtgcttttatcggaggctaaagaagaggccaagaagggtttcgaggttgagaaggtgaaaatgcagcaggagatatccgagctgaagggcgctaagagacaggtcgaggaggctctgactctcgtaatccaagccgacaaaataaaggcagcagagatcagatctgtgtatcatttacaccaggaggagatcacgagaatcaagaaagaatgtgagagagagattagaagactcatggaagagatcaaattcaaagaccgtgctgtcttcgtccttgaaagagagctcggcgttcaggcaggacacgctcagcggctgcagctgcaaaaggaagcactcgacgagcagctgtcacaggtccgtgaggccgacaggcaccctggctccccacgaagggagcttccccacgctgctggtgccggagacgcgtcagatcactctggatcccctgagcagcagttggacgaaaaggacgctagacgatttcagttgaagattgctgagctttccgccatcatcagaaagttggaagaccgcaatgcattattatctgaagaacggaatgaattgcttaaacgcgtgagggaagccgaatctcaatacaaacctctcttggataaaaacaagcggctctcccgtaaaaatgaagatctgtcgcatgccctgcggaggatggaaaacaagcttaagtttgttacacaagagaacattgagatgcgacagcgagccggtattattcgtcgaccatcatccctaaatgatctggaccagtcacaggatgaaagggaagttgacttcctgaaactccagatcgtcgagcagcagaacctcatcgatgaactctcaaagactctggagacagcaggatatgtaaaatccgtcctggagcgcgataagctgctgcggtttcggaagcagcggaaaaaaatggctaagcttcctaaaccagtcgttgtagaaacatttttcggatacgacgaggaggcaagccttgagagtgatggatcctccgtgtcctaccaaactgatcgtacagatcagaccccttgcactcccgatgatgacttggaggagggtatggctaaggaagagacggaactgcggttccgacaattgaccatggaataccaggccttacagcgggcttacgcactgctgcaggagcaggtcgggggtactctagacgctgaaagagaggtcaagacgagagaacagctccaggccgaggtgcagcgcgctcaggcaagaatagaggacctggaaaaggccctcgccgagcaggggcaagacatgaagtggattgaggaaaagcaggccctgtacagacgaaatcaggagctcgtggagaagataaaacaaatggagaccgaggaggcacgccttagacacgaggtccaagatgcacgggatcagaacgaactgttagagttccgcatcctagagcttgaggaaagagagcgaaagagtccggcaatctcatttcaccatacccccttcgtcgacggtaagtctccgcttcaagtttactgcgaagcggagggagtgaccgatattgtcgtggccgaactcatgaaaaaactcgacatactgggcgataacgcaaatctgacaaatgaagaacaggtggtggtgattcaggcccgtaccgtgctcactttggccgaaaagtggttgcagcagatcgaagagaccgaggcagcactgcagcgtaagatggttgatctggaatccgaaaaggaactgtttagcaagcagaaaggctacctggacgaagagctagactatcggaaacaggccttggaccaagcaaacaagcatatcctggagctggaggcaatgctttatgacgctttgcaacaagaggcaggggcaaaagtggctgaactattgagcgaagaagagcgcgaaaaacttaaggtagccgtggagcagtggaagagacaggtgatgagcgagctgagggaaagggacgcccagattctcagggaacgaatggagctcctgcagctggctcagcagagaatcaaagagttggaggagagaatagaggcccagaagaggcagatcaaggagttggaggaaaagtttctgttcctgtttttatttttttcccttgcattcattctgtggtcctag

SEQ ID NO: 335528 - DNA, 830 bp, Artificial Sequence
  derived and/or modified sequence
ccgtttttccgcgcccgcggccttgaaggggtggtggtcgacgggcaagtagagaccgcgagggtctggaggggcgaccggcctggcacagaggggaaggaagagagcgggatgctaagtgccgtctggggagccggagggcccggggcgggcggggctgctcgaggacagccgagcagaaaagaattgctgctgaggcaccacctttggagcggtcctcgctgcctgtccttcccgctgggctcactccccgcgtctctcctggggcttcctggagccacttcccacaggagctgcttgtccccaaatcttgcctcaggacttgctgccaggggaacgcagactcagagcgtcctctttggagaagtaaggctgcctctggacggaggagtgaggggggcgaggaaacgcatgaacttcgaccacttccagatccttcgggccattgggaagggcagctttggcaaggtgtccccacgtgtccccaggcgtcctcaggcgtcctgccgaacagccctgtgccctccaggtgtgcattgtgcagaagcgggacacggagaagatgtacgccatgaagtacatgaacaagcagcagtgcatcgagcgcgacgaggtccgcaacgtcttccgggagctggagatcctgcaggagatcgagcacgtcttcctggtgaacctctggtactccttccaggacgaggaggacatgttcatggtcgtggacctgctactgggcggggacctgcgctaccacctgcagcagaacgtgcagttctccgaggacacggtgaggctgtacatctgcgagatggcactggctctggactacc

SEQ ID NO: 335529 - protein, 178 aa, Artificial Sequence
  derived and/or modified sequence
  misc_feature (1)..(1): Xaa can be any naturally occurring amino acid
XGLEGVVVDGQVETARVWRGDRPGTEGKEESGMLSAVWGAGGPGAGGAARGQPSRKELLLRHHLWSGPRCLSFPLGSLPASLLGLPGATSHRSCLSPNLASGLAARGTQTQSVLFGEVRLPLDGGVRGARKRSLLRAHPRTGILPGRCGMVWKDKKLQPSGCHEKAGGVFCGPSRGGV

SEQ ID NO: 335530 - protein, 277 aa, Artificial Sequence
  derived and/or modified sequence
PFFRARGLEGVVVDGQVETARVWRGDRPGTEGKEESGMLSAVWGAGGPGAGGAARGQPSRKELLLRHHLWSGPRCLSFPLGSLPASLLGLPGATSHRSCLSPNLASGLAARGTQTQSVLFGEVRLPLDGGVRGARKRMNFDHFQILRAIGKGSFGKVSPRVPRRPQASCRTALCPPGVHCAEAGHGEDVRHEVHEQAAVHRARRGPQRLPGAGDPAGDRARLPGEPLVLLPGRGGHVHGRGPATGRGPALPPAAERAVLRGHGEAVHLRDGTGSGLP

SEQ ID NO: 335531 - protein, 499 aa, Artificial Sequence
  derived and/or modified sequence
MLSAVWGAGGPGAGGAARGQPSRKELLLRHHLWSGPRCLSFPLGSLPASLLGLPGATSHRSCLSPNLASGLAARGTQTQSVLFGEVRLPLDGGVRGARKRMNFDHFQILRAIGKGSFGKVCIVQKRDTEKMYAMKYMNKQQCIERDEVRNVFRELEILQEIEHVFLVNLWYSFQDEEDMFMVVDLLLGGDLRYHLQQNVQFSEDTVRLYICEMALALDYLRGQHIIHRDVKPDNILLDERGHAHLTDFNIATIIKDGERATALAGTKPYMAPEIFHSFVNGGTGYSFEVDWWSVGVMAYELLRGWRPYDIHSSNAVESLVQLFSTVSVQYVPTWSKEMVALLRKLLTVNPEHRLSSLQDVQAAPALAGVLWDHLSEKRVEPGFVPNKGRLHCDPTFELEEMILESRPLHKKKKRLAKNKSRDNSRDSSQSENDYLQDCLDAIQQDFVIFNREKLKRSQDLPREPLPAPESRDAAEPVEDEAERSALPMCGPICPSAGSG

SEQ ID NO: 335532 - protein, 136 aa, Artificial Sequence
  derived and/or modified sequence
  misc_feature (1)..(1): Xaa can be any naturally occurring amino acid
XARGLEGVVVDGQVETARVWRGDRPGTEGKEESGMLSAVWGAGGPGAGGAARGQPSRKELLLRHHLWSGPRCLSFPLGSLPASLLGLPGATSHRSCLSPNLASGLAARGTQTQSVLFGEVRLPLDGGVRGARKRRS

SEQ ID NO: 335533 - DNA, 537 bp, Artificial Sequence
  derived and/or modified sequence
tgaggcctggagggcgtggtggtggacggccaggtggagaccgccagagtgtggagaggcgacagacccggcaccgagggcaaggaggagagcggcatgctgagcgccgtgtggggcgccggcggccccggcgccggcggcgccgccagaggccagcccagcagaaaggagctgctgctgagacaccacctgtggagcggccccagatgcctgagcttccccctgggcagcctgcccgccagcctgctgggcctgcccggcgccaccagccacagaagctgcctgagccccaacctggccagcggcctggccgccagaggcacccagacccagagcgtgctgttcggcgaggtgagactgcccctggacggcggcgtgagaggcgccagaaagagaagcctgctgagagcccaccccagaaccggcatcctgcccggcagatgcggcatggtgtggaaggacaagaagctgcagcccagcggctgccacgagaaggccggcggcgtgttctgcggccccagcagaggcggcgtgtag

SEQ ID NO: 335534 - DNA, 834 bp, Artificial Sequence
  derived and/or modified sequence
cccttcttcagagccagaggcctggagggcgtggtggtggacggccaggtggagaccgccagagtgtggagaggcgacagacccggcaccgagggcaaggaggagagcggcatgctgagcgccgtgtggggcgccggcggccccggcgccggcggcgccgccagaggccagcccagcagaaaggagctgctgctgagacaccacctgtggagcggccccagatgcctgagcttccccctgggcagcctgcccgccagcctgctgggcctgcccggcgccaccagccacagaagctgcctgagccccaacctggccagcggcctggccgccagaggcacccagacccagagcgtgctgttcggcgaggtgagactgcccctggacggcggcgtgagaggcgccagaaagagaatgaacttcgaccacttccagatcctgagagccatcggcaagggcagcttcggcaaggtgagccccagagtgcccagaagaccccaggccagctgcagaaccgccctgtgcccccccggcgtgcactgcgccgaggccggccacggcgaggacgtgagacacgaggtgcacgagcaggccgccgtgcacagagccagaagaggcccccagagactgcccggcgccggcgaccccgccggcgacagagccagactgcccggcgagcccctggtgctgctgcccggcagaggcggccacgtgcacggcagaggccccgccaccggcagaggccccgccctgccccccgccgccgagagagccgtgctgagaggccacggcgaggccgtgcacctgagagacggcaccggcagcggcctgccctag

SEQ ID NO: 335535 - DNA, 1500 bp, Artificial Sequence
  derived and/or modified sequence
atgctgagcgccgtgtggggcgccggcggccccggcgccggcggcgccgccagaggccagcccagcagaaaggagctgctgctgagacaccacctgtggagcggccccagatgcctgagcttccccctgggcagcctgcccgccagcctgctgggcctgcccggcgccaccagccacagaagctgcctgagccccaacctggccagcggcctggccgccagaggcacccagacccagagcgtgctgttcggcgaggtgagactgcccctggacggcggcgtgagaggcgccagaaagagaatgaacttcgaccacttccagatcctgagagccatcggcaagggcagcttcggcaaggtgtgcatcgtgcagaagagagacaccgagaagatgtacgccatgaagtacatgaacaagcagcagtgcatcgagagagacgaggtgagaaacgtgttcagagagctggagatcctgcaggagatcgagcacgtgttcctggtgaacctgtggtacagcttccaggacgaggaggacatgttcatggtggtggacctgctgctgggcggcgacctgagataccacctgcagcagaacgtgcagttcagcgaggacaccgtgagactgtacatctgcgagatggccctggccctggactacctgagaggccagcacatcatccacagagacgtgaagcccgacaacatcctgctggacgagagaggccacgcccacctgaccgacttcaacatcgccaccatcatcaaggacggcgagagagccaccgccctggccggcaccaagccctacatggcccccgagatcttccacagcttcgtgaacggcggcaccggctacagcttcgaggtggactggtggagcgtgggcgtgatggcctacgagctgctgagaggctggagaccctacgacatccacagcagcaacgccgtggagagcctggtgcagctgttcagcaccgtgagcgtgcagtacgtgcccacctggagcaaggagatggtggccctgctgagaaagctgctgaccgtgaaccccgagcacagactgagcagcctgcaggacgtgcaggccgcccccgccctggccggcgtgctgtgggaccacctgagcgagaagagagtggagcccggcttcgtgcccaacaagggcagactgcactgcgaccccaccttcgagctggaggagatgatcctggagagcagacccctgcacaagaagaagaagagactggccaagaacaagagcagagacaacagcagagacagcagccagagcgagaacgactacctgcaggactgcctggacgccatccagcaggacttcgtgatcttcaacagagagaagctgaagagaagccaggacctgcccagagagcccctgcccgcccccgagagcagagacgccgccgagcccgtggaggacgaggccgagagaagcgccctgcccatgtgcggccccatctgccccagcgccggcagcggctag

SEQ ID NO: 335536 - DNA, 411 bp, Artificial Sequence
  derived and/or modified sequence
tgagccagaggcctggagggcgtggtggtggacggccaggtggagaccgccagagtgtggagaggcgacagacccggcaccgagggcaaggaggagagcggcatgctgagcgccgtgtggggcgccggcggccccggcgccggcggcgccgccagaggccagcccagcagaaaggagctgctgctgagacaccacctgtggagcggccccagatgcctgagcttccccctgggcagcctgcccgccagcctgctgggcctgcccggcgccaccagccacagaagctgcctgagccccaacctggccagcggcctggccgccagaggcacccagacccagagcgtgctgttcggcgaggtgagactgcccctggacggcggcgtgagaggcgccagaaagagaagaagctag

SEQ ID NO: 335537 - DNA, 537 bp, Artificial Sequence
  derived and/or modified sequence
tgaggtcttgagggggtggtggtagatggacaggtggagacagctagagtgtggagaggggaccgcccagggacagaggggaaggaggagtccggaatgctaagtgccgtgtggggagctggtggccccggagcggggggcgccgctagaggacaacctagcaggaaagaactgctgctcaggcatcacctttggtctggccccaggtgcctgtcttttcccctgggttctttgccagctagtttgctaggattacccggagcaaccagccacaggagttgcctgtctcctaacctagcctcaggcctggccgctcgggggactcagacccaaagcgtcctgttcggagaggtgcgcctgcccttagatggcggagtcagaggcgccaggaagcgttcccttctgcgagcacaccccagaacaggcatcttgccaggccgctgcggcatggtgtggaaagacaagaagttacagcctagtggatgtcacgagaaggcaggaggggtgttttgcggtccatcacgagggggagtctag

SEQ ID NO: 335538 - DNA, 834 bp, Artificial Sequence
  derived and/or modified sequence
ccattctttcgagccagaggcttagaaggtgtggttgtggatggccaagtggaaacagccagggtctggcgtggtgaccgacctggcacagagggtaaagaggagtccggcatgctgtcggccgtgtggggagccggaggacccggtgcaggcggagcagctcggggtcaacctagccgaaaagaactcctgctacgccaccatctgtggtcaggtcctcgttgtctcagcttcccattggggtccctccccgcctccctgcttggcctgccaggtgctacaagccataggagctgcttgagcccaaacctggcctccggcctggcggcccgcgggacacaaacacagtctgtccttttcggcgaggtgcgcctgcccctggatggcggggtgagaggcgcacggaaacggatgaatttcgatcacttccagattctccgcgctatcggcaaaggtagcttcggtaaggtttctccccgggtcccgagaagaccacaggcgtcttgccgaactgctctttgccctccgggcgtgcattgtgcggaagccggccacggcgaagatgtgaggcacgaggtgcatgaacaggccgcagttcaccgagcgcgccgcggtccacagcgtctgcccggcgcaggcgatccggccggtgatcgagccaggttacccggtgaacctctggttctgctcccgggcagaggcggacatgtccacggacgcggacccgcaacgggacgaggccccgccctcccgccagcggcggaaagggctgtattaagaggtcacggggaggccgtgcatctgcgtgacggaaccgggagcggactgccatag

SEQ ID NO: 335539 - DNA, 1500 bp, Artificial Sequence
  derived and/or modified sequence
atgctgagcgccgtgtggggggccggtggtcctggggctggcggggcagcccgcggacagcccagtagaaaggagctgttactgcgacaccacctttggagcggaccaaggtgcctttcgttccctctcggaagcctcccggccagtttgctgggtctgcccggtgctacaagtcataggtcctgccttagtcccaacctggcaagtggtctggcagcccgggggacacagactcagtctgtgctgtttggcgaagtacgacttcctctggatggaggggttcgaggcgcaagaaagagaatgaactttgatcacttccagattctgcgagccatcggcaagggcagttttgggaaagtttgtatcgttcagaaaagagatactgagaagatgtatgctatgaaatacatgaacaagcaacagtgcattgagcgcgacgaagttaggaatgtgttccgggagctcgaaattcttcaggaaatcgaacacgtgttcctggtaaatctgtggtacagctttcaggacgaagaagacatgttcatggttgtggacctgctgctcggcggggatttgcgttatcacctccagcagaacgtgcagttttccgaagataccgtcagattatacatatgcgaaatggcattggctcttgattaccttcgaggacaacatatcattcatagagatgtcaaacccgataatattctgcttgatgaacgcggacacgctcatttaacagattttaacattgccacgatcatcaaagacggcgagcgcgctaccgccttggctggaactaagccctatatggcccccgaaatcttccactctttcgtaaacgggggtaccggatactcctttgaagtagactggtggtccgtgggcgtgatggcttacgagctccttcggggctggagaccatatgatatccattcttctaacgccgtggaaagtctggtgcaactcttctccaccgtgagcgtgcagtatgtgcctacctggtccaaagagatggtcgccctcctgcgaaaacttctgactgtgaacccagaacacaggctatcctccttgcaggatgtccaggcagcccctgcccttgctggtgttctttgggaccacctgtcggaaaaacgtgtagagccgggcttcgtgccaaataagggtcgtttacactgtgatcctactttcgagttggaagaaatgatcctggaaagccgacccctgcataagaaaaagaaacggctggctaagaacaagagccgcgacaatagcagagacagttctcagtcagagaacgactacttgcaggactgtctcgatgcgattcagcaggacttcgtcatttttaatcgggagaaactaaaacgtagccaggatctgccacgtgagccgcttcccgcccccgaaagtagagatgcagcagagccagtggaggatgaggctgagcgttcagccctacccatgtgcggaccgatttgcccatcagcggggagcggctag

SEQ ID NO: 335540 - DNA, 411 bp, Artificial Sequence
  derived and/or modified sequence
taggcccgagggctcgaaggggtggtggtagacggtcaggtcgagaccgccagggtttggcggggggatcgcccagggacggaaggtaaagaagagagcggcatgctgagcgctgtttggggcgctgggggccccggcgccgggggcgccgctaggggccagccctcccggaaggaattgctgttacgacatcatttgtggtccgggcctcgatgcctctcttttcctctgggcagcttgcctgcatcactgcttggcctgcctggcgccactagccatagatcttgtctctctccgaacttagcttctggactggctgcccggggcacccaaacacagtccgtgttgtttggagaagtccggctacccctagatggcggggtccggggggcccgaaagaggagatcatag

SEQ ID NO: 335541 - DNA, 537 bp, Artificial Sequence
  derived and/or modified sequence
tgaggactggagggcgtggtggtggatggccaggtggagacagcccgggtgtggaggggggacaggcctggaacagagggcaaggaggagagcggcatgctgtctgctgtgtggggcgctgggggccctggagctggaggagctgcccggggccagcccagcaggaaggagctgctgctgcggcaccacctgtggagcggcccccgctgcctgtccttccccctgggcagcctgcctgccagcctgctgggcctgcccggggccaccagccacaggagctgcctgagccccaacctggccagcggcctggccgcccggggcacccagacccagagcgtgctgtttggagaggtgcggctgcccctggatggaggagtgcggggggccaggaagaggagcctgctgcgggcccaccccaggacaggcatcctgcccggccgctgtggcatggtgtggaaggacaagaagctgcagcccagcggctgccacgagaaggccggcggcgtcttctgtggccccagccggggcggcgtgtag

SEQ ID NO: 335542 - DNA, 834 bp, Artificial Sequence
  derived and/or modified sequence
cccttcttccgggcccggggcctggagggcgtggtggtggatggccaggtggagacagcccgggtgtggaggggggaccggcccggcacagagggcaaggaggagagcggcatgctgtctgctgtgtggggcgccggcggccctggggccggcggggccgcccggggccagcccagcaggaaggagctgctgctgcggcaccacctgtggagcggcccccgctgcctgtccttccccctgggcagcctgcctgccagcctgctgggcctgcccggggccaccagccacaggagctgcctgagccccaacctggccagcggcctggccgcccggggcacccagacccagagcgtgctgtttggagaggtgcggctgcccctggatggcggcgtgcggggggccaggaagaggatgaactttgaccacttccagatcctgcgggccatcggcaagggcagctttgggaaggtgagcccccgggtgccccggcggccccaggccagctgcaggacagccctgtgccccccaggagtgcactgtgccgaggccggccatggagaagatgtgagacatgaggtgcatgagcaggccgctgtgcaccgggcccggcggggcccccagaggctgcccggggccggggaccctgctggggaccgggcccggctgcctggagagcccctggtgctgctgcccggccggggcggccacgtgcacggccggggccctgccaccggccggggccctgccctgcccccagctgctgagagagctgtgctgcggggccacggggaggccgtgcacctgagagatggcaccggcagcggcctgccctag

SEQ ID NO: 335543 - DNA, 1500 bp, Artificial Sequence
  derived and/or modified sequence
atgctgtctgctgtgtggggcgctgggggccctggagctggaggagctgcccggggccagcccagcaggaaggagctgctgctgcggcaccacctgtggagcggcccccgctgcctgtccttccccctgggcagcctgcctgccagcctgctgggcctgcccggggccaccagccacaggagctgcctgagccccaacctggccagcggcctggccgcccggggcacccagacccagagcgtgctgtttggagaggtgcggctgcccctggatggaggagtgcggggggccaggaagaggatgaactttgaccacttccagatcctgcgggccatcggcaagggcagctttgggaaggtgtgcatcgtgcagaagagggacacagagaagatgtatgccatgaagtacatgaacaagcagcagtgcatcgagagagatgaggtgagaaatgtgttccgggagctggagatcctgcaggagattgaacatgtgttcctggtgaacctgtggtacagcttccaggatgaggaggacatgttcatggtggtggacctgctgctgggcggggacctgcgctaccacctgcagcagaatgtgcagttctctgaagatactgtgcggctgtacatctgtgagatggccctggccctggactacctgcggggccagcacatcatccacagagatgtgaagccagacaacatcctgctggatgagcggggccacgcccacctgacagacttcaacatcgccaccatcatcaaggatggagagcgggccacagccctggccggcaccaagccctacatggcccctgagatcttccacagctttgtgaatggaggcaccggctacagctttgaggtggactggtggagcgtgggcgtgatggcctatgagctgctgcggggctggaggccctatgacatccacagcagcaatgctgtggagagcctggtgcagctgttcagcacagtgtctgtgcagtatgtgcccacctggagcaaggagatggtggccctgctgaggaagctgctgactgtgaaccctgagcaccggctgagcagcctgcaggatgtgcaggccgccccagccctggccggcgtgctgtgggaccacctgtctgagaagagggtggagcccggctttgtgcccaacaagggccgcctgcactgtgaccccacctttgagctggaggagatgatcctggagagccggcccctgcacaagaagaagaagaggctggccaagaacaagagccgggacaacagccgggacagcagccagagtgaaaatgactacctgcaggactgcctggatgccatccagcaggactttgtgatcttcaaccgggagaagctgaagaggagccaggacctgccccgggagcccctgcctgcccctgagagcagagatgctgctgagcctgtggaggatgaagctgagaggtctgccctgcccatgtgtggccccatctgccccagcgctggcagcggctag

SEQ ID NO: 335544 - DNA, 411 bp, Artificial Sequence
  derived and/or modified sequence
tgagcccggggcctggagggcgtggtggtggatggccaggtggagacagcccgggtgtggaggggggacaggcctggaacagagggcaaggaggagagcggcatgctgtctgctgtgtggggcgctgggggccctggagctggaggagctgcccggggccagcccagcaggaaggagctgctgctgcggcaccacctgtggagcggcccccgctgcctgtccttccccctgggcagcctgcctgccagcctgctgggcctgcccggggccaccagccacaggagctgcctgagccccaacctggccagcggcctggccgcccggggcacccagacccagagcgtgctgtttggagaggtgcggctgcccctggatggaggagtgcggggggccaggaagaggaggagctag

SEQ ID NO: 335545 - DNA, 537 bp, Artificial Sequence
  derived and/or modified sequence
tgaggcctggagggcgtggtggtggacggccaggtggagaccgccagggtctggcggggggatcgtccgggcacagaaggcaaagaggaaagcggcatgctctccgctgtctggggtgctggcggaccaggagcaggaggggccgccagggggcagccttcacgcaaggaactgctgctcagacatcatctttggtccggcccacgttgcttgtccttccccctcggttctctgcccgccagcctcctcggccttcccggggccaccagtcacagatcttgtctgtctcccaatcttgccagcggtttagctgcgcggggcacacagacacaatcagttctgtttggtgaggttaggttgcctcttgatggcggggtgaggggcgccaggaaacgaagcctgctcagggcgcatccccgtacgggaatcttgccaggacggtgtggtatggtgtggaaggacaaaaagctccagccatccggttgccatgagaaagctgggggagtcttctgcggtcccagcagaggcggagtgtag

SEQ ID NO: 335546 - DNA, 834 bp, Artificial Sequence
  derived and/or modified sequence
cccttcttccgggcccggggcctggagggcgtggtggtggacggccaggttgaaacagcccgggtatggcggggggatcggccaggtacagaagggaaagaggaatccggcatgctttccgctgtatggggcgcaggaggtccgggagccggcggagctgcccgcggacagccatcccggaaagagctcttattgcgccatcacctgtggtccgggcctcgttgtttgtcattccccttgggaagcctgcccgccagtctgctaggccttcccggtgccacctctcataggagctgcctttcaccaaacttggcatccggactcgctgcccgtggtacgcagactcagtccgtgctttttggagaggtgcggttgcctctagatggcggcgtccgtggcgccaggaagcgaatgaatttcgatcatttccagattctcagagccatcggcaagggtagcttcgggaaagtgtctcctcgcgtgcctcggcgtccccaggcgagctgccgtacagccctgtgcccgcctggggtccattgtgccgaggctggccatggcgaagacgtgcggcatgaggtccacgaacaggccgctgtgcaccgggctcgcaggggaccccagcgactccccggtgccggggaccccgcaggcgatcgggcccgactccctggggagcccttggtgctgctgcccggacgcggaggtcacgtgcacgggcgggggcctgcgaccggccgaggcccggcgttgcctcccgccgccgagcgcgcggtgctacgaggacacggagaagctgtacatcttcgtgatgggacgggttctgggcttccatag

SEQ ID NO: 335547 - DNA, 1500 bp, Artificial Sequence
  derived and/or modified sequence
atgctgagcgccgtgtggggcgccggcggccccggcgccggcggcgcagcgcggggccagcccagccggaaagagttgctcttacgtcaccatctgtggagcgggcctagatgtctgagtttcccattaggatctctgcccgcatctcttctgggcttgccaggcgccacatcccaccggtcatgtttatcgcccaacttggcatctgggttagccgcccggggcacgcaaacccaatccgtattatttggtgaggttaggctgccactcgacggaggagtcaggggggcacggaaacggatgaactttgatcacttccagatcctccgcgcaatcggtaaggggagtttcggtaaggtgtgcattgtgcagaagagagacacggagaagatgtacgctatgaaatatatgaacaaacaacaatgcatcgaaagagacgaggttagaaatgtcttcagggaactggagatactgcaggaaatcgagcatgtattccttgtgaatctatggtactcctttcaggacgaggaagatatgtttatggtcgtggacctactgcttggcggagatctgcgataccatttgcaacagaacgtgcagttttcagaagataccgtccgcctctacatttgcgagatggccttagcattggattacctccggggtcagcacatcatccatagagacgtgaagccggataacattctgctggacgagcgtggtcatgcacatcttactgatttcaacattgctacaatcatcaaggatggggaacgggctaccgcactggcgggaaccaaaccatatatggcccctgagatatttcacagctttgtaaacgggggaacaggatactctttcgaagttgactggtggtcggtgggcgtgatggcatacgaactgctgagaggctggagaccatatgacatacactcttccaacgccgtcgaaagtctggtgcagctgttcagtactgtgtccgtgcagtatgtgcctacttggtccaaggagatggtcgcactgttgaggaagctgctgactgtgaatccggagcatcgtctttcctcactccaggacgtgcaggctgcaccagcactagctggcgtgctctgggaccatctcagcgagaaaagggtcgaacctggcttcgtccctaacaagggcagactccactgcgatcccactttcgagctagaagagatgatcctggaaagccgccccctgcataaaaagaaaaagcgcctcgcgaagaataagagtagggacaacagcagagactcaagccagtctgagaacgactacctgcaggactgtctggacgcaatccagcaggattttgtcatcttcaaccgcgagaaactgaaacgaagccaggaccttccccgcgaacccctcccagctcctgagtctagagacgctgcagagcctgtggaggatgaggctgagaggtcagccctccccatgtgcggtccgatttgcccgtcagctggaagtggctag

SEQ ID NO: 335548 - DNA, 411 bp, Artificial Sequence
  derived and/or modified sequence
tgagcccggggcctggagggcgtggtggtggacggccaggtggagacagcccgggtgtggcgcggcgatcgacctggaacagaaggcaaggaggagagcggaatgcttagcgccgtctggggagcaggtggccccggagccggaggggctgcaagggggcagccctctcggaaagagctattactcagacaccacctctggtctgggcccaggtgcctctcttttccacttgggtcactgccggccagtctgctgggtctaccgggtgccacttcccatcgttcttgcctgagtccgaaccttgcttccggtctcgctgcacggggtacacagacgcaatcagtgctgtttggcgaagtacgattgccattagatggcggggtcagaggggcacgcaaaagacgtagttag

SEQ ID NO: 335549 - DNA, 537 bp, Artificial Sequence
  derived and/or modified sequence
tgaggtctggagggcgtggtggtcgacggacaggtagagacagctcgcgtgtggcgaggcgacagacctggaacagaaggcaaggaagagtcgggcatgctaagcgccgtgtggggcgctgggggaccgggagccggaggtgcagctagaggtcagccctctcgcaaagagctgcttctgcgacatcacctctggtctggacctagatgtctgagctttcctctgggttccctgcctgcgtctcttttaggcttgcccggagccacatctcacagatcctgcctttcccccaacttggcaagcggactcgctgcccgtgggacacaaactcagtcagtcctgttcggagaagtccgccttccactggacggaggagttcgcggagctagaaaacggtctttgctgagagctcatccaaggacaggaatcctacccggtcgctgtggaatggtttggaaagacaaaaaactgcagccttcaggctgccatgagaaagcaggaggggtcttctgcgggccttccagggggggagtgtag

SEQ ID NO: 335550 - DNA, 834 bp, Artificial Sequence
  derived and/or modified sequence
cctttttttcgcgctagaggtctggagggcgtggtggttgacgggcaagtggaaacagcaagagtgtggaggggcgatcgacctgggaccgaaggtaaggaggaaagcggaatgttaagtgccgtgtggggagccggtggacctggggcagggggagcagcgcgaggccagccttcacgcaaggagctgctcttgcgccaccatctctggtctggccctcgttgcttgagcttccctctaggctctcttccagcttcccttctcggccttcctggggcaacttcacacagatcgtgtctgtcccccaacctggcgtcagggctcgccgctagaggcacccagacccagtctgtcttatttggggaggttcggctgcccctagatggcggtgtgagaggtgcgaggaaaagaatgaattttgatcactttcagattctgcgcgcaattgggaaggggagcttcggcaaggttagtcccagggtcccaagacgcccacaagcttcctgtcggactgcgctttgtcctccgggtgtgcattgtgccgaagctggccacggcgaagatgttcgtcatgaagtgcatgaacaagcggctgtgcacagagctcgcaggggaccccagcgcctacccggagctggggaccccgctggtgatagggcccgtctccctggagaacccctggtgcttctgcccggacgcggaggtcacgtccacgggagaggcccagccaccggacggggtccagcactgccccctgccgctgaacgggcagtgctgcgcggacacggagaagccgtgcacctgcgggatggtactggctcaggacttccttag

SEQ ID NO: 335551 - DNA, 1500 bp, Artificial Sequence
  derived and/or modified sequence
atgctgagtgccgtgtggggcgcagggggacccggtgccggaggggcagccagggggcaaccttccagaaaggagcttctcctgcgtcaccatctatggagcggccctcgctgtctctcattccctcttggcagcctgccagccagcctccttgggctgcctggagccacaagtcatcgtagttgcctgagtcccaacctggcctccggcctggctgcaagagggacccaaacccagagcgtcctcttcggcgaggtgcggctgcctctcgacggcggtgtccgcggtgccaggaaacgaatgaattttgaccacttccagatactgagagccatagggaagggctcgttcggcaaagtttgtattgtgcagaaacgcgatactgaaaagatgtatgcaatgaagtacatgaacaaacagcagtgcatcgagagagatgaagtccggaatgtttttagagagctggagatcctgcaggagattgagcatgtcttcttggtcaacctgtggtatagtttccaggatgaagaggacatgtttatggtggtggatctgttgttaggaggtgacctccgctatcatttacaacagaacgtgcagttcagtgaggacactgtgaggctgtatatctgtgaaatggcactggcactcgattaccttcggggtcagcatatcattcacagagatgtaaagcctgacaatatactgctggacgagcgcggtcatgcacatctcaccgacttcaacattgccactattattaaggacggagagcgcgctactgctctcgccggaaccaagccctacatggcccctgaaatcttccactccttcgtgaatgggggtactggatactcttttgaagtggactggtggagtgtgggtgttatggcctatgagctcctcagaggatggaggccatatgatattcactcgagtaatgctgtggaatccttagttcagttgttttccaccgtgtctgtccagtatgttcccacttggagcaaagagatggttgccttgctcagaaagctcttaacagtgaatccagagcacagactaagctcgcttcaagacgttcaggccgctcccgctttagccggtgtgctgtgggaccacctgtctgagaaacgagtggagcctgggttcgtgccgaacaaaggcagactgcattgcgatcctacctttgagctagaggagatgatactggaaagtcggccacttcacaagaagaaaaagagactcgccaagaacaagtctcgggataactcccgggacagttcccaaagcgagaatgattatctccaagattgtttggacgccatccagcaggatttcgtgatatttaacagggaaaagcttaaacgctcacaagacttgccgcgagagcccctgcctgctcctgaaagcagagacgccgctgagccggttgaggatgaggcagaacgaagcgctctccctatgtgcggacctatttgcccctctgctggctccggatag

SEQ ID NO: 335552 - DNA, 411 bp, Artificial Sequence
  derived and/or modified sequence
taggctcggggtctcgaaggagtggttgtggacggtcaggttgagacagcaagagtgtggcggggtgaccgccctggtacagagggtaaggaagaaagcggaatgctgtctgcagtttggggagctggaggccctggggctggcggagccgcacgagggcagccctccaggaaggagctgctgttacgccatcatctgtggtcgggtccgagatgtctgtcattccctctggggtcgctgcccgcatccctcctggggcttcctggagccactagccacaggtcatgtctgtcacccaatctggctagcggcctcgccgctcgagggactcagactcagtcagtactgttcggcgaggttaggttgccccttgacggaggggtacggggagcgaggaaacggaggtcgtag

SEQ ID NO: 335553 - DNA, 733 bp, Artificial Sequence
  derived and/or modified sequence
gcggccttgaaggggtggtggtcgacgggcaagtagagaccgcgagggtctggaggggcgaccggcctggcacagaggggaaggaagagagcgggatgctaagtgccgtctggggagccggagggcccggggcgggcggggctgctcgaggacagccgagcagaaaagaattgctgctgaggcaccacctttggagcggtcctcgctgcctgtccttcccgctgggctcactccccgcgtctctcctggggcttcctggagccacttcccacaggagctgcttgtccccaaatcttgcctcaggacttgctgccaggggaacgcagactcagagcgtcctctttggagaagtaaggctgcctctggacggaggagtgaggggggcgaggaaacgcagtcttctgagagcacaccccaggactgggattttgccaggaagatgtggaatggtgtggaaagacaagaagctgcagccttcaggctgccatgaaaaagctgggggtgtgttctgtggcccatcaagagggggtgtgtaatgaattgttaatgaatttctcagatgagccaaagtggtgaacttgtctcagtacccagggagactcagactcatccccagctcttggcctccattttcccagctgctgtgattggagtgggtccctggaattcatatgctggaaatttggtccaggtgtgggtgtgttgggaggtggggtttaaggtgtggttaggc

SEQ ID NO: 335554 - DNA, 2010 bp, Artificial Sequence
  derived and/or modified sequence
gtactttgcagttagagaggcgctcacctgtgccgcccgagtgcgagtgaggctcctgccccacaggtggcggggcccggccgctcagaggctcagtctccttggtgaccgcgcggtgtccatcctctgctcacccatgtgcgctggaggcagggccaggccgttgtgcaaagacctgccctgccaggaacgagtgcgctgctgagtcctgtagataaagccgccaaccccggggactggtgtctcctgagtgaccgtgcagccgtgggcgccatagaaagcagagaaggcagtgaacttcgaccacttccagatccttcgggccattgggaagggcagctttggcaaggtgtgcattgtgcagaagcgggacacggagaagatgtacgccatgaagtacatgaacaagcagcagtgcatcgagcgcgacgaggtccgcaacgtcttccgggagctggagatcctgcaggagatcgagcacgtcttcctggtgaacctctggtactccttccaggacgaggaggacatgttcatggtcgtggacctgctactgggcggggacctgcgctaccacctgcagcagaacgtgcagttctccgaggacacggtgaggctgtacatctgcgagatggcactggctctggactacctgcgcggccagcacatcatccacagagatgtcaagcctgacaacattctcctggatgagagaggacatgcacacctgaccgacttcaacattgccaccatcatcaaggacggggagcgggcgacggcattagcaggcaccaagccgtacatggctccggagatcttccactcttttgtcaacggcgggaccggctactccttcgaggtggactggtggtcggtgggggtgatggcctatgagctgctgcgaggatggaggccctatgacatccactccagcaacgccgtggagtccctggtgcagctgttcagcaccgtgagcgtccagtatgtccccacgtggtccaaggagatggtggccttgctgcggaagctcctcactgtgaaccccgagcaccggctctccagcctccaggacgtgcaggcagccccggcgctggccggcgtgctgtgggaccacctgagcgagaagagggtggagccgggcttcgtgcccaacaaaggccgtctgcactgcgaccccacctttgagctggaggagatgatcctggagtccaggcccctgcacaagaagaagaagcgtctggccaagaacaagtcccgggacaacagcagggacagctcccagtccgagaatgactatcttcaagactgcctcgatgccatccagcaagacttcgtgatttttaacagagaaaagctgaagaggagccaggacctcccgagggagcctctccccgcccctgagtccagggatgctgcggagcctgtggaggacgaggcggaacgctccgccctgcccatgtgcggccccatttgcccctcggccgggagcggctaggccgggacgcccgtggtcctcaccccttgagctgctttggagactcggctgccagagggagggccatgggccgaggcctggcattcacgttcccacccagcctggctggcggtgcccacagtgccccggacacatttcacacctcaggctcgtggtggtgcaggggacaagaggctgtgggtgcaggggacacctgtggagggcatttcccgtgggcccccgagacccgcctagatggaggaagcgctgctgggcgccctcttaccgctcacggggagctggggccatggatgggacaggagtctttgtccctgctcagcccggaggctgtgcacggccctcgtcacaaggtgacccttgcagcacaggccgcgggtgccccaggctcggctcaggtcttggaggtcaagggcatgggttggggtagtgggtggggaggtgaatgttttctagagattcaaactgctccagcaatttctgtagttttcacctctgagaattacaatgtgagaaccgct

SEQ ID NO: 335555 - DNA, 1980 bp, Artificial Sequence
  derived and/or modified sequence
aaggggtggtggtcgacgggcaagtagagaccgcgagggtctggaggggcgaccggcctggcacagaggggaaggaagagagcgggatgctaagtgccgtctggggagccggagggcccggggcgggcggggctgctcgaggacagccgagcagaaaagaattgctgctgaggcaccacctttggagcggtcctcgctgcctgtccttcccgctgggctcactccccgcgtctctcctggggcttcctggagccacttcccacaggagctgcttgtccccaaatcttgcctcaggacttgctgccaggggaacgcagactcagagcgtcctctttggagaagtaaggctgcctctggacggaggagtgaggggggcgaggaaacgcatgaacttcgaccacttccagatccttcgggccattgggaagggcagctttggcaaggtgtgcattgtgcagaagcgggacacggagaagatgtacgccatgaagtacatgaacaagcagcagtgcatcgagcgcgacgaggtccgcaacgtcttccgggagctggagatcctgcaggagatcgagcacgtcttcctggtgaacctctggtactccttccaggacgaggaggacatgttcatggtcgtggacctgctactgggcggggacctgcgctaccacctgcagcagaacgtgcagttctccgaggacacggtgaggctgtacatctgcgagatggcactggctctggactacctgcgcggccagcacatcatccacagagatgtcaagcctgacaacattctcctggatgagagaggacatgcacacctgaccgacttcaacattgccaccatcatcaaggacggggagcgggcgacggcattagcaggcaccaagccgtacatggctccggagatcttccactcttttgtcaacggcgggaccggctactccttcgaggtggactggtggtcggtgggggtgatggcctatgagctgctgcgaggatggaggccctatgacatccactccagcaacgccgtggagtccctggtgcagctgttcagcaccgtgagcgtccagtatgtccccacgtggtccaaggagatggtggccttgctgcggaagctcctcactgtgaaccccgagcaccggctctccagcctccaggacgtgcaggcagccccggcgctggccggcgtgctgtgggaccacctgagcgagaagagggtggagccgggcttcgtgcccaacaaaggccgtctgcactgcgaccccacctttgagctggaggagatgatcctggagtccaggcccctgcacaagaagaagaagcgtctggccaagaacaagtcccgggacaacagcagggacagctcccagtccgagaatgactatcttcaagactgcctcgatgccatccagcaagacttcgtgatttttaacagagaaaagctgaagaggagccaggacctcccgagggagcctctccccgcccctgagtccagggatgctgcggagcctgtggaggacgaggcggaacgctccgccctgcccatgtgcggccccatttgcccctcggccgggagcggctaggccgggacgcccgtggtcctcaccccttgagctgctttggagactcggctgccagagggagggccatgggccgaggcctggcattcacgttcccacccagcctggctggcggtgcccacagtgccccggacacatttcacacctcaggctcgtggtggtgcaggggacaagaggctgtgggtgcaggggacacctgtggagggcatttcccgtgggcccccgagacccgcctagatggaggaagcgctgctgggcgccctcttaccgctcacggggagctggggccatggatgggacaggagtctttgtccctgctcagcccggaggctgtgcacggccctcgtcacaaggtgacccttgcagcacaggccgcgggtgccccaggctcggctca

SEQ ID NO: 335556 - DNA, 607 bp, Artificial Sequence
  derived and/or modified sequence
gcgcccgcggccttgaaggggtggtggtcgacgggcaagtagagaccgcgagggtctggaggggcgaccggcctggcacagaggggaaggaagagagcgggatgctaagtgccgtctggggagccggagggcccggggcgggcggggctgctcgaggacagccgagcagaaaagaattgctgctgaggcaccacctttggagcggtcctcgctgcctgtccttcccgctgggctcactccccgcgtctctcctggggcttcctggagccacttcccacaggagctgcttgtccccaaatcttgcctcaggacttgctgccaggggaacgcagactcagagcgtcctctttggagaagtaaggctgcctctggacggaggagtgaggggggcgaggaaacgcagaagctgaaagcacaaccagtaccttctcaggagcgtggggaggccagccacccgggcagagcaaggagagaatgaggagtgacatgggtgttgccgtgagtggcgaaggggatggaagatttcagcacgatgctatttctaacaagtttcagcattccagtatctcttttcacaaataaaacatttactaaccatttgagcgta

SEQ ID NO: 335557 - DNA, 1110 bp, Artificial Sequence
  derived and/or modified sequence
atgtacgccatgaagtacatgaacaagcagcagtgcatcgagagagacgaggtgagaaacgtgttcagagagctggagatcctgcaggagatcgagcacgtgttcctggtgaacctgtggtacagcttccaggacgaggaggacatgttcatggtggtggacctgctgctgggcggcgacctgagataccacctgcagcagaacgtgcagttcagcgaggacaccgtgagactgtacatctgcgagatggccctggccctggactacctgagaggccagcacatcatccacagagacgtgaagcccgacaacatcctgctggacgagagaggccacgcccacctgaccgacttcaacatcgccaccatcatcaaggacggcgagagagccaccgccctggccggcaccaagccctacatggcccccgagatcttccacagcttcgtgaacggcggcaccggctacagcttcgaggtggactggtggagcgtgggcgtgatggcctacgagctgctgagaggctggagaccctacgacatccacagcagcaacgccgtggagagcctggtgcagctgttcagcaccgtgagcgtgcagtacgtgcccacctggagcaaggagatggtggccctgctgagaaagctgctgaccgtgaaccccgagcacagactgagcagcctgcaggacgtgcaggccgcccccgccctggccggcgtgctgtgggaccacctgagcgagaagagagtggagcccggcttcgtgcccaacaagggcagactgcactgcgaccccaccttcgagctggaggagatgatcctggagagcagacccctgcacaagaagaagaagagactggccaagaacaagagcagagacaacagcagagacagcagccagagcgagaacgactacctgcaggactgcctggacgccatccagcaggacttcgtgatcttcaacagagagaagctgaagagaagccaggacctgcccagagagcccctgcccgcccccgagagcagagacgccgccgagcccgtggaggacgaggccgagagaagcgccctgcccatgtgcggccccatctgccccagcgccggcagcggctag

SEQ ID NO: 335558 - DNA, 1110 bp, Artificial Sequence
  derived and/or modified sequence
atgtacgctatgaagtatatgaataagcagcagtgtattgaaagggatgaagtgaggaatgtatttcgggaattggagatattgcaagaaatagagcatgtgtttcttgtaaacctatggtattctttccaggatgaggaagatatgtttatggttgtagatctgctgttggggggagatctgcgctaccatctgcagcaaaatgtgcagttttccgaggatacagtgcgcctgtatatctgtgaaatggccctggcccttgattacttgagaggtcagcacatcatccatagggatgttaaaccggataatattctcttagacgaacgagggcacgctcaccttactgattttaatatagctaccataatcaaagacggcgagcgggccactgctctggcagggacaaagccatatatggctcccgagatctttcactccttcgtcaacggagggacaggctactctttcgaagtggactggtggagcgtcggcgtgatggcctacgagctcctgcggggatggcgtccctacgacatccattcatctaatgcggtcgagagtcttgtgcaactcttctctaccgtgtccgtgcaatacgtcccaacttggtcaaaggagatggtggcgctacttcgaaagctgctgacggtgaacccagagcaccgcctctctagtctgcaggacgtgcaagcagctcctgcgttggcaggcgtgttgtgggatcacctatccgagaaacgcgtggaacccggattcgtgcctaacaagggaagactacattgcgaccccacatttgagctcgaggagatgattctggagagccggccgctgcacaaaaaaaaaaaaagactggcaaagaacaagagtagagataattcacgtgactccagtcaatctgagaatgattacctccaggattgccttgacgcgattcagcaagattttgtgatttttaatcgagagaagctcaaaaggtcccaggacttgccccgcgaacctctgccggccccggagtcgcgagacgccgctgaaccagtggaagatgaagctgaaaggtctgcacttcctatgtgtggtcccatctgtccaagcgccgggtctggctag

SEQ ID NO: 335559 - DNA, 1110 bp, Artificial Sequence
  derived and/or modified sequence
atgtatgccatgaagtacatgaacaagcagcagtgcatcgagagagatgaggtgagaaatgtgttccgggagctggagatcctgcaggagattgaacatgtgttcctggtgaacctgtggtacagcttccaggatgaggaggacatgttcatggtggtggacctgctgctgggcggggacctgcgctaccacctgcagcagaatgtgcagttctctgaagatactgtgcggctgtacatctgtgagatggccctggccctggactacctgcggggccagcacatcatccacagagatgtgaagccagacaacatcctgctggatgagcggggccacgcccacctgacagacttcaacatcgccaccatcatcaaggatggagagcgggccacagccctggccggcaccaagccctacatggcccctgagatcttccacagctttgtgaatggaggcaccggctacagctttgaggtggactggtggagcgtgggcgtgatggcctatgagctgctgcggggctggaggccctatgacatccacagcagcaatgctgtggagagcctggtgcagctgttcagcacagtgtctgtgcagtatgtgcccacctggagcaaggagatggtggccctgctgaggaagctgctgactgtgaaccctgagcaccggctgagcagcctgcaggatgtgcaggccgccccagccctggccggcgtgctgtgggaccacctgtctgagaagagggtggagcccggctttgtgcccaacaagggccgcctgcactgtgaccccacctttgagctggaggagatgatcctggagagccggcccctgcacaagaagaagaagaggctggccaagaacaagagccgggacaacagccgggacagcagccagagtgaaaatgactacctgcaggactgcctggatgccatccagcaggactttgtgatcttcaaccgggagaagctgaagaggagccaggacctgccccgggagcccctgcctgcccctgagagcagagatgctgctgagcctgtggaggatgaagctgagaggtctgccctgcccatgtgtggccccatctgccccagcgctggcagcggctag

SEQ ID NO: 335560 - DNA, 1110 bp, Artificial Sequence
  derived and/or modified sequence
atgtacgccatgaagtacatgaacaagcagcagtgcatcgagcgggacgaggtccgcaatgtcttccgagagctggagattcttcaagagatcgagcacgtgttccttgtcaacctatggtactcttttcaagatgaagaagacatgtttatggtggtggacctcctcttgggtggggatctaagatatcatttacagcagaacgtgcaattttcagaggataccgttcgtctatatatttgcgagatggccctagccttggattacttgagaggccagcacatcatccaccgggatgtgaaaccggacaacatcctgctggatgaacggggccatgcgcacctgacagattttaacatcgccaccatcattaaagacggcgagagggctaccgccctggcagggacgaagccatacatggcccccgaaattttccactcttttgtgaacggaggcacagggtactctttcgaagttgactggtggtcagtaggggtaatggcgtacgagctgctccgcgggtggcgaccatacgacattcatagtagcaacgccgttgagtctttggttcagctgttctctacggtgtccgttcaatacgtgcctacctggagtaaggaaatggttgccttgttacggaagctgctaaccgtgaatcccgaacatagactctcatctttgcaggacgtccaggctgctcccgcgttggccggcgtgctgtgggaccatttatctgaaaagcgagtggaaccaggctttgtgcccaacaaagggaggctacattgtgaccctacctttgagttggaagagatgattctggagtcccgtccgctgcataaaaaaaagaaaagactagcgaagaacaagagcagggacaatagccgcgacagctctcagtccgagaacgattacctgcaggactgcctcgatgccatccagcaggatttcgttatatttaatagagaaaagttgaaacggagtcaggatctgcctcgcgaaccgcttccagcacccgagtcccgggacgcggccgagccggtggaagatgaggcagaacgctcggctctgccaatgtgtgggccgatctgtccgagcgctggatcagggtag

SEQ ID NO: 335561 - DNA, 1110 bp, Artificial Sequence
  derived and/or modified sequence
atgtatgcaatgaagtatatgaacaagcagcagtgtattgaaagggatgaagtgcgaaatgtcttccgcgagctggaaatcctccaggaaatagagcacgtgttcctggtcaatctgtggtattcttttcaggacgaggaggatatgttcatggtggtagacctcctgctggggggagatctccggtaccacctccagcagaatgtccagttttccgaggataccgtacgcctgtatatttgcgagatggctctggccttggactatttgagaggccaacacattatccatagagacgttaaacccgacaatattttgctagacgagcggggacacgcccatctgactgacttcaacatcgctactatcataaaagatggagagagggccaccgcactggccggtacgaaaccttacatggccccagagatcttccatagctttgtcaatggtgggacaggatactcattcgaggttgattggtggagcgtgggcgtgatggcctatgaactgttaagaggttggcgtccatacgatattcactctagcaacgcagtggaatcacttgtgcagctgttcagcaccgtgtctgtgcagtatgtgccaacatggtccaaggagatggtggcccttctaaggaaactcctgacagtgaatccagagcacagactcagctcgctgcaggacgtgcaagcagccccagctttggccggagtactgtgggaccacctttcagaaaaaagagtggagcctgggttcgttcccaataagggaagactccattgtgaccccacgtttgaacttgaggagatgattcttgaatcacgcccactccacaagaaaaagaagcgcctggccaagaataaatcccgcgataactcacgggacagttctcagtctgagaacgattacctccaagactgtttagacgcgatccaacaggactttgtcatattcaaccgggaaaagttaaagcgctcccaggatttgccaagggagcccctccccgctcccgagtcccgcgacgccgctgaaccagtcgaggatgaagccgagcgctccgccctcccgatgtgcggccctatttgtccaagcgccggaagcggctag

SEQ ID NO: 335562 - DNA, 1980 bp, Artificial Sequence
  derived and/or modified sequence
atttggatccgttcagctcccgcggagaagcgagaccggatcaccgacgtgggcagaggactaccgagggccagcagaaattctgccccttcttcccgcgagtgctttcccgctctccaaaccccactcccaggtggccatggcctcatcgaccactcggggccccagggtttctgacttattttctgggctgccgccggcggtcacaactcccgccaaccagagcgcagaggcctcggcgggcaacgggtcggtggctggcgcggacgctccagccgtcacgcccttccagagcctgcagctggtgcatcagctgaaggggctgatcgtgctgctctacagcgtcgtggtggtcgtggggctggtgggcaactgcctgctggtgctggtgatcgcgcgggtgcgccggctgcacaacgtgacgaacttcctcatcggcaacctggccttgtccgacgtgctcatgtgcaccgcctgcgtgccgctcacgctggcctatgccttcgagccacgcggctgggtgttcggcggcggcctgtgccacctggtcttcttcctgcagccggtcaccgtctatgtgtcggtgttcacgctcaccaccatcgcagtggaccgctacgtcgtgctggtgcacccgctgaggcggcgcatctcgctgcgcctcagcgcctacgctgtgctggccatctgggcgctgtccgcggtgctggcgctgcccgccgccgtgcacacctatcacgtggagctcaagccgcacgacgtgcgcctctgcgaggagttctggggctcccaggagcgccagcgccagctctacgcctgggggctgctgctggtcacctacctgctccctctgctggtcatcctcctgtcttacgtccgggtgtcagtgaagctccgcaaccgcgtggtgccgggctgcgtgacccagagccaggccgactgggaccgcgctcggcgccggcgcaccttctgcttgctggtggtgatcgtggtggtgttcgccgtctgctggctgccgctgcacgtcttcaacctgctgcgggacctcgacccccacgccatcgacccttacgcctttgggctggtgcagctgctctgccactggctcgccatgagttcggcctgctacaaccccttcatctacgcctggctgcacgacagcttccgcgaggagctgcgcaaactgttggtcgcttggccccgcaagatagccccccatggccagaatatgaccgtcagcgtggtcatctgatgccacttagccaggccttggtcaaggagctccacttcaactggcctcctagggcaccactcgaggtcaatctggtgcttattctcagcaccagagctagctaagccaacatagggcaacatttccagcccagccctcttgtccggctgtctgtcttgtccttgtgtgtttgtaaaatgttaagcgggctttggtgagagtcttgctctttgcttgggggaggccaaagagagggaagaggatttcttatttcttctttatgcccttgaaggacaaacaaaactttttctccacgttcagaaaagtatttcagaaccacgattgccttcctggcgtcccctcctcctgctcgttggtgaaatgaacaatatgaatgggatttaaaaggaatgcattgggcttggtaaagattttcagtttgcctttagaaaaaggacccagctgagagtaccatgatattgcttagtccatttgaacccttgcattcctagaatttcaggtaaatatgtattaaaactctacatctaggatttcagcatttcctgagtaagacctttatatgccaaaagggtttcgttttaaaaccacttgagtttatagtacaaaaacacctacaagctccctttagaaaggtcttgctattgtttctcccctttcctccccaactactatttaaaaatgatgagacgaattagtcaatgaagagatagataaataaagaggaaaag

SEQ ID NO: 335563 - DNA, 1647 bp, Artificial Sequence
  derived and/or modified sequence
tcactccctgagagcgaagatgcaatgacgggtgacactgacaagtatctagggccacaggaccttaaggaactgggggatgacagcctgcccgctgagggatatatgggatttagtttgggtgccagatctgccagcctcaggtccttctcctctgacagatcatataccctgaatcgcagcagctacgcccgtgacagcatgatgatcgaggagctcctcgtaccttctaaagagcaacacctgacctttactcgggagtttgattccgacagcctaaggcactactcgtgggccgcagatacacttgacaacgtgaatctagtgagctcgccgatacattctggattcctggtttccttcatggttgacgcacgcggcgggagtatgagaggttcccggcatcacggaatgcggataatcattcctcctaggaagtgcactgctcctacacgcataacatgccgacttgttaagcggcataaacttgctaaccctcctccaatggtcgaaggggaaggccttgcttctcgcctggtcgaaatgggccctgccggagcacaatttctggggcccgtgatcgttgaaatccctcatttcgggagcatgcgaggcaaagagcgcgagcttattgtgttgagaagcgaaaacggcgagacctggaaggaacatcagtttgattcaaagaatgaggatctgaccgagctgcttaatggtatggacgaagagctggactcgccggaggaactggggaaaaagcgtatatgccgcattattaccaaggacttcccgcagtattttgcagtcgttagtcgtatcaaacaggaatcaaaccagattggccctgaagggggtattctttcgtcgacaacagtaccattggtgcaggccagctttcccgagggggctctcaccaaaagaataagggttggcctgcaggcacagccagtgccggatgaaatcgtaaaaaaaatattgggcaacaaggctacattttcgccaatcgtgactgtggagccacggcgtaggaagtttcataagcctataacgatgacaatccctgtgcctcctccttccggcgagggagtgtccaacggctacaagggggacaccaccccgaacctaaggctgctgtgcagcataacaggggggaccagccccgcgcaatgggaggatattactggaacaactccgctaacctttatcaaggattgcgtatcgttcacaaccaacgtttcagccaggttctggttggccgactgccaccaggtgctagagaccgtcggtctggctactcagttatatcgcgaactgatctgtgtcccctatatggccaagttcgtagtgtttgcaaagatgaatgaccctgttgagagctctctccggtgtttctgcatgaccgatgataaagtcgataaaacacttgagcagcaggaaaacttcgaggaagtagcccgaagcaaagacattgaagtcctggaggggaaacccatctacgtggattgttatggcaacctcgcacccctgactaaagggggccagcagctcgtgttcaatttttacagtttcaaggaaaaccgcctgcctttcagcatcaagataagagacacttcacaaaatattgtccaactgtcctgcctgttgtag

SEQ ID NO: 335564 - DNA, 1647 bp, Artificial Sequence
  derived and/or modified sequence
agcctgcctgagagtgaagatgccatgaccggggacacagacaagtacctgggcccccaggacctgaaggagctgggagatgacagcctgcctgctgagggctacatgggcttcagcctgggcgcccggagcgccagcctgcgctccttcagcagtgacaggagctacaccctgaacagaagcagctatgcccgggacagcatgatgattgaggagctgctggtgcccagcaaggagcagcacctgaccttcacccgggagtttgacagcgacagcctgcggcactacagctgggccgctgacaccctggacaacgtgaacctggtgagcagccccatccacagcggcttcctggtgtccttcatggtggatgcccggggcggctccatgaggggcagccgccaccacggcatgaggatcatcatcccccccaggaagtgcacagcccccacccgcatcacctgccgcctggtgaagaggcacaagctggccaaccccccacccatggtggagggggagggcctggccagccggctggtggagatgggccctgctggggcccagttcctgggccctgtgattgtggagatcccccacttcggctccatgaggggcaaggagcgggagctgattgtgctgcggagtgaaaatggagagacctggaaggagcaccagtttgacagcaagaatgaagacctgacagagctgctgaatggcatggatgaggagctggacagccctgaggagctgggcaagaagaggatctgccgcatcatcaccaaggacttcccccagtactttgctgtggtgagccgcatcaagcaggagagcaaccagatcggccctgagggcggcatcctgagcagcaccaccgtgcccctggtgcaggccagcttccctgagggcgccctgaccaagaggatccgggtgggcctgcaggcccagcctgtgcctgatgaaattgtgaagaagatcctgggcaacaaggccaccttcagccccatcgtgacagtggagcccaggaggaggaagttccacaagcccatcaccatgaccatccctgtgcccccaccttctggagagggcgtgtccaatggctacaagggggacaccacccccaacctgcggctgctgtgcagcatcaccggcggcaccagccctgcccagtgggaggacatcaccggcaccacccccctgaccttcatcaaggactgtgtgtccttcaccaccaacgtgtctgcccgcttctggctggccgactgccaccaggtgctggagaccgtgggcctggccacccagctgtaccgggagctgatctgtgtgccctacatggccaagtttgtggtgtttgccaagatgaatgaccctgtggagagcagcctgcgctgcttctgcatgacagatgacaaggtggacaagaccctggagcagcaggagaactttgaggaggtggcccggagcaaggacatcgaggtgctggagggcaagcccatctacgtggactgctacggcaacctggcccccctgaccaagggcggccagcagctggtgttcaacttctacagcttcaaggaaaatcggctgcccttcagcatcaagatccgggacaccagccagaacatcgtgcagctgagctgcctgctgtag

SEQ ID NO: 335565 - DNA, 1647 bp, Artificial Sequence
  derived and/or modified sequence
agcctgcccgagagcgaggacgccatgaccggcgacaccgacaagtatttgggccctcaggatttgaaggagctgggggacgatagtctccctgctgagggctacatggggtttagcctgggggctaggtctgccagccttagatccttctcttcagatagaagctacacattgaacaggagctcttacgcacgagatagcatgatgatcgaggagttgctcgtcccctccaaagagcagcacctgacctttacccgggagtttgattctgatagtcttcgccattacagttgggctgcggacaccctggacaatgtcaatctggtgagctctcctattcacagcggttttctggtctcttttatggtggacgctagaggagggtccatgcgcggatcacgccaccatgggatgcgcattatcatccctccgagaaaatgcacagcacccacccgcatcacctgtcgactggttaaaagacacaagctggccaaccctccgccaatggtggaaggagaaggactggcatctcgcttagtggagatgggccccgccggagctcagtttcttggccctgtgattgtggagattcctcatttcgggagcatgagggggaaggagagagagcttatagtccttcggagcgagaacggcgaaacttggaaggagcaccagttcgacagtaagaatgaggacctgaccgagttgcttaatggcatggacgaggagctcgattcccccgaggagctcgggaaaaagagaatctgtcggatcatcacgaaagatttcccacagtacttcgctgtggtatctcgcatcaaacaggagtcaaaccagatcggtccagagggcggaattctgtccagcacgaccgtccccctggtgcaggcgtccttccctgaaggagccctgactaagcgtatcagggtcgggcttcaagcgcagcccgttcccgacgaaatcgttaaaaagatccttggtaacaaagctaccttcagccccatcgtaacggttgagcccaggagacggaaattccataaacccataacaatgacaattcctgtaccgcctccaagcggtgagggagtgtctaatggatataaaggggacacaacacccaatctgagactgctgtgttccattacgggaggtacttctcccgctcagtgggaagatataacagggaccactcccctaactttcattaaggactgtgtgtcctttacaaccaatgtgtccgcacgattttggctggcggactgtcaccaagtcctcgaaactgtcggcctggcaacccagctctacagagaactgatctgtgttccttatatggcaaagttcgtcgtatttgcaaaaatgaacgacccagtggagagctctttgcgatgtttttgtatgaccgatgataaagtggataagactctcgaacaacaagagaactttgaggaggttgcacgctctaaagatatagaggttctcgaggggaagcctatttatgtcgattgctacgggaatttagcccccctgactaaagggggccagcagttggtcttcaatttctatagtttcaaggagaacagacttcctttcagcattaagatccgtgacaccagtcagaatatcgtccaactgagctgcttactttag

SEQ ID NO: 335566 - DNA, 1644 bp, Artificial Sequence
  derived and/or modified sequence
agcctccccgaaagtgaagatgcaatgaccggggacacagacaaatatcttgggccacaggaccttaaggaattgggtgatgattccctgcctgcagagggttacatgggctttagtctcggagcgcgttctgccagcctccgctccttcagttcggataggtcttacaccttgaacagaagctcctatgcacgggacagcatgatgattgaagaactccttgtgccatccaaagagcagcatctaacattcacaagggaatttgattcagattctcttagacattacagctgggctgcagacaccttagacaatgtcaatcttgtttcaagccccattcattctgggtttctggttagctttatggtggacgcgagagggggctccatgagaggaagccgtcatcacgggatgagaatcatcattcctccacgcaagtgtacggcccccactcgaatcacctgccgtttggtaaagagacataaactggccaacccaccccccatggtggaaggagagggattagccagtaggctggtagaaatgggtcctgcaggggcacaatttttaggccctgtcatagtggaaatccctcactttgggtccatgagaggaaaagagagagaactcattgttcttcgaagtgaaaatggtgaaacttggaaggagcatcagtttgacagcaaaaatgaagatttaaccgagttacttaatggcatggatgaagaacttgatagcccagaagagttagggaaaaagcgtatctgcaggattatcacgaaagatttcccccagtattttgcagtggtttcccggattaagcaggaaagcaaccagattggtcctgaaggtggaattctgagcagcaccacagtgccccttgttcaagcatctttcccagagggtgccctaactaaaagaattcgagtgggcctccaggcccagcctgttccagatgaaattgtgaaaaagatccttggaaacaaagcaacttttagcccaattgtcactgtggaaccaagaagacggaaattccataaaccaatcacaatgaccattccggtgcccccgccctcaggagaaggtgtatccaatggatacaaaggggacactacacccaatctgcgtcttctctgtagcattacagggggcacttcgcctgctcagtgggaagacatcacaggaacaactcctttgacgtttataaaagattgtgtctcctttacaaccaatgtttcagccagattttggcttgcagactgccatcaagttttagaaactgtggggttagccacgcaactgtacagagaattgatatgtgttccatatatggccaagtttgttgtttttgccaaaatgaatgatcccgtagaatcttccttgcgatgtttctgcatgacagatgacaaagtggacaaaactttagagcaacaagagaattttgaggaagtcgcaagaagcaaagatattgaggttctggaaggaaaacctatttatgttgattgttatggaaatttggccccacttaccaaaggaggacagcaacttgtttttaacttttattctttcaaagaaaatagactgccattttccatcaagattagagacaccagccagaatatagttcaattaagttgtctccta

SEQ ID NO: 335567 - DNA, 1647 bp, Artificial Sequence
  derived and/or modified sequence
tccctgcctgagtccgaagacgccatgactggggacaccgataagtacttaggcccacaggacctgaaagagttaggggacgactcgctccccgctgaaggctatatgggcttttctctgggggctcgctccgcatctctgcgatccttctcttctgataggtcatacacgttgaaccgctcttcttatgcacgtgatagtatgatgatcgaggaactactggtgccttctaaagagcagcatttgaccttcacacgcgagttcgactctgacagccttagacactattcttgggccgcagacaccttggacaatgtgaatctggtttcatcccctatccattcaggcttcctggtgtcctttatggtggacgctcgagggggatcaatgagaggtagtcgccaccacggcatgcggatcattatcccccctaggaagtgcaccgctcctacaaggatcacctgtagactcgtgaagagacacaagctcgcgaacccccctcccatggttgaaggcgaagggctggcatccagattggtggaaatgggacctgccggtgcccagtttctcggaccagtaatagtcgagattcctcacttcggatctatgaggggcaaggagagagagctgatagtgctgcgctctgagaacggtgagacatggaaggagcatcaatttgactcaaagaacgaagacttaacagaactgttaaatggaatggacgaagagctggattcccccgaggaacttggaaagaagcgcatctgtaggatcatcacgaaggacttccctcaatattttgcggttgtgagtagaattaaacaggaatccaatcaaatagggcctgaagggggaatactcagttcaacaactgtcccactcgtgcaggcgagtttccccgagggcgctttaactaaaaggatcagggtggggctccaagctcagcctgtgcccgatgagatcgtgaaaaaaatcctcggcaataaggccaccttctctcctatcgttactgtcgagcccagacggaggaaattccacaaacctatcacaatgactatccccgtgccaccaccatccggagagggcgtaagcaacggatataaaggcgacactacccccaatttaagattgctctgttcgatcacagggggaacatctcctgcacagtgggaggacatcaccgggacgacgccattaacattcattaaggattgtgtgtccttcacaaccaacgtgtccgcccgtttctggctcgcagattgtcaccaggtgctggaaactgtgggacttgccacccagctttaccgcgaactgatttgtgttccctatatggctaagtttgtggtgtttgctaagatgaacgatccagttgagtcttccttgcgttgtttttgtatgactgatgacaaggttgataaaacgctggaacaacaggagaactttgaagaggtcgctagaagcaaagatattgaagtcttagaaggcaagccgatctatgtcgactgctacgggaatctggcacccctgaccaaagggggacagcagctggtcttcaacttctatagctttaaagagaacagactgcctttcagcattaaaattagagacaccagccagaatatagttcagctgtcatgcctcctgtag

SEQ ID NO: 335568 - DNA, 1647 bp, Artificial Sequence
  derived and/or modified sequence
agcctgcccgagagcgaggacgccatgaccggcgacaccgacaagtacctgggcccccaggacctgaaggagctgggcgacgacagcctgcccgccgagggctacatgggcttcagcctgggcgccagaagcgccagcctgagaagcttcagcagcgacagaagctacaccctgaacagaagcagctacgccagagacagcatgatgatcgaggagctgctggtgcccagcaaggagcagcacctgaccttcaccagagagttcgacagcgacagcctgagacactacagctgggccgccgacaccctggacaacgtgaacctggtgagcagccccatccacagcggcttcctggtgagcttcatggtggacgccagaggcggcagcatgagaggcagcagacaccacggcatgagaatcatcatcccccccagaaagtgcaccgcccccaccagaatcacctgcagactggtgaagagacacaagctggccaaccccccccccatggtggagggcgagggcctggccagcagactggtggagatgggccccgccggcgcccagttcctgggccccgtgatcgtggagatcccccacttcggcagcatgagaggcaaggagagagagctgatcgtgctgagaagcgagaacggcgagacctggaaggagcaccagttcgacagcaagaacgaggacctgaccgagctgctgaacggcatggacgaggagctggacagccccgaggagctgggcaagaagagaatctgcagaatcatcaccaaggacttcccccagtacttcgccgtggtgagcagaatcaagcaggagagcaaccagatcggccccgagggcggcatcctgagcagcaccaccgtgcccctggtgcaggccagcttccccgagggcgccctgaccaagagaatcagagtgggcctgcaggcccagcccgtgcccgacgagatcgtgaagaagatcctgggcaacaaggccaccttcagccccatcgtgaccgtggagcccagaagaagaaagttccacaagcccatcaccatgaccatccccgtgcccccccccagcggcgagggcgtgagcaacggctacaagggcgacaccacccccaacctgagactgctgtgcagcatcaccggcggcaccagccccgcccagtgggaggacatcaccggcaccacccccctgaccttcatcaaggactgcgtgagcttcaccaccaacgtgagcgccagattctggctggccgactgccaccaggtgctggagaccgtgggcctggccacccagctgtacagagagctgatctgcgtgccctacatggccaagttcgtggtgttcgccaagatgaacgaccccgtggagagcagcctgagatgcttctgcatgaccgacgacaaggtggacaagaccctggagcagcaggagaacttcgaggaggtggccagaagcaaggacatcgaggtgctggagggcaagcccatctacgtggactgctacggcaacctggcccccctgaccaagggcggccagcagctggtgttcaacttctacagcttcaaggagaacagactgcccttcagcatcaagatcagagacaccagccagaacatcgtgcagctgagctgcctgctgtag

SEQ ID NO: 335569 - DNA, 3387 bp, Artificial Sequence
  derived and/or modified sequence
atggcaacgcaaggggaccatctcaattgcgtacagcttctgttgcagcataacgttcctgtcgacgatgttaccaacgactacctaaccgccctgcacgtggccgcccactgtggacactacaaagtagctaaagttctgcttgataagaaggcaaaccctaacgccaaggccctgaatggtttcacgcccttacacattgcctgtaagaaaaacagaattaaggtgatggaactcctgctgaagcacggagccagcatccaggccgtgactgagagcgggctcacgcctattcatgttgctgcctttatgggtcatgtaaatattgtgtctcagcttatgcaccacggtgctagtcccaatacaacaaacgtgaggggggagaccgccttacacatggctgcaaggtctggacaagccgaagttgtccgctacctggttcaggacggggctcaggtggaagccaaggccaaagacgatcagacccctctgcatatttctgccagactaggaaaagccgatatagtacaacagctgctccaacaaggggccagtcctaatgctgctactacttcgggttatacccctctgcatctgtctgccagggagggacacgaggacgttgccgcatttctgctggatcacggagcgagcctgtccatcacaactaagaaaggatttacccctttgcacgtggccgcaaagtatggaaagctcgaggtagccaatctgctcctccagaagtccgcttcccccgacgcagcaggcaagagcggtctgacaccactgcacgtggcggcgcactatgataaccagaaagttgctttgttactccttgatcagggagcctcacctcatgctgccgcaaaaaatggttacactcctctgcatatcgcggccaaaaagaaccagatggacatagccactaccttacttgagtatggagctgatgcaaatgccgtaactcggcaaggcattgcatctgtccatctggccgcccaagagggacacgtggatatggtcagtcttctgcttggcaggaacgctaatgtgaatctttccaacaagagcggcctcactccattacatctggccgctcaggaggacagggtcaacgtcgctgaagtgctggtgaaccagggcgcccacgtcgatgcccaaaccaagatggggtacaccccactgcatgtgggttgccattacggcaacataaagattgtaaattttctcctgcagcattctgccaaggtaaacgcaaaaacaaagaatggctatacccctttgcaccaggcagcgcagcaggggcatacccacataattaacgtcttgctgcagaataacgcgtctcctaatgagctaactgttaatgggaatactgcactgggcatagctcgtaggcttggctacatttcagtcgtggacaccctcaagatcgtcactgaggagacgatgacgaccaccaccgtcaccgaaaagcacaagatgaacgtgccagagaccatgaacgaagtgctcgacatgagcgatgatgagggggaagacgcaatgacaggtgacacagataagtatttagggccccaggatctgaaggagttgggagacgatagtctgcccgctgaggggtacatgggttttagcctgggtgctcggtctgccagttcagacaggtcatacacacttaatagaagttcttatgcgagagactccatgatgatcgaagaactcctggtgcccagcaaagagcagcaccttaccttcacccgggagttcgacagcgactccttgaggcattattcttgggctgccgacaccctcgacaatgtgaatctcgtgtcttccccaatacacagcggttttctggtaagttttatggtggacgctcgtggcggaagtatgcgtggtagccgccaccatggcatgcggatcattatccccccccggaagtgtactgccccgacacgcattacttgccgactggttaaaaggcacaagttggccaatcccccaccgatggtcgagggagaaggtttagcaagtagactcgttgagatgggccctgccggagctcagtttctggggcccgtgatagtcgagatcccccatttcgggtcaatgagagggaaagaacgggagctcattgtgctgcggagtgaaaatggggagacatggaaagagcaccaatttgactccaagaatgaggatctaactgagcttcttaacggtatggatgaggagctggactcaccagaagagctgggcaagaaaagaatttgtcgcatcataacaaaggacttcccacagtattttgctgtcgtctcaaggataaaacaggagagtaatcaaattggccctgaaggaggtatcctctcctccaccaccgtcccactggtgcaggcgagcttccctgagggagctctgacgaaaagaattagagtaggcctgcaagcccagcccgtccccgatgaaatcgtgaagaagatcctgggtaataaggccacctttagtcctatcgtgactgttgagccaagacgtagaaagttccataagcctattactatgactatcccggtgccaccgccaagcggggaaggggtgtccaatggctataaaggtgatacaactccgaaccttcgcttgctctgcagcataaccggggggacatcccccgctcagtgggaggacattaccgggacaacaccactgacatttataaaggactgcgtttcctttacgaccaacgtgagcgcccgcttctggcttgctgactgccaccaggtgctcgaaactgtgggactggccacacagctatatagagagttaatctgcgttccttacatggctaagtttgttgtgtttgctaaaatgaacgatcctgtggaaagctccctaagatgcttctgtatgactgacgacaaggttgataaaaccctcgagcaacaggagaacttcgaagaagtcgctcgctcaaaggatattgaggtgttagaaggaaagcctatttacgtggattgttacggcaacctggccccactcaccaaggggggccagcagctggtgtttaacttttattcctttaaggaaaacagattgccctttagcatcaaaattcgagatacgagccaggaaccatgcggcaggctgagcttcctgaaagagcctaaaaccacaaaggggttgccacagaccgccgtctgtaacctaaacataacattgccagcacacaaaaaaatcgagaagaccgaccgcaggcaatctttcgcgtcgctcgcactcaggaagcgctatagctacctgaccgagcccgggatgtctgagttccccaacacatttacaaatacttggatctttatacgcagagacatctttagcatccagacaaagttttag

SEQ ID NO: 335570 - DNA, 3354 bp, Artificial Sequence
  derived and/or modified sequence
atggccacccaaggggaccacctgaactgtgtgcagttgctgctgcagcacaatgtgccagtggatgatgtgacaaatgactacttaaccgcccttcatgtggcagcccactgcggccattataaagtcgccaaggtccttcttgataaaaaagcgaatcctaatgccaaggccctaaacggttttacaccattgcatatagcctgtaagaaaaatcgaattaaagtgatggagcttctcctgaagcacggagcaagcatccaggctgttaccgagtcaggactgaccccaattcacgtcgcagcttttatgggccacgtcaatattgtgtcccagctgatgcaccatggagcttcacccaatacgaccaatgtccgtggagaaaccgcacttcacatggcagcacggagcgggcaggctgaagtagttcggtatttggtgcaggatggcgcccaagttgaggcaaaggctaaggacgatcagacacccctgcacatctcagcacggctgggcaaagctgacattgtgcagcaactgttacagcagggcgcctccccaaatgcggccactacatcaggctatacacctctgcacttgtcagccagagaggggcatgaggacgtggcagccttcctgcttgaccacggtgccagtctctctatcacaaccaagaagggcttcactccactgcacgttgccgccaaatatggaaaactagaagtggccaatctactgctgcagaagagcgccagccctgacgccgccggaaaatctggtttgacaccactgcatgtggctgcacattacgacaatcagaaggtcgcactgctcctcctggaccagggagcctccccccacgcagctgccaaaaatggctatacccccctgcacatcgccgcgaagaaaaaccaaatggacattgcaaccaccctcctggaatacggagctgatgctaatgctgttacacgacagggcattgccagtgtgcacctagcagctcaggagggccatgtagatatggtctccttgctgttgggcaggaatgccaacgattctgggctcacaccccttcatctggccgcgcaggaggatcgtgtgaacgttgcagaggtactagttaatcagggagctcacgtggacgcacagaccaagatggggtataccccgctgcatgtgggttgccactatggcaacatcaagattgtgaattttctcctgcagcactctgcaaaagtgaacgcaaaaactaagaatggctatactcccctccaccaggccgcccagcagggccatactcacattatcaatgtgctgctccagaataacgccagtcccaatgaactcaccgtgaatggcaacactgctctggggatcgctcggagactgggttatattagcgtcgttgacaccttgaagattgtcaccgaggagactatgactaccactaccgtgaccgagaaacacaaaatgaatgtgccggagactatgaatgaagttttggacatgtcagatgatgaaggagaagacgcaatgactggagacacagacaagtatctggggccccaggacctgaaggagcttggagacgacagtttaccagccgaagggtacatggggttctctctgggcgccaggagcgcaagcctgagatcctttagttccgatcgtagctataccctcaaccggtcaagctacgccagagattcaatgatgattgaggagcttctcgtaccctctaaggagcaacatctgacattcacccgggagttcgatagcgattcactgaggcattacagctgggccgctgacactctggacaatgtgaatctggtttcgagccccatccactctggttttttggtgtcttttatggtcgatgctcgggggggcagcatgcggggaagtcgccatcatggaatgcggatcattatccctccacgtaaatgtacggctcctacgcgcattacatgtaggcttgtcaaaaggcacaagttggctaatccccctcccatggtggagggcgaaggtttggccagcaggcttgtggaaatggggccagcaggcgctcagttcctgggtcctgtaatcgtggaaatcccgcactttgggtccatgcggggtaaggaacgcgagctaatcgtcctgagatctgagaacggggaaacatggaaagagcaccagttcgatagtaagaatgaagacctgacagagctactcaacgggatggacgaggaattggatagcccagaagaactgggcaagaaaagaatttgtaggatcatcacgaaggacttcccccagtacttcgctgttgtctctcgcatcaaacaggagagcaaccagataggtcctgaaggcggtatcctctcatctaccaccgttccccttgtgcaggcatcgtttcccgagggcgccctgaccaagcgtattcgagtggggcttcaagcgcagcctgtcccagacgaaattgtgaagaagatcctcggaaacaaggccacctttagtcccatcgtgacagtggaaccccgaagacgaaagtttcacaagcccataacaatgacaatccccgtgcctcctccttccggagaaggagttagcaatggctacaaaggcgacactacacccaatctaaggttactctgcagtattacgggggggaccagcccagcccagtgggaggatatcactggtactactcctcttacatttattaaagattgcgtatcttttacaactaacgtgtcagccaggttctggcttgctgactgccaccaggtgctagagaccgtgggcctggccacacagctgtatcgagagctcatttgtgtgccctacatggcaaaatttgttgtcttcgcaaagatgaatgacccagttgagagttcgttgaggtgtttttgcatgactgacgacaaagtagataaaacgctcgagcaacaagaaaatttcgaggaagtggcaaggagcaaggatatcgaagtactggaaggaaagccaatatatgttgattgttacgggaaccttgcacctctcacaaaaggtgggcaacaactggtgttcaatttttattccttcaaggaaaaccgccttcccttcagcatcaagatcagggatactagccaggaaccctgcggccggttgtcattccttaaagaacccaaaactaccaaaggcctgccacagacagccgtctgtaatctgaatatcactctccccgctcataaaaaaatcgagaagacggacagacgccaaagtttcgccagcttggctcttagaaaaaggtacagctacctgaccgagcccggaatgagcgagtttccaaatacgttcacaaaccttagggggttctcctag

SEQ ID NO: 335571 - DNA, 2796 bp, Artificial Sequence
  derived and/or modified sequence
tttaccctggcacacgtcccacaaagaggcgaaacggctctccacatggccgcccggagcggccaggcagaagtggtgcgttacttggtgcaagacggggctcaggtggaggcgaaagccaaagatgaccagacacctctgcatatctctgcccggctcgggaaggcggatatagtccaacagctcctgcaacagggggccagccccaacgcggccaccacaagcggttatacacctcttcatctgagtgcgcgagaagggcatgaggacgttgcggcattcctcttagatcacggggcatctctgtctattaccaccaagaaaggatttactccactccacgttgcggccaagtacggcaaactggaagtggccaatctgctgctgcaaaagagtgcctcccctgatgctgccggcaagtccggcctcactccactgcatgtggccgcccattatgataaccagaaggtcgctcttctgctgcttgatcagggtgcatccccgcacgctgccgccaagaacggatacacgcccctgcatatagcagctaaaaagaatcaaatggacattgccaccacccttctcgaatacggcgctgatgccaacgcagtgaccaggcagggtatcgcgtccgtgcacctggccgcgcaggagggacacgtggatatggtgtcactgctcttgggtaggaatgccaatgtcaatttgagtaacaaaagcgggctgacaccacttcatctggcagcccaggaggatagagtgaatgtggccgaggtgctggtgaatcagggggcccacgtggatgcccaaaccaaaatgggttatacgcctctacacgtcgggtgccactatggcaatatcaagatcgtcaatttcttgcttcaacattctgcgaaggtgaacgccaagaccaagaacggatatactcctttgcaccaggctgctcagcagggacacacccatatcattaatgtactgctgcagaacaacgccagccctaatgagctcaccgtgaacggcaataccgccctggggattgcacgcaggctgggctacatctccgtggtggacacccttaaaatagtgaccgaggaaactatgaccacaaccacagtgactgagaagcataagatgaatgtccccgagaccatgaatgaggtgctcgacatgtctgacgacgagggtgaagatgcaatgaccggagataccgataagtacctcggcccacaagatttgaaagaactcggcgatgatagcctacctgctgaaggctacatggggttctcactcggtgctaggtccgcatcaagatctttctcttcagaccgaagctataccttgaacagaagtagttacgcaagagacagtatgatgatagaagagcttctcgttccaagcaaagaacagcacctgacgtttacccgagaattcgactcggattcgctgcgtcactactcctgggccgcagacaccctggataacgtcaacctggtctcttctccaatccattctggatactcaagccccctcccccagtacgattctaggtttctcgtttcctttatggttgacgcccgaggcgggtcaatgcgcggttccagacaccatggtatgcggattattatcccgcctcgaaaatgcacggcccctacacgcataacgtgccggctggttaagcgtcataagctggctaatccacctccgatggtggaaggcgagggcttggctagtcggttggtcgaaatgggacccgctggcgcccagttccttggacctgtcattgtagagattccgcattttggctctatgaggggaaaagagcgtgaattgatcgtattgagatcggagaacggtgagacttggaaagaacaccaattcgatagcaagaatgaggacctgacggaactcttgaatggaatggacgaggaacttgactcacccgaggagctgggcaagaagagaatctgccgaatcatcaccaaggacttccctcagtattttgccgtggtgtcaaggattaaacaagagtccaaccagattgggccagaagggggtattcttagcagcaccaccgttccactcgtgcaagcatcattccctgagggagcactgacaaagagaattcgggtaggactccaggcacagccggtcccagacgagatcgtaaagaaaattttgggcaacaaggccaccttctcccctattgttaccgtcgagccacgacgcaggaaatttcacaagccgattaccatgacaatccctgttcccccgccctctggagagggtgtgtccaacggctataagggagataccaccccaaacttacgtctcctttgtagcatcactggcggaacctcgcccgcccagtgggaggatatcacaggaactactcccctgacattcattaaggactgtgtgtctttcactacaaacgtgagcgcgagattttggctcgccgactgccaccaagtactggaaaccgtcggactggccacccagctatatcgagaactgatttgtgtgccctacatggcaaaattcgtagtttttgctaagatgaacgatcccgtggagtcaagcttgcgttgcttttgcatgacagatgataaggtggacaagaccctggagcagcaggaaaattttgaggaggtcgcaaggtcaaaagacattgaggtaccctgctcccaaaagcaggttcattttatcacttattcaagatatgaagtcctgttctgtggattaaactcgactcactataagattccttccgccctgttgattctgctgcttctgtag

SEQ ID NO: 335572 - DNA, 3387 bp, Artificial Sequence
  derived and/or modified sequence
atggccacccagggcgaccacctgaactgtgtgcagctgctgctgcagcacaacgtgcctgtggatgatgtgaccaatgactacctgacagccctgcacgtggccgcccactgcggccactacaaggtggccaaggtgctgctggacaagaaggccaaccccaatgccaaggccctgaatggcttcacccccctgcacatcgcctgcaagaagaaccgcatcaaggtgatggagctgctgctgaagcatggagccagcatccaggccgtgacagaaagtggcctgacccccatccacgtggccgccttcatgggccacgtgaacatcgtgtcccagctgatgcaccacggggccagccccaacaccaccaacgtgcggggggagacagccctgcacatggccgcccggagcggccaggccgaggtggtgcgctacctggtgcaggatggagcccaggtggaggccaaggccaaggatgaccagacccccctgcacatcagcgcccggctgggcaaggctgacatcgtgcagcagctgctgcagcagggcgccagccccaatgctgccaccaccagcggctacacccccctgcacctgagcgcccgggagggccatgaagatgtggccgccttcctgctggaccatggagccagcctgagcatcaccaccaagaagggcttcacccccctgcacgtggccgccaagtatggcaagctggaggtggccaacctgctgctgcagaagagcgccagcccagatgctgctgggaagagcggcctgacccccctgcacgtggccgcccactatgacaaccagaaggtggccctgctgctgctggaccagggcgccagcccccatgctgctgccaagaatggctacacccccctgcacatcgccgccaagaagaaccagatggacatcgccaccaccctgctggagtatggagcagatgccaatgctgtgacccggcagggcatcgcctctgtgcacctggccgcccaggagggccacgtggacatggtgtccctgctgctgggcagaaatgccaacgtgaacctgagcaacaagagcggcctgacccccctgcacctggccgcccaggaggacagagtgaatgtggccgaggtgctggtgaaccagggcgcccacgtggatgcccagaccaagatgggctacacccccctgcacgtgggctgccactacggcaacatcaagatcgtgaacttcctgctgcagcacagcgccaaggtgaatgccaagaccaagaatggctacacccccctgcaccaggccgcccagcagggccacacccacatcatcaacgtgctgctgcagaacaatgccagccccaatgagctgactgtgaatggaaacacagccctgggcatcgcccggcggctgggctacatctctgtggtggacaccctgaagatcgtgacagaggagaccatgaccaccaccaccgtgacagagaagcacaagatgaatgtgcctgagaccatgaatgaggtgctggacatgtctgatgatgaaggagaagatgccatgactggagacacagacaagtacctgggcccccaggacctgaaggagctgggagatgacagcctgcctgctgagggctacatgggcttcagcctgggcgcccggagcgccagcagtgacaggagctacaccctgaacagaagcagctatgcccgggacagcatgatgattgaggagctgctggtgcccagcaaggagcagcacctgaccttcacccgggagtttgacagcgacagcctgcggcactacagctgggccgctgacaccctggacaacgtgaacctggtgagcagccccatccacagcggcttcctggtgtccttcatggtggatgcccggggcggctccatgaggggcagccgccaccacggcatgaggatcatcatcccccccaggaagtgcacagcccccacccgcatcacctgccgcctggtgaagaggcacaagctggccaaccccccacccatggtggagggggagggcctggccagccggctggtggagatgggccctgctggggcccagttcctgggccctgtgattgtggagatcccccacttcggctccatgaggggcaaggagcgggagctgattgtgctgcggagtgaaaatggagagacctggaaggagcaccagtttgacagcaagaatgaagacctgacagagctgctgaatggcatggatgaggagctggacagccctgaggagctgggcaagaagaggatctgccgcatcatcaccaaggacttcccccagtactttgctgtggtgagccgcatcaagcaggagagcaaccagatcggccctgagggcggcatcctgagcagcaccaccgtgcccctggtgcaggccagcttccctgagggcgccctgaccaagaggatccgggtgggcctgcaggcccagcctgtgcctgatgaaattgtgaagaagatcctgggcaacaaggccaccttcagccccatcgtgacagtggagcccaggaggaggaagttccacaagcccatcaccatgaccatccctgtgcccccaccttctggagagggcgtgtccaatggctacaagggggacaccacccccaacctgcggctgctgtgcagcatcaccggcggcaccagccctgcccagtgggaggacatcaccggcaccacccccctgaccttcatcaaggactgtgtgtccttcaccaccaacgtgtctgcccgcttctggctggccgactgccaccaggtgctggagaccgtgggcctggccacccagctgtaccgggagctgatctgtgtgccctacatggccaagtttgtggtgtttgccaagatgaatgaccctgtggagagcagcctgcgctgcttctgcatgacagatgacaaggtggacaagaccctggagcagcaggagaactttgaggaggtggcccggagcaaggacatcgaggtgctggagggcaagcccatctacgtggactgctacggcaacctggcccccctgaccaagggcggccagcagctggtgttcaacttctacagcttcaaggaaaatcggctgcccttcagcatcaagatccgggacaccagccaggagccctgtggccgcctgtccttcctgaaggagcccaagaccaccaagggcctgccccagacagctgtgtgcaacctgaacatcaccctgcctgcccacaagaagattgagaagacagaccggcggcagagctttgccagcctggccctgaggaagcgctacagctacctgacagagcccggcatgtctgagttccccaacaccttcaccaacacctggatcttcatccggcgggacatcttcagcatccagaccaagttctag

SEQ ID NO: 335573 - DNA, 3354 bp, Artificial Sequence
  derived and/or modified sequence
atggccacccagggcgaccacctgaactgtgtgcagctgctgctgcagcacaacgtgcctgtggatgatgtgaccaatgactacctgacagccctgcacgtggccgcccactgcggccactacaaggtggccaaggtgctgctggacaagaaggccaaccccaatgccaaggccctgaatggcttcacccccctgcacatcgcctgcaagaagaaccgcatcaaggtgatggagctgctgctgaagcatggagccagcatccaggccgtgacagaaagtggcctgacccccatccacgtggccgccttcatgggccacgtgaacatcgtgtcccagctgatgcaccacggggccagccccaacaccaccaacgtgcggggggagacagccctgcacatggccgcccggagcggccaggccgaggtggtgcgctacctggtgcaggatggagcccaggtggaggccaaggccaaggatgaccagacccccctgcacatcagcgcccggctgggcaaggctgacatcgtgcagcagctgctgcagcagggcgccagccccaatgctgccaccaccagcggctacacccccctgcacctgagcgcccgggagggccatgaagatgtggccgccttcctgctggaccatggagccagcctgagcatcaccaccaagaagggcttcacccccctgcacgtggccgccaagtatggcaagctggaggtggccaacctgctgctgcagaagagcgccagcccagatgctgctgggaagagcggcctgacccccctgcacgtggccgcccactatgacaaccagaaggtggccctgctgctgctggaccagggcgccagcccccatgctgctgccaagaatggctacacccccctgcacatcgccgccaagaagaaccagatggacatcgccaccaccctgctggagtatggagcagatgccaatgctgtgacccggcagggcatcgcctctgtgcacctggccgcccaggagggccacgtggacatggtgtccctgctgctgggcagaaatgccaatgacagcggcctgacccccctgcacctggccgcccaggaggacagagtgaatgtggccgaggtgctggtgaaccagggcgcccacgtggatgcccagaccaagatgggctacacccccctgcacgtgggctgccactacggcaacatcaagatcgtgaacttcctgctgcagcacagcgccaaggtgaatgccaagaccaagaatggctacacccccctgcaccaggccgcccagcagggccacacccacatcatcaacgtgctgctgcagaacaatgccagccccaatgagctgactgtgaatggaaacacagccctgggcatcgcccggcggctgggctacatctctgtggtggacaccctgaagatcgtgacagaggagaccatgaccaccaccaccgtgacagagaagcacaagatgaatgtgcctgagaccatgaatgaggtgctggacatgtctgatgatgaaggagaagatgccatgaccggggacacagacaagtacctgggcccccaggacctgaaggagctgggagatgacagcctgcctgctgagggctacatgggcttcagcctgggcgcccggagcgccagcctgcgctccttcagcagtgacaggagctacaccctgaacagaagcagctatgcccgggacagcatgatgattgaggagctgctggtgcccagcaaggagcagcacctgaccttcacccgggagtttgacagcgacagcctgcggcactacagctgggccgctgacaccctggacaacgtgaacctggtgagcagccccatccacagcggcttcctggtgtccttcatggtggatgcccggggcggctccatgaggggcagccgccaccacggcatgaggatcatcatcccccccaggaagtgcacagcccccacccgcatcacctgccgcctggtgaagaggcacaagctggccaaccccccacccatggtggagggggagggcctggccagccggctggtggagatgggccctgctggggcccagttcctgggccctgtgattgtggagatcccccacttcggctccatgaggggcaaggagcgggagctgattgtgctgcggagtgaaaatggagagacctggaaggagcaccagtttgacagcaagaatgaagacctgacagagctgctgaatggcatggatgaggagctggacagccctgaggagctgggcaagaagaggatctgccgcatcatcaccaaggacttcccccagtactttgctgtggtgagccgcatcaagcaggagagcaaccagatcggccctgagggcggcatcctgagcagcaccaccgtgcccctggtgcaggccagcttccctgagggcgccctgaccaagaggatccgggtgggcctgcaggcccagcctgtgcctgatgaaattgtgaagaagatcctgggcaacaaggccaccttcagccccatcgtgacagtggagcccaggaggaggaagttccacaagcccatcaccatgaccatccctgtgcccccaccttctggagagggcgtgtccaatggctacaagggggacaccacccccaacctgcggctgctgtgcagcatcaccggcggcaccagccctgcccagtgggaggacatcaccggcaccacccccctgaccttcatcaaggactgtgtgtccttcaccaccaacgtgtctgcccgcttctggctggccgactgccaccaggtgctggagaccgtgggcctggccacccagctgtaccgggagctgatctgtgtgccctacatggccaagtttgtggtgtttgccaagatgaatgaccctgtggagagcagcctgcgctgcttctgcatgacagatgacaaggtggacaagaccctggagcagcaggagaactttgaggaggtggcccggagcaaggacatcgaggtgctggagggcaagcccatctacgtggactgctacggcaacctggcccccctgaccaagggcggccagcagctggtgttcaacttctacagcttcaaggaaaatcggctgcccttcagcatcaagatccgggacaccagccaggagccctgtggccgcctgtccttcctgaaggagcccaagaccaccaagggcctgccccagacagctgtgtgcaacctgaacatcaccctgcctgcccacaagaagattgagaagacagaccggcggcagagctttgccagcctggccctgaggaagcgctacagctacctgacagagcccggcatgtctgagttccccaacaccttcaccaacctgcggggcttctcctag

SEQ ID NO: 335574 - DNA, 2796 bp, Artificial Sequence
  derived and/or modified sequence
ttcaccctggcccacgtgccccagagaggagaaacagccctgcacatggccgcccggagcggccaggccgaggtggtgcgctacctggtgcaggatggagcccaggtggaggccaaggccaaggatgaccagacccccctgcacatcagcgcccggctgggcaaggctgacatcgtgcagcagctgctgcagcagggcgccagccccaatgctgccaccaccagcggctacacccccctgcacctgagcgcccgggagggccatgaagatgtggccgccttcctgctggaccacggggccagcctgagcatcaccaccaagaagggcttcacccccctgcacgtggccgccaagtatggcaagctggaggtggccaacctgctgctgcagaagagcgccagcccagatgctgctgggaagagcggcctgacccccctgcacgtggccgcccactatgacaaccagaaggtggccctgctgctgctggaccagggcgccagcccccacgccgccgccaagaatggctacacccccctgcacatcgccgccaagaagaaccagatggacatcgccaccaccctgctggagtatggagcagatgccaatgctgtgacccggcagggcatcgcctctgtgcacctggccgcccaggagggccacgtggacatggtgtccctgctgctgggcagaaatgccaacgtgaacctgagcaacaagagcggcctgacccccctgcacctggccgcccaggaggacagagtgaatgtggccgaggtgctggtgaaccagggcgcccacgtggatgcccagaccaagatgggctacacccccctgcacgtgggctgccactacggcaacatcaagatcgtgaacttcctgctgcagcacagcgccaaggtgaatgccaagaccaagaatggctacacccccctgcaccaggccgcccagcagggccacacccacatcatcaacgtgctgctgcagaacaatgccagccccaatgagctgactgtgaatggaaacacagccctgggcatcgcccggcggctgggctacatctctgtggtggacaccctgaagatcgtgacagaggagaccatgaccaccaccaccgtgacagagaagcacaagatgaatgtgcctgagaccatgaatgaggtgctggacatgtctgatgatgaaggagaagatgccatgaccggggacacagacaagtacctgggcccccaggacctgaaggagctgggagatgacagcctgcctgctgagggctacatgggcttcagcctgggcgcccggagcgccagccgctccttcagcagtgacaggagctacaccctgaacagaagcagctatgcccgggacagcatgatgattgaggagctgctggtgcccagcaaggagcagcacctgaccttcacccgggagtttgacagcgacagcctgcggcactacagctgggccgctgacaccctggacaacgtgaacctggtgagcagccccatccacagcggctacagcagccccctgccccagtatgacagccgcttcctggtgtccttcatggtggatgcccggggcggctccatgaggggcagccgccaccacggcatgaggatcatcatcccccccaggaagtgcacagcccccacccgcatcacctgccgcctggtgaagaggcacaagctggccaaccccccacccatggtggagggggagggcctggccagccggctggtggagatgggccctgctggggcccagttcctgggccctgtgattgtggagatcccccacttcggctccatgaggggcaaggagcgggagctgattgtgctgcggagtgaaaatggagagacctggaaggagcaccagtttgacagcaagaatgaagacctgacagagctgctgaatggcatggatgaggagctggacagccctgaggagctgggcaagaagaggatctgccgcatcatcaccaaggacttcccccagtactttgctgtggtgagccgcatcaagcaggagagcaaccagatcggccctgagggcggcatcctgagcagcaccaccgtgcccctggtgcaggccagcttccctgagggcgccctgaccaagaggatccgggtgggcctgcaggcccagcctgtgcctgatgaaattgtgaagaagatcctgggcaacaaggccaccttcagccccatcgtgacagtggagcccaggaggaggaagttccacaagcccatcaccatgaccatccctgtgcccccaccttctggagagggcgtgtccaatggctacaagggggacaccacccccaacctgcggctgctgtgcagcatcaccggcggcaccagccctgcccagtgggaggacatcaccggcaccacccccctgaccttcatcaaggactgtgtgtccttcaccaccaacgtgtctgcccgcttctggctggccgactgccaccaggtgctggagaccgtgggcctggccacccagctgtaccgggagctgatctgtgtgccctacatggccaagtttgtggtgtttgccaagatgaatgaccctgtggagagcagcctgcgctgcttctgcatgacagatgacaaggtggacaagaccctggagcagcaggagaactttgaggaggtggcccggagcaaggacatcgaggtgccctgcagccagaagcaggtgcacttcatcacctacagccgctatgaggtgctcttctgtggcctgaacagcacccactacaagatccccagcgccctgctgatcctgctgctgctgtag

SEQ ID NO: 335575 - DNA, 3387 bp, Artificial Sequence
  derived and/or modified sequence
atggccacccagggcgaccacctgaactgcgtgcagctgctgctgcagcataacgtcccagtggatgatgttacgaacgactatctgaccgccttgcacgtggccgcccattgcggccactataaggtcgcaaaggtcttgttggataagaaggccaaccccaacgcaaaggccctgaacggctttacaccacttcatattgcgtgcaagaaaaaccgaatcaaggtaatggagctacttctgaagcacggggcgagtatacaggccgttactgaatccggactcacgcctatacatgtcgccgcctttatggggcacgtcaatattgtgagtcaactcatgcatcacggggccagccccaacacaacgaatgtacggggggagaccgctctacatatggccgcccgctctggccaggctgaggtcgtgagatacctggtgcaagatggagctcaggtggaggctaaagccaaggacgatcagacccccctgcatattagtgcccgcctgggaaaggcagatatcgtgcagcagctcctgcagcagggcgctagccccaacgctgcgactacatcaggctatacccctctgcatctaagtgcccgcgaaggacatgaggatgtggccgcgttcctgctcgaccatggcgcttccctgtccattaccacaaaaaagggatttacacccctccacgtggcagccaagtacggcaagctcgaggtagccaatcttctgttgcaaaagtccgcttcacccgatgctgccggcaaaagcggcctcactcctctgcatgtggctgcccattacgacaatcagaaagtcgcacttttactgctcgatcagggtgcctcccctcacgcagccgcaaagaacggctatactccgctgcatattgcagccaaaaagaatcagatggatatcgctacgaccctgctggaatatggcgcagacgcaaatgccgttactcgccaggggatcgcctcagtgcatctcgccgcgcaggaagggcatgtcgacatggtgtccctcctacttgggcgcaacgcgaatgtaaatctgtccaacaaaagcgggctaacaccccttcacttagccgcccaggaagaccgagtgaacgttgcagaagtattagttaatcagggtgcccacgttgacgcacagactaagatgggctacactcccctgcatgttggctgccattatgggaatattaagatcgtgaatttcttattgcagcactctgcaaaagtcaacgctaaaacaaagaatggatatactcctttgcaccaggccgcccagcagggacatacacatattatcaatgtgttgcttcagaataacgcttcccctaatgaacttacagtcaacgggaataccgcactggggatcgcacggcgcctcggctacatctcagtcgtggatactctcaagatagttacagaagagacaatgacaactacgacagtgactgagaaacacaaaatgaatgtgccagagacaatgaacgaggttctggatatgagcgacgatgagggtgaggatgccatgactggtgatactgacaagtacctgggcccccaggatctcaaggaattgggggacgactctcttccagcggaggggtacatgggctttagcttaggcgctcgctctgccagtagtgatcgctcatatactttgaatcgatcctcatatgccagggattctatgatgattgaagagctgctagtgccaagtaaggagcagcatctgacatttaccagagagttcgacagtgattctttgcgacactacagttgggccgccgacacactggacaacgtcaatctggtgtcctccccaatacactctggatttcttgtgtcatttatggtggatgcccgaggaggctccatgcgtgggagtcgtcaccatggcatgcggatcataattcccccaaggaagtgtacagcaccaacgcgaattacctgtagattagtcaagagacacaagctcgccaacccaccaccaatggtggaaggggaggggctcgcaagcagactcgtggagatgggaccggccggcgctcagttcctcggaccggtgatcgttgaaatcccacatttcggaagcatgagggggaaggaaagagagctcattgtgttgcgcagtgagaatggggagacatggaaggagcatcaatttgattctaaaaatgaagacctgacagaacttctgaacggcatggatgaggagcttgacagccccgaagagctgggtaaaaagaggatttgtaggatcattacaaaggattttcctcaatattttgccgtggtgtcccgcattaagcaggagtccaaccagattggacctgaaggcggaatcctgagttccactacagtgccccttgtgcaggcttccttccccgagggggccctgaccaagaggattagagttgggctgcaggcgcagcctgtgcccgatgaaattgtaaaaaaaatcctgggcaacaaggccacattttctcctatcgttactgtggagccccgcagacgcaaattccacaaaccaataacaatgaccatccccgtgccaccaccctccggggaaggggtcagtaacggttacaagggtgatactaccccaaatttgcgacttctgtgctctatcaccggcggaacctccccagcccagtgggaagatatcaccggcacgactccacttacgtttatcaaggattgcgtgtcctttacgaccaacgtgtcagccaggttttggttggccgactgccaccaggtactcgagactgtgggcctagctactcagctgtaccgggagctgatctgtgtgccctatatggctaaatttgtggtattcgccaagatgaatgaccccgtggaatcctctctccggtgcttttgcatgacagacgataaggtcgacaagacactcgaacagcaggaaaatttcgaggaggtggcccggagcaaagatatcgaagtgcttgagggcaagccaatctacgtcgattgttacggaaatctggctccactgacgaaagggggtcaacaactagtgttcaacttttacagctttaaggagaaccggctacccttctccatcaaaattcgcgataccagccaggagccctgcggacggttaagcttcttgaaagagccgaagaccactaagggtctaccccaaaccgcagtctgcaatcttaatatcacactgccagctcacaaaaaaatcgagaaaaccgatagacgccagtcatttgctagtctcgccctcagaaagagatactcctacctcacagagcccggaatgtccgagtttcctaataccttcacgaatacatggatttttattcggagagatatttttagtatacaaaccaagttttag

SEQ ID NO: 335576 - DNA, 3354 bp, Artificial Sequence
  derived and/or modified sequence
atggccacccagggcgaccacctgaactgcgtgcagctgctgctgcagcataacgtgcccgtagatgatgtaaccaacgactacttaaccgcacttcacgtggctgcccactgtggacattacaaggttgcaaaggtcctacttgacaaaaaagcaaatcctaacgccaaggctcttaatggctttactcccctccatatcgcttgcaagaagaaccgcattaaggtgatggagctgctgctgaaacacggggcctccattcaagcggtgaccgagagcgggctgacacccatccatgtggccgcatttatgggccacgtgaatattgtttctcagctgatgcatcatggtgcttctccgaacacaacaaacgtgcgtggagagactgcactccatatggctgcgagaagcgggcaggcagaggtggtgagatatctggtgcaagacggagcccaggtggaggccaaggctaaggatgaccagacccctctgcacatatctgctcgcctggggaaggccgatatcgtgcagcaactgctgcaacagggcgcctcgccaaacgcagctactacttctggatacactccattacacctctccgctagggaaggacacgaagacgttgcggcctttctgctggaccacggtgcgtccctttccattactactaagaaaggattcacgcctctccatgttgcggcaaagtatggcaaactggaagtggcaaacttgttgctgcagaagagtgcctctcctgatgcggctggcaagtcgggactgacccccctgcacgtcgcggcccattacgataaccaaaaagtcgccctgctacttctggaccagggtgcttccccacatgccgccgctaagaatggctacacccctctgcacatagctgctaaaaaaaatcaaatggacatcgctacaactctccttgagtacggtgccgacgccaacgccgtcacacgacaaggcatcgccagcgtgcatctcgcagcccaggaaggtcatgtagatatggtgtctctgctgttggggagaaacgcaaacgatagcgggctcactcccctccatcttgctgcgcaagaagatagggtaaacgttgcagaggtgctggtcaatcaaggcgcccatgtggacgcacagacgaagatgggatacacccctttacatgtaggatgccattatggcaacattaagatcgttaattttcttcttcagcattctgccaaagtcaacgctaaaactaaaaacggctatacccccctgcaccaagcggcacagcagggccacacccatataattaacgtactgctgcaaaataacgcgagtccgaatgagctaaccgtgaatggtaacacagcacttggcatcgctagacgattaggctacatctccgtcgtagataccttgaagatcgttaccgaagagacgatgacaactacaactgtaacagagaagcacaagatgaatgtgcctgagactatgaacgaagttttggatatgagcgacgatgaaggagaggacgctatgacaggcgacactgataagtatctcggacctcaggacctgaaggaattgggcgacgatagcctgccagccgaaggttatatggggttttctttaggagcccgatctgccagtttacgctcctttagcagcgacagatcctacacactgaataggagctcatacgcccgggactctatgatgattgaggaactgctggtgccaagtaaagaacagcacttgaccttcacacgggaatttgatagtgattccctgcgacactatagttgggctgccgacactctggataatgttaacctggttagcagtcctattcactccggctttcttgtgtcattcatggttgacgcacgcggtgggagcatgagagggtctaggcaccatggaatgcgaattatcattccaccccgaaaatgtacggcccctactcgtattacctgtcgcttggtcaagaggcacaagctggctaaccctccccctatggtcgaaggagagggcttagcctcaaggctggttgagatggggcctgccggggctcagttcctgggtcccgtcatcgtcgagatcccccacttcggcagcatgaggggtaaagagcgagagctcatagtcctgaggagcgagaatggtgagacctggaaagaacatcagttcgactccaaaaatgaggacttaaccgagcttctgaatggaatggacgaggagctggattctcctgaagaactcggaaagaaacgcatctgcagaatcattacgaaggatttccctcagtacttcgcagttgtgtcaaggattaagcaggagtctaaccagattggccccgagggtggtatcctgagtagcacgactgttccgcttgttcaagcatcctttcccgaaggtgcacttactaaacgtatccgggtaggattgcaggctcagccagtccccgatgagatcgttaaaaagatattgggtaataaggcgacgttcagtccaatagtgaccgtggaacctagaagacgcaagtttcataaacctataactatgaccattcccgttccccctccatctggagaaggtgtaagtaatggctacaagggggatactacacctaacctgcgcctgctgtgctcaatcacgggcgggacctccccggcccagtgggaagacattacaggaacgacccctttaacctttattaaggactgtgtttcctttaccaccaatgtgtctgcccgattctggttggctgactgccaccaagtcctggagactgtgggactcgccacgcagctgtaccgagagttgatttgcgtgccttacatggccaaattcgtggtattcgctaagatgaatgatccggttgagtcttctctgaggtgcttctgtatgaccgatgataaggttgataaaacactcgagcaacaggagaatttcgaggaggtagccagaagcaaagacatcgaagtcctcgagggcaagcccatctacgtcgattgttacgggaacttggcccctctcactaagggggggcagcagttagtatttaacttctactcgtttaaggagaataggctgcctttttctatcaaaatccgtgacactagtcaggagccctgtggcagactgagttttctaaaagaacccaagacaaccaaagggctccctcagaccgccgtatgcaacctgaacataacattacccgcacacaagaaaatcgaaaagactgatcgcagacagagcttcgccagcttagctttgcgcaaaaggtatagttacctgaccgaacccggtatgtcagaatttccgaacacatttactaaccttcgtgggttctcatag

SEQ ID NO: 335577 - DNA, 2796 bp, Artificial Sequence
  derived and/or modified sequence
ttcaccctggcccacgtgccccagcggggcgagaccgccctgcacatggccgcaagaagcgggcaggccgaggtagtcagatatttagtccaggatggggcgcaggttgaggccaaggccaaagatgaccaaacacctcttcatatcagtgcaagactgggaaaagctgatattgtacagcagctgctgcagcaaggtgcgtcacctaatgccgccacaacgtccgggtacactccactgcatttgagtgcaagagagggccacgaagatgtcgcagcctttttactggaccacggtgcaagcctgagtattaccaccaagaaagggttcactccacttcacgtggctgccaaatacggaaagctggaggtggccaacctgctgttgcaaaagtctgcaagcccagatgccgccggaaagtccggcctgactcccctacatgtggccgctcattacgacaaccagaaggtggcccttttactcctggatcagggtgcatcccctcacgctgccgccaagaatgggtacacgcccctacacatagctgccaagaagaaccagatggacattgccacgacacttctggagtacggggcggacgcgaatgcagtgaccaggcaaggcatcgcatccgtccaccttgcagcccaggagggacatgtcgacatggtatctctgctgcttgggaggaatgccaacgtgaacctcagcaataagtccggcctcaccccattacatctggccgctcaagaggatcgcgtcaatgtcgctgaagtcctggtgaatcaaggtgcccacgtggacgcccagactaagatgggctataccccactgcatgtggggtgccactacggcaatataaagatagtgaactttctattacagcattcagcaaaagtaaacgccaaaacaaaaaacggttatacgcccttgcatcaagccgcccagcagggacatacacacataatcaacgtgctgctgcagaataacgcatctccgaatgaactgaccgtgaacggaaatactgccttgggaatcgcccggaggctaggctacatttcagtcgtcgacactcttaaaattgttaccgaagagacaatgaccaccaccaccgtgaccgagaagcacaaaatgaatgtgcccgaaaccatgaacgaggtgctcgacatgagcgatgatgaaggcgaggacgccatgacgggcgacactgacaaatatctcgggccacaagatcttaaagagcttggagacgactcactacctgctgagggttatatgggatttagcttgggcgcgcgttcagccagccgctccttttcctcagatcgctcctacacattgaacagatcatcttacgcgcgagatagtatgatgatcgaggagttgctggtgccatcaaaagaacaacacctgacctttacaagggagttcgattctgacagcctgcggcactactcttgggcagcagataccctagataacgtgaacctggttagttctcccatccattctggttatagcagcccactgccacagtatgattcaaggtttcttgtaagtttcatggttgatgcaagaggaggatctatgcgggggtcgcgtcatcatgggatgcgcatcataatcccaccgagaaagtgtaccgctcccaccaggatcacttgccgcctggtaaagaggcataagctggcaaacccccctcccatggtggagggcgaagggttggcttcccggctggtggaaatgggccctgcgggggcacaattcttaggtcctgtgatagttgaaatcccgcacttcggatccatgaggggaaaggagagggaattgattgtgctgcggagcgagaacggtgagacctggaaagagcatcaatttgactcaaagaatgaagatctcaccgagctgttgaacgggatggatgaagaactggatagtcctgaggagctgggcaagaagcggatttgccgcattatcacgaaagactttccacaatacttcgctgtggtctcaagaattaagcaggaatctaaccagatagggcctgaggggggcattctgagttccaccaccgtacccctggtccaggctagttttccggaaggcgccctaacaaagaggatcagagtcgggttgcaggcacaaccagttcctgacgagatagtcaaaaagatactgggaaacaaggccacgttcagccctatcgtgaccgtcgaaccccgccggaggaaatttcacaaacccatcacgatgaccatccctgtcccaccccctagtggagagggggtgagcaacggttacaagggtgacactacccctaaccttagactattgtgttctattaccggtggcacctcacccgcacagtgggaggatatcacaggaacgacacccttaacttttatcaaagactgcgtcagctttactaccaatgtatccgcacgcttctggctcgccgactgccatcaggtgctggaaaccgttggactagctactcagctttatcgcgaactcatttgcgtcccatatatggctaagttcgtggtttttgccaagatgaatgatcctgtcgaaagcagccttcgttgcttctgtatgaccgatgataaggttgacaaaacgctagaacagcaggagaatttcgaggaggttgcccgttccaaagacatagaggtaccatgcagtcagaaacaggtgcacttcattacatatagtagatacgaggttttattctgtggtctcaacagcacacactacaagattccctctgccctgcttatattgctgctattgtag

SEQ ID NO: 335578 - DNA, 4593 bp, Artificial Sequence
  derived and/or modified sequence
ggacaccatcatttgggtttttaaaagcttcagcttctccagcatctttgcattgtgaatatcttcctgcttctagtcaaagctttctctctagtgattggaatgctgctgtaagcctgattagaggtgcctgaggatatcaccttttacaaggaagccgtgtgtgcttgagaggatctttttaaatgcattatggctcatgcagcctcacaattaaagaaaaacagggatttagaaatcaatgctgaagaagagcctgagaaaaaaaggaaacaccgcaaacggtcccgggatcggaagaaaaagtctgatgccaatgcaagttacttaagagcagctcgagctggacaccttgaaaaggccctcgactacataaaaaatggagttgacatcaacatttgcaatcagaatgggttgaacgctctccaccttgcttccaaagaaggccatgtagaggttgtttctgagctgctgcagagagaagccaatgtggatgcagctacaaagaaaggaaacacagcattgcacatcgcatctttggctgggcaagcagaggtggtaaaagtcttggttacaaatggagccaatgtcaatgcacaatctcagaatggtttcacgccattgtatatggcagcccaggaaaatcacctggaagttgtcaagtttcttcttgacaatggtgcaagccagagcctagccacagaggatggcttcacaccattggcagtggctttgcaacaaggtcacgaccaagtcgtttcgctcctgctagagaatgacaccaaaggaaaagtgcgtctcccagctcttcatatcgcggcccgaaaagacgacacgaaagccgccgccctgctgctgcagaatgacaacaatgcagatgtggaatcaaagagtggcttcactccgctccacatagctgctcactatggaaatatcaatgtagccacgttgctgttaaaccgagcggctgctgtggatttcaccgcaaggaatgacatcactcctttacatgttgcatcaaaaagaggaaatgcaaatatggtaaaactattgctcgatcgaggagctaaaatcgatgccaaaaccagggatggtctgacaccactgcactgtggagcaaggagtggccacgagcaggtggtagaaatgttgcttgatcgagctgcccccattctttcaaaaaccaagaatggattatctccattgcacatggccacacaaggggatcatttaaactgcgtccagcttctcctccagcataatgtacccgtggatgatgtcaccaatgactacctgactgccctacacgtggctgcccactgtggccattacaaagttgccaaggttctcttggataagaaagctaaccccaatgccaaagccctgaatggctttacccctcttcatattgcctgcaagaagaatcgaattaaagtaatggaactccttctgaaacacggtgcatccatccaagctgtaaccgagtcgggccttaccccaatccatgttgctgccttcatggggcatgtaaatattgtatcacaactaatgcatcatggagcctcaccaaacaccaccaatgtgagaggagaaacagcactgcacatggcagctcgctccggccaagctgaagttgtgcggtatctggtacaagacggagctcaggtagaagctaaagctaaggatgaccaaacaccactccacatttcagcccgactggggaaagcagacatagtacaacagctgttgcagcaaggggcatctccaaatgcagccacaacttctgggtacaccccacttcacctttccgcccgagaggggcatgaggatgtggccgcgttccttttggatcatggagcgtctttatctataacaacaaagaaaggatttactcctcttcatgtggcagcaaaatatggaaagcttgaagtcgccaatctcctgctacagaaaagtgcatctccagatgctgctgggaagagcgggctaacaccactgcatgtagctgcacattacgataatcagaaagtggcccttctgcttttggaccaaggagcctcacctcacgcagccgcaaagaatggttatacgccactgcacatcgctgccaaaaagaaccagatggacatagcgacaactctgctggaatatggtgctgatgccaacgcagttacccggcaaggaattgcttccgtccatctcgcagctcaggaagggcacgtggacatggtgtcgctgctcctcggtagaaatgcgaatgtgaacctgagcaataagagcggcctgaccccactccatttggctgctcaagaagatcgagtgaatgtggcagaagtcctcgtaaaccaaggggctcatgtggacgcccagacaaagatgggatacacaccactgcatgtgggctgccactatggaaatatcaagattgttaatttcctgctccagcattctgcaaaagttaatgccaaaacaaagaatgggtatacgccattacatcaagcagcacagcaggggcatacgcatataataaatgtcttacttcagaacaacgcctcccccaatgaactcactgtgaatgggaatactgcccttggcattgcccggcgcctcggctacatctcagtagtggacaccctgaagatagtgaccgaagagaccatgaccacaactactgtcacagagaagcacaaaatgaatgttccagaaacgatgaatgaagttcttgatatgtctgatgatgaaggtgaagatgcaatgaccggggacacagacaaatatcttgggccacaggaccttaaggaattgggtgatgattccctgcctgcagagggttacatgggctttagtctcggagcgcgttctgccagttcggataggtcttacaccttgaacagaagctcctatgcacgggacagcatgatgattgaagaactccttgtgccatccaaagagcagcatctaacattcacaagggaatttgattcagattctcttagacattacagctgggctgcagacaccttagacaatgtcaatcttgtttcaagccccattcattctgggtttctggttagctttatggtggacgcgagagggggctccatgagaggaagccgtcatcacgggatgagaatcatcattcctccacgcaagtgtacggcccccactcgaatcacctgccgtttggtaaagagacataaactggccaacccaccccccatggtggaaggagagggattagccagtaggctggtagaaatgggtcctgcaggggcacaatttttaggccctgtcatagtggaaatccctcactttgggtccatgagaggaaaagagagagaactcattgttcttcgaagtgaaaatggtgaaacttggaaggagcatcagtttgacagcaaaaatgaagatttaaccgagttacttaatggcatggatgaagaacttgatagcccagaagagttagggaaaaagcgtatctgcaggattatcacgaaagatttcccccagtattttgcagtggtttcccggattaagcaggaaagcaaccagattggtcctgaaggtggaattctgagcagcaccacagtgccccttgttcaagcatctttcccagagggtgccctaactaaaagaattcgagtgggcctccaggcccagcctgttccagatgaaattgtgaaaaagatccttggaaacaaagcaacttttagcccaattgtcactgtggaaccaagaagacggaaattccataaaccaatcacaatgaccattccggtgcccccgccctcaggagaaggtgtatccaatggatacaaaggggacactacacccaatctgcgtcttctctgtagcattacagggggcacttcgcctgctcagtgggaagacatcacaggaacaactcctttgacgtttataaaagattgtgtctcctttacaaccaatgtttcagccagattttggcttgcagactgccatcaagttttagaaactgtggggttagccacgcaactgtacagagaattgatatgtgttccatatatggccaagtttgttgtttttgccaaaatgaatgatcccgtagaatcttccttgcgatgtttctgcatgacagatgacaaagtggacaaaactttagagcaacaagagaattttgaggaagtcgcaagaagcaaagatattgaggttctggaaggaaaacctatttatgttgattgttatggaaatttggccccacttaccaaaggaggacagcaacttgtttttaacttttattctttcaaagaaaatagactgccattttccatcaagattagagacaccagccaagagccctgtggtcgtctgtcttttctgaaagaaccaaagacaacaaaaggactgcctcaaacagcggtttgcaacttaaatatcactctgccagcacataaaaagattgagaaaacagatagacgacagagcttcgcatccttagctttacgtaagcgctacagctacttgactgagcctggaatgagtgagtttcctaacacatttactaatacgtggattttcataagaagagacattttttctatacaaaccaaattt

SEQ ID NO: 335579 - DNA, 4563 bp, Artificial Sequence
  derived and/or modified sequence
ggacaccatcatttgggtttttaaaagcttcagcttctccagcatctttgcattgtgaatatcttcctgcttctagtcaaagctttctctctagtgattggaatgctgctgtaagcctgattagaggtgcctgaggatatcaccttttacaaggaagccgtgtgtgcttgagaggatctttttaaatgcattatggctcatgcagcctcacaattaaagaaaaacagggatttagaaatcaatgctgaagaagagcctgagaaaaaaaggaaacaccgcaaacggtcccgggatcggaagaaaaagtctgatgccaatgcaagttacttaagagcagctcgagctggacaccttgaaaaggccctcgactacataaaaaatggagttgacatcaacatttgcaatcagaatgggttgaacgctctccaccttgcttccaaagaaggccatgtagaggttgtttctgagctgctgcagagagaagccaatgtggatgcagctacaaagaaaggaaacacagcattgcacatcgcatctttggctgggcaagcagaggtggtaaaagtcttggttacaaatggagccaatgtcaatgcacaatctcagaatggtttcacgccattgtatatggcagcccaggaaaatcacctggaagttgtcaagtttcttcttgacaatggtgcaagccagagcctagccacagaggatggcttcacaccattggcagtggctttgcaacaaggtcacgaccaagtcgtttcgctcctgctagagaatgacaccaaaggaaaagtgcgtctcccagctcttcatatcgcggcccgaaaagacgacacgaaagccgccgccctgctgctgcagaatgacaacaatgcagatgtggaatcaaagagtggcttcactccgctccacatagctgctcactatggaaatatcaatgtagccacgttgctgttaaaccgagcggctgctgtggatttcaccgcaaggaatgacatcactcctttacatgttgcatcaaaaagaggaaatgcaaatatggtaaaactattgctcgatcgaggagctaaaatcgatgccaaaaccagggatggtctgacaccactgcactgtggagcaaggagtggccacgagcaggtggtagaaatgttgcttgatcgagctgcccccattctttcaaaaaccaagaatggattatctccattgcacatggccacacaaggggatcatttaaactgcgtccagcttctcctccagcataatgtacccgtggatgatgtcaccaatgactacctgactgccctacacgtggctgcccactgtggccattacaaagttgccaaggttctcttggataagaaagctaaccccaatgccaaagccctgaatggctttacccctcttcatattgcctgcaagaagaatcgaattaaagtaatggaactccttctgaaacacggtgcatccatccaagctgtaaccgagtcgggccttaccccaatccatgttgctgccttcatggggcatgtaaatattgtatcacaactaatgcatcatggagcctcaccaaacaccaccaatgtgagaggagaaacagcactgcacatggcagctcgctccggccaagctgaagttgtgcggtatctggtacaagacggagctcaggtagaagctaaagctaaggatgaccaaacaccactccacatttcagcccgactggggaaagcagacatagtacaacagctgttgcagcaaggggcatctccaaatgcagccacaacttctgggtacaccccacttcacctttccgcccgagaggggcatgaggatgtggccgcgttccttttggatcatggagcgtctttatctataacaacaaagaaaggatttactcctcttcatgtggcagcaaaatatggaaagcttgaagtcgccaatctcctgctacagaaaagtgcatctccagatgctgctgggaagagcgggctaacaccactgcatgtagctgcacattacgataatcagaaagtggcccttctgcttttggaccaaggagcctcacctcacgcagccgcaaagaatggttatacgccactgcacatcgctgccaaaaagaaccagatggacatagcgacaactctgctggaatatggtgctgatgccaacgcagttacccggcaaggaattgcttccgtccatctcgcagctcaggaagggcacgtggacatggtgtcgctgctcctcggtagaaatgcgaatgatagcggcctgaccccactccatttggctgctcaagaagatcgagtgaatgtggcagaagtcctcgtaaaccaaggggctcatgtggacgcccagacaaagatgggatacacaccactgcatgtgggctgccactatggaaatatcaagattgttaatttcctgctccagcattctgcaaaagttaatgccaaaacaaagaatgggtatacgccattacatcaagcagcacagcaggggcatacgcatataataaatgtcttacttcagaacaacgcctcccccaatgaactcactgtgaatgggaatactgcccttggcattgcccggcgcctcggctacatctcagtagtggacaccctgaagatagtgaccgaagagaccatgaccacaactactgtcacagagaagcacaaaatgaatgttccagaaacgatgaatgaagttcttgatatgtctgatgatgaaggtgaagatgcaatgaccggggacacagacaaatatcttgggccacaggaccttaaggaattgggtgatgattccctgcctgcagagggttacatgggctttagtctcggagcgcgttctgccagcctccgctccttcagttcggataggtcttacaccttgaacagaagctcctatgcacgggacagcatgatgattgaagaactccttgtgccatccaaagagcagcatctaacattcacaagggaatttgattcagattctcttagacattacagctgggctgcagacaccttagacaatgtcaatcttgtttcaagccccattcattctgggtttctggttagctttatggtggacgcgagagggggctccatgagaggaagccgtcatcacgggatgagaatcatcattcctccacgcaagtgtacggcccccactcgaatcacctgccgtttggtaaagagacataaactggccaacccaccccccatggtggaaggagagggattagccagtaggctggtagaaatgggtcctgcaggggcacaatttttaggccctgtcatagtggaaatccctcactttgggtccatgagaggaaaagagagagaactcattgttcttcgaagtgaaaatggtgaaacttggaaggagcatcagtttgacagcaaaaatgaagatttaaccgagttacttaatggcatggatgaagaacttgatagcccagaagagttagggaaaaagcgtatctgcaggattatcacgaaagatttcccccagtattttgcagtggtttcccggattaagcaggaaagcaaccagattggtcctgaaggtggaattctgagcagcaccacagtgccccttgttcaagcatctttcccagagggtgccctaactaaaagaattcgagtgggcctccaggcccagcctgttccagatgaaattgtgaaaaagatccttggaaacaaagcaacttttagcccaattgtcactgtggaaccaagaagacggaaattccataaaccaatcacaatgaccattccggtgcccccgccctcaggagaaggtgtatccaatggatacaaaggggacactacacccaatctgcgtcttctctgtagcattacagggggcacttcgcctgctcagtgggaagacatcacaggaacaactcctttgacgtttataaaagattgtgtctcctttacaaccaatgtttcagccagattttggcttgcagactgccatcaagttttagaaactgtggggttagccacgcaactgtacagagaattgatatgtgttccatatatggccaagtttgttgtttttgccaaaatgaatgatcccgtagaatcttccttgcgatgtttctgcatgacagatgacaaagtggacaaaactttagagcaacaagagaattttgaggaagtcgcaagaagcaaagatattgaggttctggaaggaaaacctatttatgttgattgttatggaaatttggccccacttaccaaaggaggacagcaacttgtttttaacttttattctttcaaagaaaatagactgccattttccatcaagattagagacaccagccaagagccctgtggtcgtctgtcttttctgaaagaaccaaagacaacaaaaggactgcctcaaacagcggtttgcaacttaaatatcactctgccagcacataaaaagattgagaaaacagatagacgacagagcttcgcatccttagctttacgtaagcgctacagctacttgactgagcctggaatgagtgagtttcctaacacatttactaatctacgtggattttcataa

SEQ ID NO: 335580 - DNA, 2796 bp, Artificial Sequence
  derived and/or modified sequence
tttactttggctcatgttccccagagaggagaaacagcactgcacatggcagctcgctccggccaagctgaagttgtgcggtatctggtacaagacggagctcaggtagaagctaaagctaaggatgaccaaacaccactccacatttcagcccgactggggaaagcagacatagtacaacagctgttgcagcaaggggcatctccaaatgcagccacaacttctgggtacaccccacttcacctttccgcccgagaggggcatgaggatgtggccgcgttccttttggatcatggagcgtctttatctataacaacaaagaaaggatttactcctcttcatgtggcagcaaaatatggaaagcttgaagtcgccaatctcctgctacagaaaagtgcatctccagatgctgctgggaagagcgggctaacaccactgcatgtagctgcacattacgataatcagaaagtggcccttctgcttttggaccaaggagcctcacctcacgcagccgcaaagaatggttatacgccactgcacatcgctgccaaaaagaaccagatggacatagcgacaactctgctggaatatggtgctgatgccaacgcagttacccggcaaggaattgcttccgtccatctcgcagctcaggaagggcacgtggacatggtgtcgctgctcctcggtagaaatgcgaatgtgaacctgagcaataagagcggcctgaccccactccatttggctgctcaagaagatcgagtgaatgtggcagaagtcctcgtaaaccaaggggctcatgtggacgcccagacaaagatgggatacacaccactgcatgtgggctgccactatggaaatatcaagattgttaatttcctgctccagcattctgcaaaagttaatgccaaaacaaagaatgggtatacgccattacatcaagcagcacagcaggggcatacgcatataataaatgtcttacttcagaacaacgcctcccccaatgaactcactgtgaatgggaatactgcccttggcattgcccggcgcctcggctacatctcagtagtggacaccctgaagatagtgaccgaagagaccatgaccacaactactgtcacagagaagcacaaaatgaatgttccagaaacgatgaatgaagttcttgatatgtctgatgatgaaggtgaagatgcaatgaccggggacacagacaaatatcttgggccacaggaccttaaggaattgggtgatgattccctgcctgcagagggttacatgggctttagtctcggagcgcgttctgccagccgctccttcagttcggataggtcttacaccttgaacagaagctcctatgcacgggacagcatgatgattgaagaactccttgtgccatccaaagagcagcatctaacattcacaagggaatttgattcagattctcttagacattacagctgggctgcagacaccttagacaatgtcaatcttgtttcaagccccattcattctggctattcttctccacttcctcagtatgattcaaggtttctggttagctttatggtggacgcgagagggggctccatgagaggaagccgtcatcacgggatgagaatcatcattcctccacgcaagtgtacggcccccactcgaatcacctgccgtttggtaaagagacataaactggccaacccaccccccatggtggaaggagagggattagccagtaggctggtagaaatgggtcctgcaggggcacaatttttaggccctgtcatagtggaaatccctcactttgggtccatgagaggaaaagagagagaactcattgttcttcgaagtgaaaatggtgaaacttggaaggagcatcagtttgacagcaaaaatgaagatttaaccgagttacttaatggcatggatgaagaacttgatagcccagaagagttagggaaaaagcgtatctgcaggattatcacgaaagatttcccccagtattttgcagtggtttcccggattaagcaggaaagcaaccagattggtcctgaaggtggaattctgagcagcaccacagtgccccttgttcaagcatctttcccagagggtgccctaactaaaagaattcgagtgggcctccaggcccagcctgttccagatgaaattgtgaaaaagatccttggaaacaaagcaacttttagcccaattgtcactgtggaaccaagaagacggaaattccataaaccaatcacaatgaccattccggtgcccccgccctcaggagaaggtgtatccaatggatacaaaggggacactacacccaatctgcgtcttctctgtagcattacagggggcacttcgcctgctcagtgggaagacatcacaggaacaactcctttgacgtttataaaagattgtgtctcctttacaaccaatgtttcagccagattttggcttgcagactgccatcaagttttagaaactgtggggttagccacgcaactgtacagagaattgatatgtgttccatatatggccaagtttgttgtttttgccaaaatgaatgatcccgtagaatcttccttgcgatgtttctgcatgacagatgacaaagtggacaaaactttagagcaacaagagaattttgaggaagtcgcaagaagcaaagatattgaggtaccttgttcacaaaaacaagttcatttcattacgtactccagatatgaggttttattttgtggtcttaatagcactcactataaaataccaagtgcattattgattttacttttactttaa

SEQ ID NO: 335581 - DNA, 3387 bp, Artificial Sequence
  derived and/or modified sequence
atggcaacacagggggaccacctgaactgcgtgcagctgctactacagcataacgtgcccgtggacgatgtcaccaatgactacctcaccgcactccacgtagccgctcactgcggacattacaaggttgcgaaagtgttactggacaagaaggctaaccctaacgctaaggccctcaacgggtttacacccttgcacattgcatgcaagaaaaaccgaatcaaagtcatggaattgctactcaagcatggggctagcatccaggctgtaactgaatccggtctgactccgatccatgtggccgcttttatgggtcacgtcaatatagtatcacagttgatgcaccacggtgcttcccccaataccacaaatgtccggggagagactgcactccacatggccgcacgatctggccaagccgaggtggtgagatacctggtccaggacggagcccaggttgaagccaaggccaaagacgatcagacacctcttcacatctcagcgagactgggtaaagctgacatcgtacaacagctgctgcagcagggggcttcacccaacgcagcgacgactagcggctacacccctttacacctgtctgcgagggaaggtcacgaggatgtcgctgccttccttttggaccacggcgcttccctgtccatcaccacgaaaaaggggttcactccattacatgtggcagccaaatatgggaaactcgaggttgctaatctactacttcagaaaagtgcaagtcccgatgctgccggaaagtccggactcacacctctccacgttgcagcccactacgacaatcagaaggtggcgttgctgctgctcgatcagggagcctccccacacgcggctgcaaagaacggatacacgccactacacatcgccgctaaaaaaaaccagatggacattgccactactctgctggagtacggcgctgatgctaacgccgttacacggcaaggtatagccagcgtgcacctggcagcccaggagggccacgtggatatggtgtctctcctgttggggagaaatgccaatgttaacttatccaacaagagtggcctgacccctctacacctagccgcacaggaggacagagtaaatgtggcggaggtgctggtgaatcagggagcgcacgtggatgcccagaccaaaatggggtacaccccccttcacgtcggttgccactacggtaatattaaaatcgtgaactttctgctccagcacagtgctaaagtgaacgccaagacaaagaatgggtatacacctttgcaccaagcagcacagcagggacacactcacatcatcaatgtgctacttcagaacaacgcctctccaaacgagctgacggtcaatggaaatacagcattaggtatagctaggcggcttggctacatctccgtcgtagacactctgaagatcgtgacagaggagacaatgacaacaaccaccgttacagaaaagcataaaatgaatgtccccgaaacaatgaacgaagtactggatatgtccgacgacgagggggaggatgccatgactggggacacagacaagtatctgggtccccaggatcttaaggagttaggggacgactctctacccgcagaaggttatatggggtttagcctcggggcacgctccgcaagcagcgatcggtcatacactctgaatcggtccagctatgcccgtgacagtatgatgattgaagaattactggtccctagtaaggaacaacatctgactttcacccgggagtttgattccgattctcttagacattatagttgggccgctgacacccttgacaacgtcaatctggtctctagtcctattcatagcggcttcctagtcagcttcatggtcgacgctagaggagggagcatgcggggttcaaggcatcatggcatgcgcatcattatccccccaagaaaatgcacggcccctacacggatcacctgccggctggttaagaggcacaagcttgcaaacccccctccaatggtcgaaggagagggcctcgcgtctcggttagtggagatgggccctgcaggggctcagttccttggtcccgttattgtggaaatcccacatttcggttctatgaggggcaaggagagggagctcatagtgttgagaagcgaaaacggtgagacctggaaggagcatcaatttgatagtaagaatgaggatctgaccgaactcctgaacggaatggacgaagagctcgactcaccagaagaattggggaagaagcgcatttgtagaattatcacgaaagactttcctcagtacttcgctgtggtgtcaagaattaaacaagagtcgaatcagataggcccagaaggcggtattttatccagcactacggtccccctggtgcaggcctcgttccctgaaggggcacttaccaaacggatcagggtcgggttgcaggctcagcccgtcccggatgaaatagtaaaaaagatcctcggcaacaaagccactttttccccaattgtcactgttgagccaagacgtcgcaagttccacaaaccgatcacaatgaccatacccgttccacctccttcgggagagggcgtgtctaacggctataaaggagacaccacccctaacttgaggctgttatgcagcatcacagggggtacatctcccgctcagtgggaggacataaccggcacaacgccattgactttcatcaaagactgtgttagcttcacaactaacgtgagtgctcgcttttggctggctgactgccatcaggtgttagaaaccgtgggtctagccacgcagctgtatcgcgaattgatttgtgtgccgtatatggcaaagttcgtggtatttgccaagatgaatgaccctgtggaaagctccctgcgctgcttctgtatgaccgacgacaaggttgacaaaacactggaacagcaggaaaattttgaagaggtggccagaagtaaagatattgaggttctcgaggggaaaccgatctacgtcgactgctatggaaacttggcacccctgactaagggtggccagcaattagtgttcaatttctactcttttaaggaaaatagattgcccttttctatcaagattcgagatacatcccaggagccttgtggaaggctcagtttcttaaaagagcccaaaacaaccaagggcctgccgcagacagccgtttgtaatttgaatatcacactacctgcgcacaaaaaaattgagaagacggatcgccgacagagttttgcatcgctggctttgcggaaaaggtatagctacttgaccgaacctgggatgtccgagtttcctaataccttcacgaatacgtggatttttatcagacgtgatatctttagcattcagactaaattctag

SEQ ID NO: 335582 - DNA, 3354 bp, Artificial Sequence
  derived and/or modified sequence
atggccacacagggagatcacctcaactgcgtacagttgctgctgcaacataatgtgcctgtcgacgacgtgactaatgactatttaactgcgctgcatgtcgcagcacactgcggccactataaggtcgcgaaagtactcctcgacaaaaaagccaatccgaacgcaaaggctctgaacggatttacaccgctgcatattgcatgcaagaaaaacagaattaaggtgatggagctgctgctcaagcacggagcctccattcaggccgtcaccgagagtggccttacccccattcacgtggctgccttcatggggcacgtgaacatcgtgtcacagctgatgcatcacggtgcatcccctaataccactaacgtgcgaggtgagacagcactccacatggcagcacggtccgggcaggccgaagtagttcggtacctggtacaggacggagctcaggtagaggcaaaggcaaaggacgaccagactcctctgcacatcagcgctcggctgggtaaagccgatatagtgcagcaactgctgcagcagggggcttctcccaatgctgcaaccacaagtggttacactccgctccacttaagtgctagggaaggccacgaggatgttgcagcattcctccttgatcatggtgcatccctatccataaccaccaaaaagggattcactcctttacatgtcgccgctaaatatggaaaacttgaggtggccaacctgctactccagaaatccgcttcaccggacgccgctggtaagagcgggttaacacccttacacgtggccgctcactacgacaatcagaaggtagccctgctgttgctggatcagggagcctcccctcacgccgctgcaaaaaacggctacactcccctgcatattgctgccaagaagaatcagatggacatcgctactaccctgcttgaatatggcgctgacgccaatgccgtcactagacagggcatcgcctcggtccacctcgcagcccaggaaggtcatgtagacatggtgtctctgctcctgggccgtaacgccaatgatagtggactgactcccctgcatcttgccgctcaggaggacagggtgaacgtagcagaggtgctggttaatcagggtgctcacgtagatgctcagacaaagatgggatatactccactgcatgtcggctgtcactatggtaacataaagatcgtaaactttctgttgcagcactcagctaaagttaacgcaaagacgaaaaatggctatacccctctccaccaggctgcacaacagggacacactcatattattaatgttctgctacagaacaacgcatcccccaacgaacttaccgtgaacggcaatacggccctggggatcgcgcgtagactcggatacattagtgtggttgatactctcaaaattgtgacagaggaaaccatgaccaccacaaccgttacagaaaaacacaagatgaacgtgccagagacgatgaacgaggttttggatatgtcagacgacgagggggaagatgcgatgaccggtgacaccgacaaatatttgggccctcaggatcttaaggaacttggcgatgatagtctcccggcagagggctatatgggcttcagtttgggcgctaggagtgcttcactgcgcagtttctcctccgacagatcttacacgctgaatcgtagcagctacgcccgagacagtatgatgattgaggaactgctcgtcccttccaaggagcagcacctgacttttacacgcgagtttgactcagactcccttaggcactacagctgggctgctgataccctagacaatgtgaatctcgttagcagcccaattcactccggttttctagtgagcttcatggtggatgccagaggaggctcaatgcggggatcacggcaccacgggatgagaatcatcatcccacccaggaagtgcactgctcccacaagaatcacctgcagattggtgaagcgccataagttggcaaatccccctccaatggtggagggcgaagggctagcaagcaggcttgtcgaaatgggaccagcaggggctcagttcctcgggccagttattgtagaaattcctcacttcggctccatgagaggtaaagaaagggagttaatcgtgttacggtctgaaaacggcgaaacctggaaggagcaccaattcgattcgaaaaatgaagatctaactgagttactgaacggtatggatgaagagctggattcccctgaggaactcggcaaaaaacgtatctgtagaataattaccaaagactttccgcaatactttgcggtcgtcagtagaatcaagcaagaatcaaaccagattggccctgaaggcggtatcctgtcatcaacgactgttccgctggtacaggcaagcttccctgagggtgccctgacaaaaagaattagggttgggctgcaggctcaacccgtgccggatgagatcgtgaagaaaattctgggtaacaaagctacgttcagccccattgtgaccgtggaacccaggcgcagaaagttccacaagcccattacaatgactatccctgttccacccccaagcggcgagggcgtaagtaacggctacaagggggacactacccccaatctacgtctgctttgctcgatcaccggaggaacttcacccgcacagtgggaggatatcaccggaactaccccattgacttttattaaggactgtgtgtctttcaccactaacgtgtctgctcgcttctggcttgctgactgccaccaagtgttggaaacagtcggactagccacccaattatatagagaactgatctgcgtgccttatatggcgaagtttgtcgtatttgctaagatgaacgaccctgtggagagctctttgcgctgcttctgcatgaccgacgataaggttgacaagaccctcgaacagcaggaaaacttcgaggaagttgcaagaagtaaagacatagaggtgctggagggtaaacccatttatgtggattgttacggcaacctggctcctctcaccaagggcggacaacagttggtcttcaacttctacagcttcaaggagaaccgccttcctttctccatcaaaatacgggatacctcgcaggaaccatgtgggagattgtcgtttctgaaggaacctaagacaactaaaggcctcccccagaccgctgtgtgtaacctgaatatcacactgcccgcacacaaaaaaatagaaaaaacagaccggaggcagagcttcgcatcactcgctctaaggaaacgatatagctatctcaccgaaccaggaatgtcagagtttcccaacacatttacaaatctgcggggtttctcttag

SEQ ID NO: 335583 - DNA, 2796 bp, Artificial Sequence
  derived and/or modified sequence
tttacgttggcccatgtgccacaacggggagagaccgcactacatatggcggctcgatcagggcaagctgaggtcgtccgctacctcgttcaagacggagcccaggtcgaggcaaaagccaaagatgatcaaacccctctgcacatctcagccaggctcggcaaagcagacatcgttcagcaactcttgcagcagggggcatcacctaatgcagcgacaacttcaggttatactcccctacacctctccgctagggaggggcatgaagatgttgccgcatttttactggatcatggcgcttcactatccattacgacaaagaagggctttacccccctgcacgtggccgctaaatacggaaaattggaagtcgctaacttgttgctgcagaaatcagcaagcccagacgcagccggaaagtctggtctgactcctctgcacgtggctgcacattacgacaatcagaaggtagccttactgcttcttgaccagggggcttccccacacgctgcggctaagaatggatacacccctctgcatattgccgcaaaaaaaaaccaaatggatatcgcgacgaccctcctcgagtatggagcggatgccaacgcagtgacccgacagggtatagcttccgttcatctcgccgctcaggaaggacacgttgacatggtgagcttactgctgggccgaaatgctaacgttaacttatcgaataaaagcggattgacaccactacatttggccgctcaagaggatcgtgtgaatgtcgccgaggtgctcgtgaaccaaggagcccacgtagacgcccagacaaaaatgggatacacgccactgcacgtcgggtgccattatgggaacatcaagattgtcaacttcctcctgcaacattctgccaaggtgaatgcaaagactaagaacggctacactcccctgcaccaggccgcacagcaggggcatacccacatcataaacgtcctgttgcagaacaatgcaagtcccaatgagctgacagttaacggcaataccgccctaggtatcgccaggagactgggttatattagcgtggttgatacactcaaaatagtgactgaggaaacaatgacaaccaccaccgtgaccgaaaaacataaaatgaacgttcccgagaccatgaacgaggtgctcgacatgagcgatgatgaaggagaagacgccatgacgggggatacagataagtacctgggtccccaagatctgaaggagcttggagacgattcattgcctgccgaagggtacatgggcttctcactgggcgcaagatcagccagtcggagtttctcctcagacaggagctacactttaaatcgaagttcatatgccagggactcgatgatgattgaggaactgctggtccccagcaaggaacaacacctgacctttacccgagagttcgatagtgatagtctacgccactattcttgggctgccgatactctggacaacgtgaatctggtatccagccctatccacagtggatactcctccccgttaccccagtacgattcacggtttctggtttccttcatggttgacgcacgcggtggcagcatgcgtgggtcacgccaccacggaatgcggattataatcccgcctcgcaagtgcaccgcccctactagaatcacttgccgcctggtgaaacgacacaagctggcgaatcccccaccgatggtggagggagaaggcctcgcttctagattagtggagatgggccctgccggagcccaatttttgggccctgtgattgtagagattccacatttcggaagtatgcgaggtaaggagcgcgagctaatcgtgctcagaagtgaaaacggcgagacttggaaggagcatcagttcgactccaagaatgaagacctgactgagttattgaatggaatggatgaggagctggacagccccgaggaactggggaagaaacgtatatgtagaatcatcactaaagacttccctcagtattttgcggtggtatctcggattaagcaagaaagcaaccagatcgggcctgaaggagggatcctgtcttcaacaacagtaccactggtgcaggcatcgtttcccgagggcgctctgacaaaacggatcagagttggcctgcaagcacagcccgtaccagacgaaatcgtgaagaaaatcctgggtaataaggcaaccttttctcctatagttaccgtggagcctcgacgtcggaaattccacaaaccgataacgatgacaatccccgttcccccaccctcaggggagggcgtctctaatggatataagggagacactactcccaacctgcggctgctgtgttctataacaggagggacaagcccagctcagtgggaggacatcacaggtaccacccctctgacctttataaaggactgcgtttcattcacaaccaacgttagcgcaaggttctggttagccgactgccatcaggtactagagactgttggcctagctacccaactctaccgcgagttgatttgcgttccatatatggctaaatttgttgtatttgcaaagatgaacgatccggttgagagttctctacgctgcttctgcatgacagacgataaagtcgataagacacttgaacagcaagagaactttgaagaagttgctcgcagcaaggacatagaagtcccttgcagccagaagcaggttcattttataacatattcaaggtacgaggtgctattttgcggcctgaacagtacgcactacaagattccttctgctctgctgattttgttgcttctgtag

SEQ ID NO: 335584 - DNA, 3387 bp, Artificial Sequence
  derived and/or modified sequence
atggccacccagggcgaccacctgaactgcgtgcagctgctgctgcagcacaacgtgcccgtggacgacgtgaccaacgactacctgaccgccctgcacgtggccgcccactgcggccactacaaggtggccaaggtgctgctggacaagaaggccaaccccaacgccaaggccctgaacggcttcacccccctgcacatcgcctgcaagaagaacagaatcaaggtgatggagctgctgctgaagcacggcgccagcatccaggccgtgaccgagagcggcctgacccccatccacgtggccgccttcatgggccacgtgaacatcgtgagccagctgatgcaccacggcgccagccccaacaccaccaacgtgagaggcgagaccgccctgcacatggccgccagaagcggccaggccgaggtggtgagatacctggtgcaggacggcgcccaggtggaggccaaggccaaggacgaccagacccccctgcacatcagcgccagactgggcaaggccgacatcgtgcagcagctgctgcagcagggcgccagccccaacgccgccaccaccagcggctacacccccctgcacctgagcgccagagagggccacgaggacgtggccgccttcctgctggaccacggcgccagcctgagcatcaccaccaagaagggcttcacccccctgcacgtggccgccaagtacggcaagctggaggtggccaacctgctgctgcagaagagcgccagccccgacgccgccggcaagagcggcctgacccccctgcacgtggccgcccactacgacaaccagaaggtggccctgctgctgctggaccagggcgccagcccccacgccgccgccaagaacggctacacccccctgcacatcgccgccaagaagaaccagatggacatcgccaccaccctgctggagtacggcgccgacgccaacgccgtgaccagacagggcatcgccagcgtgcacctggccgcccaggagggccacgtggacatggtgagcctgctgctgggcagaaacgccaacgtgaacctgagcaacaagagcggcctgacccccctgcacctggccgcccaggaggacagagtgaacgtggccgaggtgctggtgaaccagggcgcccacgtggacgcccagaccaagatgggctacacccccctgcacgtgggctgccactacggcaacatcaagatcgtgaacttcctgctgcagcacagcgccaaggtgaacgccaagaccaagaacggctacacccccctgcaccaggccgcccagcagggccacacccacatcatcaacgtgctgctgcagaacaacgccagccccaacgagctgaccgtgaacggcaacaccgccctgggcatcgccagaagactgggctacatcagcgtggtggacaccctgaagatcgtgaccgaggagaccatgaccaccaccaccgtgaccgagaagcacaagatgaacgtgcccgagaccatgaacgaggtgctggacatgagcgacgacgagggcgaggacgccatgaccggcgacaccgacaagtacctgggcccccaggacctgaaggagctgggcgacgacagcctgcccgccgagggctacatgggcttcagcctgggcgccagaagcgccagcagcgacagaagctacaccctgaacagaagcagctacgccagagacagcatgatgatcgaggagctgctggtgcccagcaaggagcagcacctgaccttcaccagagagttcgacagcgacagcctgagacactacagctgggccgccgacaccctggacaacgtgaacctggtgagcagccccatccacagcggcttcctggtgagcttcatggtggacgccagaggcggcagcatgagaggcagcagacaccacggcatgagaatcatcatcccccccagaaagtgcaccgcccccaccagaatcacctgcagactggtgaagagacacaagctggccaaccccccccccatggtggagggcgagggcctggccagcagactggtggagatgggccccgccggcgcccagttcctgggccccgtgatcgtggagatcccccacttcggcagcatgagaggcaaggagagagagctgatcgtgctgagaagcgagaacggcgagacctggaaggagcaccagttcgacagcaagaacgaggacctgaccgagctgctgaacggcatggacgaggagctggacagccccgaggagctgggcaagaagagaatctgcagaatcatcaccaaggacttcccccagtacttcgccgtggtgagcagaatcaagcaggagagcaaccagatcggccccgagggcggcatcctgagcagcaccaccgtgcccctggtgcaggccagcttccccgagggcgccctgaccaagagaatcagagtgggcctgcaggcccagcccgtgcccgacgagatcgtgaagaagatcctgggcaacaaggccaccttcagccccatcgtgaccgtggagcccagaagaagaaagttccacaagcccatcaccatgaccatccccgtgcccccccccagcggcgagggcgtgagcaacggctacaagggcgacaccacccccaacctgagactgctgtgcagcatcaccggcggcaccagccccgcccagtgggaggacatcaccggcaccacccccctgaccttcatcaaggactgcgtgagcttcaccaccaacgtgagcgccagattctggctggccgactgccaccaggtgctggagaccgtgggcctggccacccagctgtacagagagctgatctgcgtgccctacatggccaagttcgtggtgttcgccaagatgaacgaccccgtggagagcagcctgagatgcttctgcatgaccgacgacaaggtggacaagaccctggagcagcaggagaacttcgaggaggtggccagaagcaaggacatcgaggtgctggagggcaagcccatctacgtggactgctacggcaacctggcccccctgaccaagggcggccagcagctggtgttcaacttctacagcttcaaggagaacagactgcccttcagcatcaagatcagagacaccagccaggagccctgcggcagactgagcttcctgaaggagcccaagaccaccaagggcctgccccagaccgccgtgtgcaacctgaacatcaccctgcccgcccacaagaagatcgagaagaccgacagaagacagagcttcgccagcctggccctgagaaagagatacagctacctgaccgagcccggcatgagcgagttccccaacaccttcaccaacacctggatcttcatcagaagagacatcttcagcatccagaccaagttctag

SEQ ID NO: 335585 - DNA, 3354 bp, Artificial Sequence
  derived and/or modified sequence
atggccacccagggcgaccacctgaactgcgtgcagctgctgctgcagcacaacgtgcccgtggacgacgtgaccaacgactacctgaccgccctgcacgtggccgcccactgcggccactacaaggtggccaaggtgctgctggacaagaaggccaaccccaacgccaaggccctgaacggcttcacccccctgcacatcgcctgcaagaagaacagaatcaaggtgatggagctgctgctgaagcacggcgccagcatccaggccgtgaccgagagcggcctgacccccatccacgtggccgccttcatgggccacgtgaacatcgtgagccagctgatgcaccacggcgccagccccaacaccaccaacgtgagaggcgagaccgccctgcacatggccgccagaagcggccaggccgaggtggtgagatacctggtgcaggacggcgcccaggtggaggccaaggccaaggacgaccagacccccctgcacatcagcgccagactgggcaaggccgacatcgtgcagcagctgctgcagcagggcgccagccccaacgccgccaccaccagcggctacacccccctgcacctgagcgccagagagggccacgaggacgtggccgccttcctgctggaccacggcgccagcctgagcatcaccaccaagaagggcttcacccccctgcacgtggccgccaagtacggcaagctggaggtggccaacctgctgctgcagaagagcgccagccccgacgccgccggcaagagcggcctgacccccctgcacgtggccgcccactacgacaaccagaaggtggccctgctgctgctggaccagggcgccagcccccacgccgccgccaagaacggctacacccccctgcacatcgccgccaagaagaaccagatggacatcgccaccaccctgctggagtacggcgccgacgccaacgccgtgaccagacagggcatcgccagcgtgcacctggccgcccaggagggccacgtggacatggtgagcctgctgctgggcagaaacgccaacgacagcggcctgacccccctgcacctggccgcccaggaggacagagtgaacgtggccgaggtgctggtgaaccagggcgcccacgtggacgcccagaccaagatgggctacacccccctgcacgtgggctgccactacggcaacatcaagatcgtgaacttcctgctgcagcacagcgccaaggtgaacgccaagaccaagaacggctacacccccctgcaccaggccgcccagcagggccacacccacatcatcaacgtgctgctgcagaacaacgccagccccaacgagctgaccgtgaacggcaacaccgccctgggcatcgccagaagactgggctacatcagcgtggtggacaccctgaagatcgtgaccgaggagaccatgaccaccaccaccgtgaccgagaagcacaagatgaacgtgcccgagaccatgaacgaggtgctggacatgagcgacgacgagggcgaggacgccatgaccggcgacaccgacaagtacctgggcccccaggacctgaaggagctgggcgacgacagcctgcccgccgagggctacatgggcttcagcctgggcgccagaagcgccagcctgagaagcttcagcagcgacagaagctacaccctgaacagaagcagctacgccagagacagcatgatgatcgaggagctgctggtgcccagcaaggagcagcacctgaccttcaccagagagttcgacagcgacagcctgagacactacagctgggccgccgacaccctggacaacgtgaacctggtgagcagccccatccacagcggcttcctggtgagcttcatggtggacgccagaggcggcagcatgagaggcagcagacaccacggcatgagaatcatcatcccccccagaaagtgcaccgcccccaccagaatcacctgcagactggtgaagagacacaagctggccaaccccccccccatggtggagggcgagggcctggccagcagactggtggagatgggccccgccggcgcccagttcctgggccccgtgatcgtggagatcccccacttcggcagcatgagaggcaaggagagagagctgatcgtgctgagaagcgagaacggcgagacctggaaggagcaccagttcgacagcaagaacgaggacctgaccgagctgctgaacggcatggacgaggagctggacagccccgaggagctgggcaagaagagaatctgcagaatcatcaccaaggacttcccccagtacttcgccgtggtgagcagaatcaagcaggagagcaaccagatcggccccgagggcggcatcctgagcagcaccaccgtgcccctggtgcaggccagcttccccgagggcgccctgaccaagagaatcagagtgggcctgcaggcccagcccgtgcccgacgagatcgtgaagaagatcctgggcaacaaggccaccttcagccccatcgtgaccgtggagcccagaagaagaaagttccacaagcccatcaccatgaccatccccgtgcccccccccagcggcgagggcgtgagcaacggctacaagggcgacaccacccccaacctgagactgctgtgcagcatcaccggcggcaccagccccgcccagtgggaggacatcaccggcaccacccccctgaccttcatcaaggactgcgtgagcttcaccaccaacgtgagcgccagattctggctggccgactgccaccaggtgctggagaccgtgggcctggccacccagctgtacagagagctgatctgcgtgccctacatggccaagttcgtggtgttcgccaagatgaacgaccccgtggagagcagcctgagatgcttctgcatgaccgacgacaaggtggacaagaccctggagcagcaggagaacttcgaggaggtggccagaagcaaggacatcgaggtgctggagggcaagcccatctacgtggactgctacggcaacctggcccccctgaccaagggcggccagcagctggtgttcaacttctacagcttcaaggagaacagactgcccttcagcatcaagatcagagacaccagccaggagccctgcggcagactgagcttcctgaaggagcccaagaccaccaagggcctgccccagaccgccgtgtgcaacctgaacatcaccctgcccgcccacaagaagatcgagaagaccgacagaagacagagcttcgccagcctggccctgagaaagagatacagctacctgaccgagcccggcatgagcgagttccccaacaccttcaccaacctgagaggcttcagctag

SEQ ID NO: 335586 - DNA, 2796 bp, Artificial Sequence
  derived and/or modified sequence
ttcaccctggcccacgtgccccagagaggcgagaccgccctgcacatggccgccagaagcggccaggccgaggtggtgagatacctggtgcaggacggcgcccaggtggaggccaaggccaaggacgaccagacccccctgcacatcagcgccagactgggcaaggccgacatcgtgcagcagctgctgcagcagggcgccagccccaacgccgccaccaccagcggctacacccccctgcacctgagcgccagagagggccacgaggacgtggccgccttcctgctggaccacggcgccagcctgagcatcaccaccaagaagggcttcacccccctgcacgtggccgccaagtacggcaagctggaggtggccaacctgctgctgcagaagagcgccagccccgacgccgccggcaagagcggcctgacccccctgcacgtggccgcccactacgacaaccagaaggtggccctgctgctgctggaccagggcgccagcccccacgccgccgccaagaacggctacacccccctgcacatcgccgccaagaagaaccagatggacatcgccaccaccctgctggagtacggcgccgacgccaacgccgtgaccagacagggcatcgccagcgtgcacctggccgcccaggagggccacgtggacatggtgagcctgctgctgggcagaaacgccaacgtgaacctgagcaacaagagcggcctgacccccctgcacctggccgcccaggaggacagagtgaacgtggccgaggtgctggtgaaccagggcgcccacgtggacgcccagaccaagatgggctacacccccctgcacgtgggctgccactacggcaacatcaagatcgtgaacttcctgctgcagcacagcgccaaggtgaacgccaagaccaagaacggctacacccccctgcaccaggccgcccagcagggccacacccacatcatcaacgtgctgctgcagaacaacgccagccccaacgagctgaccgtgaacggcaacaccgccctgggcatcgccagaagactgggctacatcagcgtggtggacaccctgaagatcgtgaccgaggagaccatgaccaccaccaccgtgaccgagaagcacaagatgaacgtgcccgagaccatgaacgaggtgctggacatgagcgacgacgagggcgaggacgccatgaccggcgacaccgacaagtacctgggcccccaggacctgaaggagctgggcgacgacagcctgcccgccgagggctacatgggcttcagcctgggcgccagaagcgccagcagaagcttcagcagcgacagaagctacaccctgaacagaagcagctacgccagagacagcatgatgatcgaggagctgctggtgcccagcaaggagcagcacctgaccttcaccagagagttcgacagcgacagcctgagacactacagctgggccgccgacaccctggacaacgtgaacctggtgagcagccccatccacagcggctacagcagccccctgccccagtacgacagcagattcctggtgagcttcatggtggacgccagaggcggcagcatgagaggcagcagacaccacggcatgagaatcatcatcccccccagaaagtgcaccgcccccaccagaatcacctgcagactggtgaagagacacaagctggccaaccccccccccatggtggagggcgagggcctggccagcagactggtggagatgggccccgccggcgcccagttcctgggccccgtgatcgtggagatcccccacttcggcagcatgagaggcaaggagagagagctgatcgtgctgagaagcgagaacggcgagacctggaaggagcaccagttcgacagcaagaacgaggacctgaccgagctgctgaacggcatggacgaggagctggacagccccgaggagctgggcaagaagagaatctgcagaatcatcaccaaggacttcccccagtacttcgccgtggtgagcagaatcaagcaggagagcaaccagatcggccccgagggcggcatcctgagcagcaccaccgtgcccctggtgcaggccagcttccccgagggcgccctgaccaagagaatcagagtgggcctgcaggcccagcccgtgcccgacgagatcgtgaagaagatcctgggcaacaaggccaccttcagccccatcgtgaccgtggagcccagaagaagaaagttccacaagcccatcaccatgaccatccccgtgcccccccccagcggcgagggcgtgagcaacggctacaagggcgacaccacccccaacctgagactgctgtgcagcatcaccggcggcaccagccccgcccagtgggaggacatcaccggcaccacccccctgaccttcatcaaggactgcgtgagcttcaccaccaacgtgagcgccagattctggctggccgactgccaccaggtgctggagaccgtgggcctggccacccagctgtacagagagctgatctgcgtgccctacatggccaagttcgtggtgttcgccaagatgaacgaccccgtggagagcagcctgagatgcttctgcatgaccgacgacaaggtggacaagaccctggagcagcaggagaacttcgaggaggtggccagaagcaaggacatcgaggtgccctgcagccagaagcaggtgcacttcatcacctacagcagatacgaggtgctgttctgcggcctgaacagcacccactacaagatccccagcgccctgctgatcctgctgctgctgtag

SEQ ID NO: 335587 - DNA, 243 bp, Artificial Sequence
  derived and/or modified sequence
atgtgcctgatcagcctgtgtgtgtccttcacctctgtgaacaagcgggagcagaacaagcccaagatcctgatcctgctgaagaagaggctgagcggctgcttcatcaaggaggcccggggcacccggctgaagggcaaccagctggccgtgaccaaggccagagatgatggcggcctggccgaggatggagacagcggcggcggcaaggtgatccgcttctggatctactttgagggctag

SEQ ID NO: 335588 - DNA, 1724 bp, Artificial Sequence
  derived and/or modified sequence
aagttttacttctccctagagcaggggtgtttgccagcagcctgcactctcagaaatcagacttgagtggccggaacccttgagaccagaggcttaccatgctgctccctaggagggccaggaactgctgacgtgaccactggacagttattcgtgtctcttacaattaccaaacagaatggacaagcttaataaaataaccgtccccgccagtcagaagttgaggcagcttcaaaagatggtccatgatattaaaaacaatgaaggtggaataatgaataaaatcaaaaagacagcgactatgaaaatccagatgagcactcggactcagagatgtacgtgatgcccgccgaggagaacgctgatgacagctacgagccgcctccagtagagcaggaaaccaggccggttcacccagccctgcccttcgccagaggcgagtatatagacaatcgatcaagccagaggcattccccacccttcagcaagacacttcccagtaagcccagctggccttcagagaaagcaaggctcacctccaccctgccggccctgactgctttgcagaaacctcaagtcccacccaaacccaaaggcctccttgaggatgaggctgattatgtggtccccgtggaagataatgatgaaaactatattcatcccacagaaagcagttcacctccacctgaaaaagctcccatggtgaatagatcaaccaagccaaattcctcaacgcccgcctctcctccaggaacagcttcaggtcgaaacagtggggcctgggaaaccaagtcacctccaccagctgcaccatccccgttgccacgggccgggaaaaaaccaacgacaccactgaagacaactccagttgcctctcaacagaatgcttcaagtgtttgtgaagaaaaacctatacctgctgaacgccaccgagggtcaagtcacagacaagaagctgtgcagtcaccagtgtttcctcctgcccagaaacaaatccaccaaaaacccatacctctgccaagatttacagaagggggaaacccaactgtggatgggcccctacccagcttttcatctaattccactatttcagaacaggaagctggcgttctctgcaagccatggtatgctggagcctgtgatcgaaagtctgctgaagaggcattgcacagatcaaacaaggatggatcatttcttattcggaaaagctctggccatgattccaaacaaccatatacactagttgtattctttaataagcgagtatataatattcctgtgcgatttattgaagcaacaaaacaatatgccttgggcagaaagaaaaatggtgaagagtactttggaagtgttgctgaaatcatcaggaatcatcaacatagtcctttggttcttattgacagtcagaataacacaaaagattccaccagactgaagtatgcagttaaagtttcataaagggggaaaaaaaagatcaataccattgcttcagacactttcccaaagtttctccttttgagaaaaagtcccaaaacttcatattttggattatgaatcatccagtaataaaatggaagatggagtcagctattgaagtggtcatccatttctttttaagaagctcatgtggacttgttctattgcctgacctgatgaactgttaatatctggtgaggttgagttatcatgctactaatattttccaaataaatatttttattttt

SEQ ID NO: 335589 - protein, 587 aa, Artificial Sequence
  derived and/or modified sequence
MSTAIPGLKKGNNALQSIILQTLLEKENGQRKYGGPPPGWDAAPPERGCEIFIGKLPRDLFEDELIPLCEKIGKIYEMRMMMDFNGNNRGYAFVTFSNKVEAKNAIKQLNNYEIRNGRLLGVCASVDNCRLFVGGIPKTKKREEILSEMKKVTEGVVDVIVYPSAADKTKNRGFAFVEYESHRAAAMARRKLLPGRIQLWGHGIAVDWAEPEVEVDEDTMSSVKILYVRNLMLSTSEEMIEKEFNNIKPGAVERVKKIRDYAFVHFSNREDAVEAMKALNGKVLDGSPIEVTLAKPVDKDSYVRYTRGTGGRGTMLQGEYTYSLGQVYDPTTTYLGAPVFYAPQTYAAIPSLHFPATKGHLSNRAIIRAPSVREIYMNVPVGAAGVRGLGGRGYLAYTGLGRGYQVKGDKREDKLYDILPGMELTPMNPVTLKPQGIKLAPQILEEICQKNNWGQPVYQLHSAIGQDQRQLFLYKITIPALASQNPAIHPFTPPKLSAFVDEAKTYAAEYTLQTLGIPTDGGDGTMATAAAAATAFPGYAVPNATAPVSAAQLKQAVTLGQDLAAYTTYEVYPTFAVTARGDGYGTF

SEQ ID NO: 335590 - DNA, 1764 bp, Artificial Sequence
  derived and/or modified sequence
atgagcaccgccatccccggcctgaagaagggcaacaacgccctgcagagcatcatcctgcagaccctgctggagaaggagaacggccagagaaagtacggcggccccccccccggctgggacgccgccccccccgagagaggctgcgagatcttcatcggcaagctgcccagagacctgttcgaggacgagctgatccccctgtgcgagaagatcggcaagatctacgagatgagaatgatgatggacttcaacggcaacaacagaggctacgccttcgtgaccttcagcaacaaggtggaggccaagaacgccatcaagcagctgaacaactacgagatcagaaacggcagactgctgggcgtgtgcgccagcgtggacaactgcagactgttcgtgggcggcatccccaagaccaagaagagagaggagatcctgagcgagatgaagaaggtgaccgagggcgtggtggacgtgatcgtgtaccccagcgccgccgacaagaccaagaacagaggcttcgccttcgtggagtacgagagccacagagccgccgccatggccagaagaaagctgctgcccggcagaatccagctgtggggccacggcatcgccgtggactgggccgagcccgaggtggaggtggacgaggacaccatgagcagcgtgaagatcctgtacgtgagaaacctgatgctgagcaccagcgaggagatgatcgagaaggagttcaacaacatcaagcccggcgccgtggagagagtgaagaagatcagagactacgccttcgtgcacttcagcaacagagaggacgccgtggaggccatgaaggccctgaacggcaaggtgctggacggcagccccatcgaggtgaccctggccaagcccgtggacaaggacagctacgtgagatacaccagaggcaccggcggcagaggcaccatgctgcagggcgagtacacctacagcctgggccaggtgtacgaccccaccaccacctacctgggcgcccccgtgttctacgccccccagacctacgccgccatccccagcctgcacttccccgccaccaagggccacctgagcaacagagccatcatcagagcccccagcgtgagagagatctacatgaacgtgcccgtgggcgccgccggcgtgagaggcctgggcggcagaggctacctggcctacaccggcctgggcagaggctaccaggtgaagggcgacaagagagaggacaagctgtacgacatcctgcccggcatggagctgacccccatgaaccccgtgaccctgaagccccagggcatcaagctggccccccagatcctggaggagatctgccagaagaacaactggggccagcccgtgtaccagctgcacagcgccatcggccaggaccagagacagctgttcctgtacaagatcaccatccccgccctggccagccagaaccccgccatccaccccttcaccccccccaagctgagcgccttcgtggacgaggccaagacctacgccgccgagtacaccctgcagaccctgggcatccccaccgacggcggcgacggcaccatggccaccgccgccgccgccgccaccgccttccccggctacgccgtgcccaacgccaccgcccccgtgagcgccgcccagctgaagcaggccgtgaccctgggccaggacctggccgcctacaccacctacgaggtgtaccccaccttcgccgtgaccgccagaggcgacggctacggcaccttctag

SEQ ID NO: 335591 - DNA, 1764 bp, Artificial Sequence
  derived and/or modified sequence
atgtcaactgctatccccgggctcaagaaggggaataacgccctgcagtccatcatcctccaaacccttttagagaaggagaacggacagcgaaagtatggaggtcccccacccggctgggacgctgcaccacctgaacggggatgcgaaattttcataggcaaactcccccgggacctgttcgaggacgagctcattccgctgtgcgaaaaaatcggaaagatctatgaaatgcgtatgatgatggattttaacggtaacaataggggctacgccttcgtgacgtttagcaataaggttgaagccaagaacgctatcaaacagttgaataactacgagatccggaacggcaggctcctcggtgtttgcgccagcgtggataactgccgcctgtttgtgggtgggattccaaagacaaagaagcgcgaggagatactgtctgagatgaaaaaggtgaccgagggggtggttgacgttattgtttacccttcagctgctgacaaaacaaagaaccgtgggttcgcgtttgtcgagtacgaaagccaccgtgccgccgcaatggccagacggaaattgttaccgggccggatccagctttggggtcacgggattgccgtcgattgggcggagcccgaggtggaagtggacgaggataccatgagttcagtgaagatcctatatgtgcgtaatctcatgttaagtacatcagaagagatgattgaaaaggaattcaataatatcaaaccgggcgccgttgaacgagtaaagaaaatcagagattacgccttcgtgcacttttctaacagagaagacgcggtggaagcgatgaaggcattaaacgggaaggtgctggacgggtccccaatcgaggtcaccctggccaagcccgtcgataaggattcgtacgtgcgctatactcgcggaacaggtggaaggggaaccatgctgcaaggagaatacacctattctctcggccaggtctacgaccccactactacctacctgggcgcccctgtcttttacgctccccaaacttatgctgcgattccttcactccacttccctgcaactaaaggtcatttgtcaaaccgtgcaatcattcgcgcccccagtgtgagagagatctatatgaacgtacctgtgggagccgcaggcgtacgaggactgggaggccgaggatatctagcttacaccggacttggcagaggctatcaggttaaaggcgacaagcgagaggacaagctgtatgatattcttccaggcatggaattgactccaatgaaccctgttaccctcaaaccccagggaataaagctggcccctcagattctggaagaaatctgtcagaaaaataactgggggcagcctgtctaccagctgcatagtgctatcggtcaggatcaacggcaactctttttgtataaaattaccattccagccttggcctcccagaaccctgcgattcaccctttcactcccccaaagctctctgcctttgtcgacgaagctaagacgtacgccgcagaatacacgctgcaaactctagggatcccaaccgacggtggagacgggacaatggcaacagccgccgccgcggccacagcgttccctggctacgcagtgcctaacgcgactgctccagtttctgcggctcagcttaaacaggccgtgacactggggcaagaccttgcggcttataccacatacgaggtctatcctacattcgcagttaccgctagaggcgacgggtacggcacgttctag

SEQ ID NO: 335592 - DNA, 1764 bp, Artificial Sequence
  derived and/or modified sequence
atgagcacagccatccctggcctgaagaagggcaacaatgccctgcagagcatcatcctgcagaccctgctggagaaggaaaatggccagaggaaatatggaggccccccacctggctgggatgctgcccctcctgagcggggctgtgagatcttcatcggcaagctgccccgggacctgtttgaagatgagctgatccccctgtgtgagaagattggcaagatctatgagatgaggatgatgatggacttcaatggaaacaacagaggctacgcctttgtgaccttcagcaacaaggtggaggccaagaatgccatcaagcagctgaacaactatgagatcagaaatggccgcctgctgggcgtgtgtgcctctgtggacaactgccgcctgtttgtgggcggcatccccaagaccaagaagcgggaggagatcctgtctgagatgaagaaggtgacagaaggagtggtggatgtgattgtgtaccccagcgctgctgacaagaccaagaacagaggatttgcctttgtggagtatgagagccacagagctgctgccatggcccggaggaagctgctgcccggccgcatccagctgtggggccacggcattgctgtggactgggccgagcctgaggtggaggtggatgaggacaccatgagctctgtgaagatcctgtatgtgaggaacctgatgctgagcaccagcgaggagatgattgagaaggagttcaacaacatcaagccaggagctgtggagcgggtgaagaagatccgggactatgcctttgtgcacttcagcaaccgggaggatgctgtggaggccatgaaggccctgaatggcaaggtgctggatggcagccccatcgaggtgaccctggccaagcctgtggacaaggacagctatgtgcgctacacccggggcactggaggccggggcaccatgctgcagggcgagtacacctacagcctgggccaggtgtatgaccccaccaccacctacctgggcgcccctgtgttctacgccccccagacctatgctgccatccccagcctgcacttccctgccaccaagggccacctgagcaacagagccatcatccgggcccccagcgtgcgggagatctacatgaatgtgcctgtgggcgccgccggcgtgcggggcctgggcggccggggctacctggcctacacaggcctgggccggggctaccaggtgaagggggacaagcgggaggacaagctgtatgacatcctgcccggcatggagctgacccccatgaaccctgtgaccctgaagccccagggcatcaagctggccccccagatcctggaggagatctgccagaagaacaactggggccagcctgtgtaccagctgcacagcgccatcggccaggaccagaggcagctgttcctgtacaagatcaccatcccagccctggccagccagaacccagccatccaccccttcaccccacccaagctgagcgcctttgtggatgaggccaagacctatgctgctgagtacaccctgcagaccctgggcatccccacagatggaggagatggcaccatggccacagctgctgctgctgccacagccttccctggctatgctgtgcccaatgccacagcccctgtgtctgctgcccagctgaagcaggccgtgaccctgggccaggacctggccgcctacaccacctatgaggtgtaccccacctttgctgtgacagcccggggagatggctacggcaccttctag

SEQ ID NO: 335593 - DNA, 2230 bp, Artificial Sequence
  derived and/or modified sequence
ataatcaaggaaaccttttccgggtggggatctctgaaattactcagataacagtgctgtgccaaaaacctgtggattttctctacaaaaattatcatgactgttatctttttgatggaaaagatgaagttcagcgaagaacaaatctacaacttggccagaagactgtagactttgccttcaaagagtgagcaaccctaattaacctgattttttgctgataatcactctcaatggaatcaaatcacaaatccggggatggattgagcggcactcagaaggaagcagccctccgcgcactggtccagcgcacaggatatagcttggtccaggaatttagaggttcctatagatggaagcagtgtgtctgggcacatgcccagagccagaagcgagcatgagcacagcaattcctggcctcaaaaaaggaaataatgctttgcagtccatcattttgcaaactttgctggaaaaggaaaatggacaaagaaaatatggtggccctccacctggttgggatgctgcaccccctgaaaggggctgtgaaatttttattggaaaacttccccgagacctttttgaggatgagcttataccattatgtgaaaaaatcggtaaaatttatgaaatgagaatgatgatggattttaatggcaacaatagaggatatgcatttgtaacattttcaaataaagtggaagccaagaatgcaatcaagcaacttaataattatgaaattagaaatgggcgcctcttaggggtttgtgccagtgtggacaactgccgattatttgttgggggcatcccaaaaaccaaaaagagagaagaaatcttatcggagatgaaaaaggttactgaaggtgttgtcgatgtcatcgtctacccaagcgctgcagataaaaccaaaaaccgaggctttgccttcgtggagtatgagagtcatcgagcagctgccatggcgaggaggaaactgctaccaggaagaattcagttatggggacatggtattgcagtagactgggcagagccagaagtagaagttgatgaagatacaatgtcttcagtgaaaatcctatatgtaagaaatcttatgctgtctacctctgaagagatgattgaaaaggaattcaacaatatcaaaccaggtgctgtggagagggtgaagaaaattcgagactatgcttttgtgcacttcagtaaccgagaagatgcagttgaggctatgaaagctttaaatggcaaggtgctggatggttcccccattgaagtcaccctagcaaaaccagtggacaaggacagttatgttaggtatacccgaggcacaggtggaaggggcaccatgctgcaaggagagtatacctactctttgggccaagtttatgatcccaccacaacctaccttggagctcctgtcttctatgccccccagacctatgcagcaattcccagtcttcatttcccagccaccaaaggacatctcagcaacagagccattatccgagccccttctgttagagaaatttacatgaatgtacctgtaggggctgcgggagtgagaggactgggcggccgtggctatttggcatacacaggcctgggtcgaggataccaggtcaaaggagacaaaagagaagacaaactctatgacattttacctgggatggagctcaccccaatgaatcctgtcacattaaaaccccaaggaattaaactcgctccccagatattagaagagatttgtcagaaaaataactggggacagccagtgtaccagctgcactctgctattggacaagaccaaagacagctattcttgtacaaaataactattcctgctctagccagccagaatcctgcaatccaccctttcacacctccaaagctgagtgcctttgtggatgaagcaaagacgtatgcagccgaatacaccctgcagaccctgggcatccccactgatggaggcgatggcaccatggctactgctgctgctgctgctactgctttcccaggatatgctgtccctaatgcaactgcacccgtgtctgcagcccagctcaagcaagcggtaacccttggacaagacttagcagcatatacaacctatgaggtctacccaacttttgcagtgactgcccgaggggatggatatggcaccttctgaagatgcttttttaaatttaagaataagacacacaaaactctattaaaaaaaaaaaagaaataaacctct

SEQ ID NO: 335594 - DNA, 1764 bp, Artificial Sequence
  derived and/or modified sequence
atgagcaccgccatccccggcctgaagaagggcaacaacgccctgcagtctatcatattacaaaccctattggagaaagagaacggccagaggaaatacggcggcccaccccctgggtgggacgcggcacctcctgagcgggggtgcgagattttcataggcaagctcccgcgtgatctgttcgaggacgagctgattcccctatgtgagaagatagggaagatctacgaaatgaggatgatgatggattttaatgggaataatagagggtatgcgtttgttacattctccaataaggtggaggccaaaaatgccatcaagcaactcaacaactacgaaatccgaaatgggagactactgggagtgtgcgccagtgtcgacaactgccggctctttgtcggaggcatccccaagacgaagaaacgtgaagagatactttctgagatgaagaaggtcactgaaggcgtggtggatgtgattgtctatccttccgcggccgataaaaccaagaatcgcggatttgccttcgttgaatacgagtcacatcgtgcggctgcaatggctcgacgaaagctcctgcccggccggattcaactctggggtcatggaatcgctgtggactgggcagaaccggaagtggaggtggatgaggatactatgtcaagcgttaagatcctgtacgtgcgaaatctgatgttaagtacttctgaagagatgatagaaaaagaatttaacaacattaaacccggtgccgtggagagggtcaagaagatccgagattacgcctttgtgcactttagcaatcgagaggatgccgtcgaggctatgaaggccctcaacggcaaggttctcgatgggtcgccaattgaggtgactctagccaagccagtggacaaggattcctatgtcaggtacacacgagggactggagggcgtggtaccatgttacaaggtgagtatacatattcattggggcaggtgtatgacccaacaacaacttatcttggcgcaccagtgttttatgccccccagacctacgccgccatcccatcgctacacttcccggccactaaaggtcacctgtccaaccgggctatcatccgggctccaagcgtcagagagatttatatgaacgtcccagtgggagctgctggcgtgaggggcctgggagggaggggatacctcgcatatacaggcctaggacgggggtatcaggtcaagggcgacaaacgcgaagataaactgtacgacattctgcccggcatggagctaaccccgatgaaccctgtgaccttgaagccgcagggcattaagctggcaccacagatactcgaagagatttgtcaaaaaaataattggggtcagccagtttatcagcttcacagtgcaatcgggcaggatcaacgccagctgtttctctacaagattactattcccgcactggcatctcaaaatcctgcaattcaccctttcactccgcccaagctgtcggcatttgtcgatgaagcgaagacctatgccgccgagtatacccttcagaccctggggataccaaccgatggcggtgacggcactatggccaccgccgcagccgcagcaaccgcatttcccggatatgcagtccccaacgcaacagcacccgtctctgccgcacagctgaaacaagccgtcacattgggccaggatctcgctgcttataccacgtacgaggtttatcctaccttcgctgttaccgcgcgcggggacgggtatggcacattctag

SEQ ID NO: 335595 - DNA, 1764 bp, Artificial Sequence
  derived and/or modified sequence
atgagtacagccatacctggcctgaaaaaaggcaataatgcccttcagtcaattatcttacagactctcctcgagaaagaaaacggccagcgcaagtacgggggtcccccacccggatgggacgcagccccaccagaaagaggatgcgaaatattcatcgggaagctgccgagagatctcttcgaggacgaactgatccctctgtgtgaaaaaattggaaagatctatgagatgcggatgatgatggattttaatgggaacaacagaggttatgccttcgttaccttttcgaacaaagtcgaagccaaaaatgcaatcaagcagcttaataattacgagattcgaaacggtcgtttattaggtgtctgcgcgagcgtggataactgtagacttttcgtaggtggaatacctaagaccaaaaagagagaagagatactgagtgagatgaagaaagtaacagaaggcgtggtagacgtcatcgtgtacccgagcgcagccgataaaaccaagaaccgcggattcgcctttgtcgagtatgaatcccatagagcagctgcaatggcaagaaggaaactgcttccaggccgaattcaactttgggggcatgggatcgccgtggattgggccgaacctgaggtcgaggtagatgaagacactatgagcagcgtcaagattctgtacgttagaaaccttatgctatctactagcgaggaaatgatcgagaaggagttcaacaatatcaagcctggcgcagtagagagagtcaaaaagatccgcgattacgcattcgtgcacttctcgaatcgagaggacgccgtggaggcaatgaaggctctgaatggcaaggttctggatggctctccaatcgaagtgacactggctaagcccgtcgacaaagatagttacgtccgttatacccggggtacaggaggtcgaggaaccatgctacagggggaatacacttacagcctagggcaggtgtatgaccccacgacgacatatttaggcgctcccgttttctatgctcctcagacttatgctgccattccttcactgcatttcccagcaaccaagggccatctgtcaaatcgagccattatccgcgctccttccgtccgggaaatttacatgaacgtacctgtcggcgcagcaggagtccgcggtcttggcggacgtggttatctggcctacacaggtctggggagagggtatcaagtcaaaggcgataagcgcgaagataaactgtacgacatccttccaggcatggaactgactccaatgaaccccgtcacacttaagccacagggtatcaaactcgccccacagatacttgaagaaatctgccaaaagaataactggggacagcccgtatatcagctgcatagcgccatcggacaggaccagcggcaactgttcctgtataagatcacaattcccgctcttgcctcccaaaaccctgcaatccacccattcacccctcccaaactttctgccttcgtagacgaagctaagacctacgccgctgagtatactcttcagaccctgggaatccccacagatggcggtgatggcacgatggcaactgccgcagccgcagctacggcattccctgggtatgccgtccccaatgccaccgcgccagtgagtgcggcacagctgaagcaggctgtgactctgggacaagacctagccgcttataccacttacgaagtttaccccacatttgctgtcactgcaagaggtgatgggtacggcaccttctag

SEQ ID NO: 335596 - DNA, 686 bp, Artificial Sequence
  derived and/or modified sequence
gacttctgaatgcggactggaggagatgaggatggagggctgggaggatagtaagagagggagcagggagaccagttacgggccactgaagtagtcaaggtgtcagacaagagctttgagacaagaggactcgtcttagagatagattgcatgagggccatgagggtaagggaggtgtccaagctgacctcagccttctggcttgtccactggttggatggggtcaccattttattgtaatggcggatactggttgcagagaactgagtgttggaggaccatgaatgagttccatttcagatctgctcagcttgctgtccctgggagacaaccacaggagttgtttaggagacaccgggctacttcagcctggagctccaggaggaggtctgcattggtcgttgggacaataggaccaggacatggcaggctgcaggaccccagttgcaccaaactgccatcccctcctgcctggtttcccttcttcatgaaccgatcaatgggccatagccaggttgggatgcatgtcttccacaggatgggaactacctccagctgatcagttaacagttcagttggggacctttgagtaaaatagatgaccctctattaggtggttgggcctcttccaatcagttgacagcctacagagaacaaagactgatctccccccagcaagaaggaat

SEQ ID NO: 335597 - protein, 905 aa, Artificial Sequence
  derived and/or modified sequence
MAKRALHDFIDKYLYAMRLSDETLIDIMTRFRKEMKNGLSRDFNPTATVKMLPTFVRSIPDGSEKGDFIALDLGGSSFRILRVQVNHEKNQNVHMESEVYDTPENIVHGSGSQLFDHVAECLGDFMEKRKIKDKKLPVGFTFSFPCQQSKIDEAILITWTKRFKASGVEGADVVKLLNKAIKKRGDYDANIVAVVNDTVGTMMTCGYDDQHCEVGLIIGTGTNACYMEELRHIDLVEGDEGRMCINTEWGAFGDDGSLEDIRTEFDREIDRGSLNPGKQLFEKMVSGMYLGELVRLILVKMAKEGLLFEGRITPELLTRGKFNTSDVSAIEKNKEGLHNAKEILTRLGVEPSDDDCVSVQHVCTIVSFRSANLVAATLGAILNRLRDNKGTPRLRTTVGVDGSLYKTHPQYSRRFHKTLRRLVPDSDVRFLLSESGSGKGAAMVTAVAYRLAEQHRQIEETLAHFHLTKDMLLEVKKRMRAEMELGLRKQTHNNAVVKMLPSFVRRTPDGTENGDFLALDLGGTNFRVLLVKIRSGKKRTVEMHNKIYAIPIEIMQGTGEELFDHIVSCISDFLDYMGIKGPRMPLGFTFSFPCQQTSLDAGILITWTKGFKATDCVGHDVVTLLRDAIKRREEFDLDVVAVVNDTVGTMMTCAYEEPTCEVGLIVGTGSNACYMEEMKNVEMVEGDQGQMCINMEWGAFGDNGCLDDIRTHYDRLVDEYSLNAGKQRYEKMISGMYLGEIVRNILIDFTKKGFLFRGQISETLKTRGIFETKFLSQIESDRLALLQVRAILQQLGLNSTCDDSILVKTVCGVVSRRAAQLCGAGMAAVVDKIRENRGLDRLNVTVGVDGTLYKLHPHFSRIMHQTVKELSPKCNVSFLLSEDGSGKGAALITAVGVRLRTEASS

SEQ ID NO: 335598 - protein, 114 aa, Artificial Sequence
  derived and/or modified sequence
MAKRALHDFIDKYLYAMRLSDETLIDIMTRFRKEMKNGLSRDFNPTATVKMLPTFVRSIPDGSEKGDFIALDLGGSSFRILRVQVNHEKNQNVHMESEVYDTPENIVHGSGSQL

SEQ ID NO: 335599 - DNA, 2718 bp, Artificial Sequence
  derived and/or modified sequence
atggccaagcgcgcacttcacgacttcattgataagtatctctatgctatgcgcttaagtgatgagaccctaatagatataatgacacgatttcgcaaagagatgaagaatggccttagcagggacttcaatcccacggccacagtgaagatgctgcccacattcgttcgttcaattcctgatggtagcgagaaaggagattttatagctctagaccttggggggtccagctttcgcattctgcgggtccaagtgaaccacgagaagaatcagaacgtccatatggaatccgaggtgtacgacaccccagaaaacatagttcatggcagtggatcacagttgtttgaccatgtggctgagtgtctgggcgattttatggaaaaacgcaagattaaagacaagaagctgcctgtcggatttacatttagttttccgtgccagcaaagcaagatcgatgaggcaatcctaataacttggaccaaacgtttcaaggcatcaggcgtcgaaggagccgatgttgtaaaactgttaaataaagcaattaaaaaacgaggagattacgatgcaaatatagtcgctgtggttaatgataccgtgggtactatgatgacctgtggatatgatgaccagcactgcgaggtgggtttgattataggtaccggtaccaacgcgtgctatatggaggaactgagacatattgatttggtggagggggacgaaggacgcatgtgcatcaacaccgagtggggagcattcggcgatgacggcagtctcgaagatattcgaacagagtttgaccgcgagattgaccggggcagtctgaatccggggaaacagttattcgaaaagatggtttcaggcatgtacttgggtgagttggtgcgcctgatacttgttaagatggccaaggaaggtctactgttcgaggggagaatcacgccagaattgctcacgaggggtaagtttaatacatcggatgtttctgccattgagaagaacaaagagggactgcataacgctaaagagattctgaccagactgggcgttgaaccttcggatgacgactgtgtctctgtacagcacgtctgcactattgtgtccttcagatcagccaatctggtagcagcgaccttaggagcaatccttaataggctgcgagacaataaaggcacaccaaggctcaggacaactgtgggcgtggacggatcattgtataaaacacatccgcagtactctcgccggtttcacaagacccttcgcagactggttccggattctgacgtgcgctttctcctctcagaaagcggttccggaaaaggagccgcgatggttactgccgtcgcttaccgactggcagagcagcaccgccagatcgaagagacgctcgctcacttccacttgaccaaggacatgctgcttgaagtcaaaaagaggatgcgagccgagatggagctaggcttacggaaacaaacacataacaacgccgtggtcaagatgttgccttcctttgtccggcggacccctgatgggactgaaaatggagacttcttagctctggatctgggcgggacaaacttcagagtgctgctggtcaagatacggtcaggaaagaagaggacagttgaaatgcacaacaaaatttatgcaatccctatcgagatcatgcaggggacgggggaagagctctttgaccacatcgtttcatgtatatccgactttctcgattatatggggattaaagggccccgaatgccattagggtttactttttctttcccgtgccagcagacctcattggacgcaggcatcctgatcacatggacaaaaggctttaaagccactgactgtgtcggccatgacgtggtgacccttctgagagacgcaataaagcggcgagaggagtttgatctggacgtcgttgcagtcgtgaacgacactgtggggactatgatgacttgcgcctatgaggaaccaacttgcgaagtggggcttatcgtggggactggctcaaacgcctgttacatggaggagatgaaaaatgtggagatggtggaaggtgaccaaggacagatgtgtatcaatatggaatggggcgccttcggagataacggatgcctcgacgacatcaggactcactatgaccggctcgtggatgagtactctctgaacgcaggaaaacagcggtatgaaaagatgatctccggcatgtacctcggggagatagtacgcaatattttaatcgacttcaccaaaaaggggttcctctttagaggccagatttccgagacactgaagacacggggcatttttgaaaccaagttcttgtcccagatcgaaagcgacagactcgctctccttcaggtgagggccatccttcaacagctgggactgaatagcacttgtgacgatagcatcctcgtgaaaacggtatgtggggttgtatctcgcagagctgctcagctttgcggcgccggcatggcagccgtggtagacaagattcgtgagaacaggggacttgatcgtttaaatgtgactgtgggcgtggacggtacactgtataagctgcatcctcacttttcccgcattatgcatcagacagtgaaagaactgagcccaaagtgcaatgttagcttcctgttaagtgaggacggctccggcaaaggtgccgctctcatcactgcagtgggcgtgcggctgcggaccgaggccagtagttag

SEQ ID NO: 335600 - DNA, 345 bp, Artificial Sequence
  derived and/or modified sequence
atggcgaaaagagccctccacgacttcatagataaatatttgtatgccatgcgactgagcgatgaaacccttatcgacatcatgactcgctttaggaaagaaatgaaaaatggactgtctcgtgattttaatccaaccgccactgttaagatgctccccacattcgtccgatctatacccgacggttctgagaaaggggatttcattgctctggatctgggggggtctagttttcgcatcctgcgagtgcaggtaaatcacgaaaaaaatcagaacgttcacatggagtcagaagtgtatgacacacccgaaaatattgtgcacggctcaggctctcagctttag

SEQ ID NO: 335601 - DNA, 2718 bp, Artificial Sequence
  derived and/or modified sequence
atggccaagagggccctgcatgacttcatcgacaagtacctgtatgccatgaggctgagtgatgagaccctgattgacatcatgacccgcttcaggaaggagatgaagaatggcctgagccgggacttcaaccccacagccaccgtgaagatgctgcccacctttgtgcgcagcatcccagatggcagcgagaagggggacttcatcgccctggacctgggcggcagcagcttccgcatcctgcgggtgcaggtgaaccacgagaagaaccagaatgtgcacatggagagcgaggtgtatgacaccccagagaacatcgtgcacggcagcggcagccagctgtttgaccacgtggccgagtgcctgggggacttcatggagaagaggaagatcaaggacaagaagctgcctgtgggcttcaccttctccttcccctgccagcagagcaagattgatgaggccatcctgatcacctggaccaagcgcttcaaggccagcggcgtggagggcgcagatgtggtgaagctgctgaacaaggccatcaagaagagaggagactatgatgccaacatcgtggccgtggtgaatgacacagtgggcaccatgatgacctgtggctatgatgaccagcactgtgaggtgggcctcatcatcggcaccggcaccaatgcctgctacatggaggagctgcggcacatcgacctggtggagggagatgagggccgcatgtgcatcaacacagagtggggcgcctttggagatgatggcagcctggaggacatcagaacagaatttgaccgggagattgaccggggcagcctgaaccctgggaagcagctgtttgagaagatggtgtctggcatgtacctgggggagctggtgcggctcatcctggtgaagatggccaaggagggcctgctgtttgagggccgcatcaccccagagctgctgacccggggcaagttcaacaccagtgatgtgtctgccatcgagaagaacaaggagggcctgcacaatgccaaggagatcctgacccggctgggcgtggagcccagtgatgatgactgtgtgtctgtgcagcacgtgtgcaccatcgtgtccttccgcagcgccaacctggtggccgccaccctgggcgccatcctgaaccggctgcgggacaacaagggcaccccccggctgcggaccaccgtgggcgtggatggcagcctgtacaagacccacccccagtacagccgccgcttccacaagaccctgcggcggctggtgcctgacagtgatgtgcgcttcctgctgtctgagagcggcagcgggaaaggagctgccatggtgacagctgtggcctaccgcctggccgagcagcaccggcagatcgaggagaccctggcccacttccacctgaccaaggacatgctgctggaggtgaagaagaggatgagagctgagatggagctgggcctgaggaagcagacccacaacaatgctgtggtgaagatgctgcccagctttgtgcggaggaccccagatggaacagaaaatggagacttcctggccctggacctgggcggcaccaacttccgggtgctgctggtgaagatccgcagcggcaagaagaggacagtggagatgcacaacaagatctatgccatccccatcgagatcatgcagggcaccggggaggagctgtttgaccacatcgtgtcctgcatcagtgacttcctggactacatgggcatcaagggccccaggatgcccctgggcttcaccttctccttcccctgccagcagaccagcctggatgctggcatcctgatcacctggaccaagggcttcaaggccacagactgtgtgggccatgatgtggtgaccctgctgagagatgccatcaagagaagagaggagtttgacctggatgtggtggccgtggtgaatgacacagtgggcaccatgatgacctgtgcctatgaggagcccacctgtgaggtgggcctgattgtgggcaccggcagcaatgcctgctacatggaggagatgaagaatgtggagatggtggagggggaccagggccagatgtgcatcaacatggagtggggcgccttcggggacaatggctgcctggatgacatccgcacccactatgaccggctggtggatgagtacagcctgaatgctgggaagcagagatatgagaagatgatcagcggcatgtacctgggggagatcgtgaggaacatcctgattgacttcaccaagaagggcttcctgttccggggccagatcagcgagaccctgaagacccggggcatctttgagaccaagttcctgagccagatcgagagtgaccggctggccctgctgcaggtgcgggccatcctgcagcagctgggcctgaacagcacctgtgatgacagcatcctggtgaagacagtgtgtggggtggtgtcccggcgggccgcccagctgtgtggggccggcatggctgctgtggtggacaagatcagagaaaatagaggcctggaccggctgaatgtgacagtgggcgtggatggcaccctgtacaagctgcacccccacttcagccgcatcatgcaccagacagtgaaggagctgagccccaagtgcaatgtgtccttcctgctgtctgaagatggcagcgggaaaggagctgccctgatcacagctgtgggcgtgcggctgaggacagaggccagcagctag

SEQ ID NO: 335602 - DNA, 345 bp, Artificial Sequence
  derived and/or modified sequence
atggccaagagggccctgcatgacttcatcgacaagtacctgtatgccatgaggctgagtgatgagaccctgattgacatcatgacccgcttcaggaaggagatgaagaatggcctgagccgggacttcaaccccacagccaccgtgaagatgctgcccacctttgtgcgcagcatcccagatggcagcgagaagggggacttcatcgccctggacctgggcggcagcagcttccgcatcctgcgggtgcaggtgaaccacgagaagaaccagaatgtgcacatggagagcgaggtgtatgacaccccagagaacatcgtgcacggcagcggcagccagctgtag

SEQ ID NO: 335603 - DNA, 2718 bp, Artificial Sequence
  derived and/or modified sequence
atggccaagcgggccctgcacgacttcatcgacaagtacctgtacgcaatgcgtctctccgacgaaacactgattgacatcatgacaaggtttcggaaagagatgaaaaacgggctgagccgcgacttcaatcctacggctactgtaaagatgctgcccaccttcgttaggtccattcctgacgggagcgaaaaaggagatttcattgcccttgatctagggggctcctcatttcggatcttgagggtccaggtgaatcacgaaaagaatcagaatgtgcatatggaatctgaagtttacgacaccccggagaatatcgtgcacggatcaggaagtcaattatttgatcacgttgccgaatgcctgggagatttcatggagaagaggaaaattaaagacaaaaagctacctgtcggatttaccttcagttttccatgccagcagtccaaaatcgatgaggccatactgattacatggactaagcgatttaaggcttctggggtagaaggggctgatgttgtaaagctgctgaacaaagcgataaaaaagaggggagactatgatgctaacattgtcgccgtggtaaacgacactgttggcactatgatgacatgtggctacgacgaccagcactgtgaagtgggactgatcataggcacaggaacaaacgcctgttacatggaggaactccgacacatagatcttgttgagggggacgaaggccggatgtgcattaacactgagtggggtgcctttggagacgatggaagccttgaggatattaggactgagttcgacagggagattgacagagggagcctgaaccccggcaaacagttgtttgagaagatggtttcggggatgtatctgggagagctcgttcgcctaatcctggtgaaaatggccaaggaaggcctgcttttcgaaggaaggataactccagagctgctgactaggggcaagtttaacacctccgatgtctcagcgatagagaaaaataaagagggtcttcacaacgctaaggaaatcctcacccgtctgggagtggagccaagcgatgacgattgtgtcagtgtgcaacacgtgtgtaccatcgtgtcatttcgtagcgccaatctggtggctgccacgctcggcgcgatcctgaacagattaagagacaacaaaggcaccccacggctgcggaccaccgtgggagtggatggttcactttataaaacccatcctcagtactccaggcgcttccacaaaacgctgaggaggctggtgcctgatagcgatgtgagattccttctgtccgaatccggttctggtaaaggcgcagctatggtgactgccgtcgcctaccggctggcagaacaacaccgccagatagaggagacgctggcgcactttcacctcaccaaggatatgctgttggaagtcaaaaaacggatgagagctgagatggagttggggcttcgcaagcagacccacaacaatgctgtggtaaaaatgctaccctcgtttgtgcggagaacacccgacggtactgagaatggcgacttcttggccctggaccttggaggcacaaatttccgggttcttttggtgaaaatcaggtctggcaaaaaacggacagttgagatgcataacaagatttatgcgatccccattgagattatgcagggaacaggagaggagctgttcgaccacattgtgagttgtatttcagacttcctggactacatggggattaaaggacctcgcatgcccctgggcttcacttttagcttcccctgtcagcaaacatctctggacgctggcatactgattacgtggaccaagggattcaaggcgactgattgcgtgggacatgacgtcgttaccttgcttcgagatgctattaaaagaagggaagagtttgatctggacgtcgttgctgtggtgaacgacaccgtggggacaatgatgacatgcgcctatgaagagccaacctgtgaggtaggcctaatcgtgggaaccggatcaaacgcttgctatatggaggaaatgaagaatgtggagatggttgagggcgatcagggacagatgtgtattaatatggaatggggagcttttggcgataacgggtgcctggatgacatacggacgcactacgacaggctggtggacgagtatagtctcaacgctggtaaacagcgctatgagaaaatgatcagcggcatgtaccttggggagatcgttcggaatatcctgattgacttcactaaaaaagggtttttgtttcgcggccaaatctctgaaacgctgaaaactcgtggtattttcgaaactaagtttctttcacagatcgagagcgataggctcgccctactgcaggtacgagcgattctccagcaacttggtctcaatagcacctgcgacgattctatactagtcaagacagtctgcggcgtggtctctaggcgggccgctcagctctgtggtgccggcatggccgccgtggttgataaaatccgcgagaaccggggattggacagactcaacgtgacagtgggagtggacggcacattgtataaactccatcctcatttctctcggatcatgcatcagaccgttaaggagttatcacctaagtgcaatgtgagcttcctgttgagcgaggacggttcaggcaagggagccgctctgatcaccgcagtgggtgttcgtttgcgtactgaggcatcatcctag

SEQ ID NO: 335604 - DNA, 345 bp, Artificial Sequence
  derived and/or modified sequence
atggccaagcgggccctgcacgacttcatcgacaagtacctgtacgccatgaggctgagtgacgagaccttgattgatatcatgacacgtttccgtaaggaaatgaagaacggattgagtagagattttaacccaactgcgaccgtaaagatgcttcctacttttgtcaggagtatccctgacgggagcgaaaagggtgacttcattgctcttgatctcggcggaagctcttttaggatccttagggtccaagtcaatcacgagaaaaatcagaatgtacacatggaatcggaggtatacgacacgcctgagaacatcgtgcacggctcgggctcacaattatag

SEQ ID NO: 335605 - DNA, 2718 bp, Artificial Sequence
  derived and/or modified sequence
atggcaaagcgcgcacttcacgacttcatcgacaaatatctctatgccatgaggctgtccgacgagacactcattgatatcatgacacgcttcagaaaggagatgaagaacggcctcagccgtgacttcaacccaacagctaccgtgaagatgctgcccacatttgtccgtagtatacctgacgggtctgagaaaggcgatttcatagcccttgatctgggcggttcatcattcaggattctgcgcgttcaagtcaatcatgaaaagaaccagaacgtgcacatggagtcagaggtgtacgatactcccgagaacatcgtgcacgggtcgggatcacagctcttcgaccatgtggcggagtgtcttggggactttatggaaaaaaggaaaataaaagacaaaaagctgcccgtaggcttcacctttagcttcccttgtcagcagtcaaaaattgacgaggcaatcctcatcacttggactaaacgctttaaggcttcaggtgttgaaggagcagacgttgtcaagctgttgaacaaggcaatcaaaaagcggggagattacgatgccaacattgtagctgtggtaaacgacactgtgggcaccatgatgacttgcggctacgacgatcagcactgtgaagtcggcctcatcattggaactgggaccaatgcctgctatatggaggagctcagacacatcgaccttgtggaaggagatgagggaagaatgtgcataaacactgagtggggcgctttcggggacgatggcagcttggaagacatccgaactgaatttgatagggaaattgaccgcggatctctgaatcccggaaaacagctatttgagaaaatggtatctgggatgtacctgggggagctggtgaggttgatcctggtgaaaatggcgaaagagggtctgctgtttgaggggagaataacgccagagctgctgactagaggtaaattcaatacatctgatgtatctgccatcgaaaaaaacaaggaaggcctgcacaacgctaaagagatcctcactaggctcggggtcgaaccctcggatgatgactgcgtcagtgtgcagcacgtttgtacgattgtgtcctttagaagcgcgaacctggtcgccgcaaccctgggtgccatcctaaacagactgagggacaacaaagggacgccgaggctccgcactaccgtcggagtggacggtagcctctacaagacccacccccagtattccagacgtttccataagacccttagacggctggtccccgattccgatgtgaggtttcttctgagtgagagcggtagcggtaaaggagcggctatggtgacagctgtcgcttaccgactggccgagcagcacagacagatagaggaaacactcgcgcactttcacctgacgaaagacatgctcctggaggtgaaaaagagaatgagggcagagatggaactcggtctgaggaagcagactcataacaacgccgtggtgaagatgctgccaagttttgtaaggcgcaccccagacggcacagagaatggcgacttcctcgctctcgatctcggaggaaccaattttcgagtcctgcttgtgaaaattcgtagcggaaaaaagagaacggtggagatgcacaacaagatttacgcgattcctatcgagataatgcagggaaccggcgaggagctctttgaccacatcgtctcctgcattagcgactttctagactacatggggattaagggccctcgcatgcccttaggatttacctttagctttccttgtcaacagacttcactggacgccggtatactcatcacctggacaaagggattcaaagccaccgattgtgtgggccacgatgtcgttactctgctgcgcgatgcgatcaaacgacgagaagaattcgatctcgacgtagtcgcggtggtgaacgatactgttggcaccatgatgacctgtgcctacgaagaaccaacttgtgaagtcggcttgatagtcggcaccggctccaatgcttgttacatggaagaaatgaaaaatgtggagatggtagagggtgatcagggacagatgtgcatcaatatggagtggggggcatttggtgataatgggtgcctcgatgacattcggactcattacgatcgactggtcgatgagtacagcctgaatgctggtaaacagagatatgagaaaatgatcagtggcatgtatctcggcgaaatagtgcgcaatattctgatagacttcacaaagaagggctttttatttcggggtcaaatcagcgaaacactgaaaacccggggtatctttgaaacgaaatttttgtcacaaatcgagtccgatagactcgcccttcttcaggtgcgagcaatcctgcagcagctgggtctgaattcaacgtgcgacgactccatcctggtgaagactgtatgtggagtggtgagtcggagggccgctcagctgtgtggtgcaggtatggccgcagtggttgacaaaattcgcgagaataggggtctcgatcgattaaatgtcaccgtgggggtggacgggactctctacaagctgcatcctcatttctctaggataatgcatcagacagtgaaggaactgtcacctaaatgcaatgtctcattcttgctatccgaagacggatcgggcaaaggagcagctcttataacagcggtgggagtaagattaaggactgaagcaagttcctag

SEQ ID NO: 335606 - DNA, 345 bp, Artificial Sequence
  derived and/or modified sequence
atggctaagagagctctccacgattttatcgacaagtacctgtacgctatgcgtctgtctgacgaaacgctcatcgacatcatgacgcgcttccgaaaggaaatgaaaaacggccttagcagggacttcaatccaaccgcaaccgtgaaaatgctcccgacatttgtgagatcaatccccgacggctcagagaaaggtgacttcatcgccctggatttaggtggaagcagctttagaatcctccgcgttcaggttaatcatgagaagaaccagaacgtgcacatggagtccgaagtctatgatacacccgagaatattgttcatgggtctggatcccagctttag

SEQ ID NO: 335607 - DNA, 2718 bp, Artificial Sequence
  derived and/or modified sequence
atggccaagagagccctgcacgacttcatcgacaagtacctgtacgccatgagactgagcgacgagaccctgatcgacatcatgaccagattcagaaaggagatgaagaacggcctgagcagagacttcaaccccaccgccaccgtgaagatgctgcccaccttcgtgagaagcatccccgacggcagcgagaagggcgacttcatcgccctggacctgggcggcagcagcttcagaatcctgagagtgcaggtgaaccacgagaagaaccagaacgtgcacatggagagcgaggtgtacgacacccccgagaacatcgtgcacggcagcggcagccagctgttcgaccacgtggccgagtgcctgggcgacttcatggagaagagaaagatcaaggacaagaagctgcccgtgggcttcaccttcagcttcccctgccagcagagcaagatcgacgaggccatcctgatcacctggaccaagagattcaaggccagcggcgtggagggcgccgacgtggtgaagctgctgaacaaggccatcaagaagagaggcgactacgacgccaacatcgtggccgtggtgaacgacaccgtgggcaccatgatgacctgcggctacgacgaccagcactgcgaggtgggcctgatcatcggcaccggcaccaacgcctgctacatggaggagctgagacacatcgacctggtggagggcgacgagggcagaatgtgcatcaacaccgagtggggcgccttcggcgacgacggcagcctggaggacatcagaaccgagttcgacagagagatcgacagaggcagcctgaaccccggcaagcagctgttcgagaagatggtgagcggcatgtacctgggcgagctggtgagactgatcctggtgaagatggccaaggagggcctgctgttcgagggcagaatcacccccgagctgctgaccagaggcaagttcaacaccagcgacgtgagcgccatcgagaagaacaaggagggcctgcacaacgccaaggagatcctgaccagactgggcgtggagcccagcgacgacgactgcgtgagcgtgcagcacgtgtgcaccatcgtgagcttcagaagcgccaacctggtggccgccaccctgggcgccatcctgaacagactgagagacaacaagggcacccccagactgagaaccaccgtgggcgtggacggcagcctgtacaagacccacccccagtacagcagaagattccacaagaccctgagaagactggtgcccgacagcgacgtgagattcctgctgagcgagagcggcagcggcaagggcgccgccatggtgaccgccgtggcctacagactggccgagcagcacagacagatcgaggagaccctggcccacttccacctgaccaaggacatgctgctggaggtgaagaagagaatgagagccgagatggagctgggcctgagaaagcagacccacaacaacgccgtggtgaagatgctgcccagcttcgtgagaagaacccccgacggcaccgagaacggcgacttcctggccctggacctgggcggcaccaacttcagagtgctgctggtgaagatcagaagcggcaagaagagaaccgtggagatgcacaacaagatctacgccatccccatcgagatcatgcagggcaccggcgaggagctgttcgaccacatcgtgagctgcatcagcgacttcctggactacatgggcatcaagggccccagaatgcccctgggcttcaccttcagcttcccctgccagcagaccagcctggacgccggcatcctgatcacctggaccaagggcttcaaggccaccgactgcgtgggccacgacgtggtgaccctgctgagagacgccatcaagagaagagaggagttcgacctggacgtggtggccgtggtgaacgacaccgtgggcaccatgatgacctgcgcctacgaggagcccacctgcgaggtgggcctgatcgtgggcaccggcagcaacgcctgctacatggaggagatgaagaacgtggagatggtggagggcgaccagggccagatgtgcatcaacatggagtggggcgccttcggcgacaacggctgcctggacgacatcagaacccactacgacagactggtggacgagtacagcctgaacgccggcaagcagagatacgagaagatgatcagcggcatgtacctgggcgagatcgtgagaaacatcctgatcgacttcaccaagaagggcttcctgttcagaggccagatcagcgagaccctgaagaccagaggcatcttcgagaccaagttcctgagccagatcgagagcgacagactggccctgctgcaggtgagagccatcctgcagcagctgggcctgaacagcacctgcgacgacagcatcctggtgaagaccgtgtgcggcgtggtgagcagaagagccgcccagctgtgcggcgccggcatggccgccgtggtggacaagatcagagagaacagaggcctggacagactgaacgtgaccgtgggcgtggacggcaccctgtacaagctgcacccccacttcagcagaatcatgcaccagaccgtgaaggagctgagccccaagtgcaacgtgagcttcctgctgagcgaggacggcagcggcaagggcgccgccctgatcaccgccgtgggcgtgagactgagaaccgaggccagcagctag

SEQ ID NO: 335608 - DNA, 345 bp, Artificial Sequence
  derived and/or modified sequence
atggccaagagagccctgcacgacttcatcgacaagtacctgtacgccatgagactgagcgacgagaccctgatcgacatcatgaccagattcagaaaggagatgaagaacggcctgagcagagacttcaaccccaccgccaccgtgaagatgctgcccaccttcgtgagaagcatccccgacggcagcgagaagggcgacttcatcgccctggacctgggcggcagcagcttcagaatcctgagagtgcaggtgaaccacgagaagaaccagaacgtgcacatggagagcgaggtgtacgacacccccgagaacatcgtgcacggcagcggcagccagctgtag

SEQ ID NO: 335609 - protein, 362 aa, Artificial Sequence
  derived and/or modified sequence
MLRVCAQGWHAQGLPHGTNSLLKGGTETSLSTPTRLVVLTSVARLSSKSVNAQVTDINSKGLELRKTVTTVETQNLEGLHHDGQFCHKPCPPGERKARDCTVNGDEPDCVPCQEGKEYTDKAHFSSKCRRCRLCDEGHGLEVEINCTRTQNTKCRCKPNFFCNSTVCEHCDPCTKCEHGIIKECTLTSNTKCKEEGSRSNLGWLCLLLLPIPLIVWVKRKEVQKTCRKHRKENQGSHESPTLNPVGIEIDFSDVDLSKYITTIAGVMTLSQVKGFVRKNGVNEAKIDEIKNDNVQDTAEQKVQLLRNWHQLHGKKEAYDTLIKDLKKANLCTLAEKIQTIILKDITSDSENSNFRNEIQSLV

SEQ ID NO: 335610 - DNA, 1089 bp, Artificial Sequence
  derived and/or modified sequence
atgctgagagtgtgcgcccagggctggcacgcccagggcctgccccacggcaccaacagcctgctgaagggcggcaccgagaccagcctgagcacccccaccagactggtggtgctgaccagcgtggccagactgagcagcaagagcgtgaacgcccaggtgaccgacatcaacagcaagggcctggagctgagaaagaccgtgaccaccgtggagacccagaacctggagggcctgcaccacgacggccagttctgccacaagccctgcccccccggcgagagaaaggccagagactgcaccgtgaacggcgacgagcccgactgcgtgccctgccaggagggcaaggagtacaccgacaaggcccacttcagcagcaagtgcagaagatgcagactgtgcgacgagggccacggcctggaggtggagatcaactgcaccagaacccagaacaccaagtgcagatgcaagcccaacttcttctgcaacagcaccgtgtgcgagcactgcgacccctgcaccaagtgcgagcacggcatcatcaaggagtgcaccctgaccagcaacaccaagtgcaaggaggagggcagcagaagcaacctgggctggctgtgcctgctgctgctgcccatccccctgatcgtgtgggtgaagagaaaggaggtgcagaagacctgcagaaagcacagaaaggagaaccagggcagccacgagagccccaccctgaaccccgtgggcatcgagatcgacttcagcgacgtggacctgagcaagtacatcaccaccatcgccggcgtgatgaccctgagccaggtgaagggcttcgtgagaaagaacggcgtgaacgaggccaagatcgacgagatcaagaacgacaacgtgcaggacaccgccgagcagaaggtgcagctgctgagaaactggcaccagctgcacggcaagaaggaggcctacgacaccctgatcaaggacctgaagaaggccaacctgtgcaccctggccgagaagatccagaccatcatcctgaaggacatcaccagcgacagcgagaacagcaacttcagaaacgagatccagagcctggtgtag

SEQ ID NO: 335611 - DNA, 1089 bp, Artificial Sequence
  derived and/or modified sequence
atgctgagggtgtgcgcccaggggtggcacgcccaggggctgccacatggcactaacagtttactgaaaggcggcactgaaacctctctgtccacccctacacggctggtggttctgacgtcagtggctcggctaagctctaagagtgtaaacgcccaggttacagacatcaatagcaaaggactcgaactcagaaaaacggtgacaaccgtggagacacagaatttggagggcctccatcacgacggacagttctgccataaaccatgtccaccaggcgagaggaaggccagggactgcaccgtgaatggagacgagccagattgcgtcccctgccaagagggcaaggagtacactgacaaggcacacttctcttccaagtgtcggaggtgccgcttatgcgatgaagggcatggtctggaggttgaaatcaactgcacaagaactcagaacacaaaatgtcgatgtaagcccaattttttctgcaactcaaccgtctgtgaacactgtgacccatgcactaaatgtgagcatggcatcatcaaagagtgcacattaacctccaacacaaaatgcaaagaagagggctcaagatccaaccttgggtggctgtgcctgctgctgctgcctatacctctcatcgtgtgggtgaagcgaaaagaagtgcaaaagacctgcaggaagcatagaaaggaaaaccagggatcccacgaatcgccaactctcaatcccgtgggtatcgagatcgattttagtgacgtggatctcagtaaatacatcacaactatcgccggtgttatgacactttcccaagtgaaagggttcgtgaggaagaatggggtgaacgaggctaaaatcgacgagattaagaatgacaatgtccaggatacagcggagcagaaggttcagcttttgaggaattggcaccagcttcacgggaagaaagaggcctatgacaccctcatcaaggacttgaagaaggctaatttgtgcactctggcagagaagatccagaccattatattgaaggatataacttccgactcggagaatagcaattttcgcaacgaaatacagtctctcgtgtag

SEQ ID NO: 335612 - DNA, 4641 bp, Artificial Sequence
  derived and/or modified sequence
gcctagggaagggacactgattgttcaccatcatatcccagtatctagcacagtgcctaagggataggaggggctcagtaaatatctcttgcaaggatgttgttaaattgtaaactctgccaaggcctttatgttgaatgaatgaatgaacgaatgaatgaatgcctctaactcttcataaaataaacactttttggaaaaaattgctcatggcagacgtcagatgtaaccacactgataactggaaagaaaaatgaatttagatgggttttagagatagaacaatgtttctaatattcaagcagtccataaatcccttatacttaatgttaaaattcaggatatgatacctaaagaaaggttttactgtacttggatcaaggcacctaccaactttttctctactcataggcaaagtcactaccctgtttaaggaggtctttggacgtttccatctcaagaaacagctcttcaatctctcccttgtattccaccttccagaaccacccagaaattccagtaaagtcttattgacctgattgtctgtcctcttcgctgagttccttttgaatgcagcaaattgctgtgcccttttctgacttccatttcacttttatccagcttcataggagcttaggcccctgcttgttgaggagggcgttcagttagtgctgagactacctgaataggtctggttctagctactcacaactcagagaggtagtgaatgctaggaggtaggaagaaggacattcaaccagaatactaaaattgcatttagatagtccagaaattagacagttggcacagcattagaattccccatttatccttacaatagtttgctgagaatgatggttgggaattgaacaatgagaacacttggacacaggaagaggaacatcacacaccggggcctgttgtggggtggggagagcggggagggatagcattaggagatatacctaatgtaaatgacaagttaatgggtacagcacaccaacatggcacgtgtatacatatgtaacaaacctgcacgttgtgcacatgtaccctagaacttaaagtataataaaaaagtgtgtgtgtgtgtgtgtgtgtgtatatatataaagaattccccacttaatatttatacatccaaaaactgacaaaaataatgtctgaactcatgtctgacattcagattcctccgcccaaaggcaataaataaaataatactaagatgtaaaggcaaaccttgtcttctgtcatgatctacagatggcacaaataatagacattttcccgaataatggcgtctgattttcaagcaatgcttagccaattgtagatttgggcagaaaaagtttgtaccaagcatttgagctggaaaaggcagatatttttcttgacctcacttttcctaaagttcacaacttctgctacttaaatgagtatctcatctctaagtgtgtgaagtaacagatgatgtatctgtttttcatcctcaaagagttaacttgataaaataagtacagctaaggacaaacacaaacacaaaatgagaaaacttcatgcagtatgttttgtgttttgtaaagggtgccaatggcatggagccatctgattctgttgcagtctttggcaacacggcccatttaaattcaagttaggatctgagtgtttgggtaaacagaataagctaagaatgagtggcagacatatttcctcaaatcccatctgatacaggtttagatccagattttgtcatttgactaactccttccttttttagatgatttggatttgcctttttttcttataataaaagtcataatgccaaccactttaagagttcttttgctgctcttttttgttgctatctttttgtaactaataggacacgtgtaagactataatacaaacaggagtcctagcatgtaatggctttagcaatttgtgcaatatccctctttttgtccttcctgcatattttctccctagaaagcagccaagaattggtgttcagagggtgatgctctgatggtgagcagatctacagtttgcctaacagtttatttaagccaaatttatagtttctgaagcgctagaaggctgctgtccaaggggactacttttttttttttttttagatggagtcttgctctgtcgccaggctggagtgcagaggcgtgatctcagctcactgcaacttctgcctccccagttcatgctattctcctgcttcagtctcctaaggagctgggactacaggctcacaccaccacgcccagttaatttttgtatttttagtagagacagggtttcaccatgttggccaggatggtctcaatctcttgaccttgtgatccacccgcctcagcctcccaaagtgctgagattacaggcatgagccaccacgcccagccagggactacttattaactggccatttaaaatgaaatgaaacaaggtcctcaattgctaacgattaaggggagaggagtgtaaattcagctattgtcttgtcttcaggcagcaggaaattaagggattggtaactgttatttgtaatagtaattgatgtcacaaaaggagttttgagaacagggagtttaggaaaaaaattgatctccttttatttttagtctgttaatatttaatgtaatatttgatacagttcgatttagatttactgttctttgatctatttttattttttgccttttttgttgttctctttcttctctcctgccttcttttatattgtttaattttttttctaaatttcattgtaatttatctattagctttttaactatatcttttggcattatttttacaaagttgctctagggattacaatatacatccttaaatactcaccatctacttcatggaaattactgtaaccttacaaatgtataaatcgattttacccttgttcatcccattataatgtatattataagcctcatacaatggtatgatttttactttttctctgcgttgtttctagttaactatatgtgctatcaaagtgagaccccatttatcttttaatctgtttctgattgtttttccagtgtctacttaactgagactcttacaggtaattttgtaggatactaggtgttttagatggcaaatataaagattgtgtttgtgtatgtgtatgtgtttatatgtgagggccaatctattgaaaagaaacactgcagaatactaaagcaaaattgaaaccatttagagtttgtagttgttttattttaaaagctaaccttgtaagtacttagtctttcaaaaaataattttaacttctatgttttatttttctattttaatttttcctgggccttgcctcccaatcctctcaccttccctttcttctgtgtgacctatagattcagaaattcctttctgggataatttctggcactgctttggagatggagcccctgaaaattggctatggaccaaatggattcccactcttggggatctctaggtcatcatcaccatctgaacagctctgagagagacaagaagtggaatggagaaggtgattagatgctcagagtgtgtgcacaaggctggcacgcccagggtcttcctcatggcactaacagtctactgaaaggtggaacagagacaagcctatcaacacctacaagactggtggttcttacgtctgttgctagattatcgtccaaaagtgttaatgcccaagtgactgacatcaactccaagggattggaattgaggaagactgttactacagttgagactcagaacttggaaggcctgcatcatgatggccaattctgccataagccctgtcctccaggtgaaaggaaagctagggactgcacagtcaatggggatgaaccagactgcgtgccctgccaagaagggaaggagtacacagacaaagcccatttttcttccaaatgcagaagatgtagattgtgtgatgaaggacatggcttagaagtggaaataaactgcacccggacccagaataccaagtgcagatgtaaaccaaactttttttgtaactctactgtatgtgaacactgtgacccttgcaccaaatgtgaacatggaatcatcaaggaatgcacactcaccagcaacaccaagtgcaaagaggaaggatccagatctaacttggggtggctttgtcttcttcttttgccaattccactaattgtttgggtgaagagaaaggaagtacagaaaacatgcagaaagcacagaaaggaaaaccaaggttctcatgaatctccaactttaaatcctgtaggtattgaaatagatttttcagatgttgacttgagtaaatatatcaccactattgctggagtcatgacactaagtcaagttaaaggctttgttcgaaagaatggtgtcaatgaagccaaaatagatgagatcaagaatgacaatgtccaagacacagcagaacagaaagttcaactgcttcgtaattggcatcaacttcatggaaagaaagaagcgtatgacacattgattaaagatctcaaaaaagccaatctttgtactcttgcagagaaaattcagactatcatcctcaaggacattactagtgactcagaaaattcaaacttcagaaatgaaatccaaagcttggtctag

SEQ ID NO: 335613 - DNA, 1089 bp, Artificial Sequence
  derived and/or modified sequence
atgctgcgggtgtgtgcccagggctggcacgcccagggcctgccccacggcaccaacagcctgctgaagggcggcacagagaccagcctgagcacccccacccggctggtggtgctgacctctgtggcccggctgagcagcaagtctgtgaatgcccaggtgacagacatcaacagcaagggcctggagctgaggaagacagtgaccaccgtggagacccagaacctggagggcctgcaccatgatggccagttctgccacaagccctgccccccaggagagaggaaggcccgggactgcaccgtgaatggagatgagccagactgtgtgccctgccaggagggcaaggagtacacagacaaggcccacttcagcagcaaatgtcgccgctgccgcctgtgtgatgagggccacggcctggaggtggagatcaactgcaccaggacccagaacaccaagtgccgctgcaagcccaacttcttctgcaacagcacagtgtgtgagcactgtgacccctgcaccaagtgtgagcacggcatcatcaaggaatgtaccctgaccagcaacaccaagtgcaaggaggagggcagccgcagcaacctgggctggctgtgcctgctgctgctgcccatccccctcatcgtgtgggtgaagaggaaggaggtgcagaagacctgcaggaagcacaggaaggagaaccagggcagccatgagagccccaccctgaaccctgtgggcattgaaattgacttcagtgatgtggacctgagcaagtacatcaccaccatcgccggcgtgatgaccctgagccaggtgaagggctttgtgaggaagaatggagtgaatgaggccaagattgatgagatcaagaatgacaacgtgcaggacacagctgagcagaaggtgcagctgctgaggaactggcaccagctgcacggcaagaaggaggcctatgacaccctcatcaaggacctgaagaaggccaacctgtgcaccctggccgagaagatccagaccatcatcctgaaggacatcaccagtgacagcgagaacagcaacttcagaaatgagatccagagcctggtgtag

SEQ ID NO: 335614 - DNA, 1089 bp, Artificial Sequence
  derived and/or modified sequence
atgctgcgggtgtgcgcccagggctggcacgcccagggcctgccccatggtacgaactctttactgaaaggaggaacagaaacaagcctgtccacccctaccagattagtcgtgttgacatctgtggcccgcctctcatcgaagtctgtgaatgcccaggtgactgacattaattctaaggggcttgagctgcggaaaaccgtgaccaccgtggaaacccagaatctggaaggactccaccatgatggccagttttgccacaagccatgcccgcctggagagcgcaaagctcgggattgtaccgttaacggcgatgaacctgactgtgtcccttgtcaagaaggaaaggagtacacagataaggcccacttttcctctaagtgcagacgctgccgcctctgcgacgaagggcatgggctcgaggtcgagattaattgtacaagaacacagaatactaagtgccgatgtaagcccaactttttctgcaatagcacagtatgtgaacactgcgacccgtgtactaagtgcgagcacggtattatcaaggaatgcacgctgaccagcaacacgaaatgcaaagaggagggaagtaggtctaacttggggtggctgtgtctccttctgttgcccattcccctgatagtgtgggtgaagaggaaagaagttcaaaaaacttgtcgcaaacatcggaaggaaaaccagggcagtcatgaatctcctaccttgaaccccgtgggcatagagatcgacttctccgacgtggacctgtccaagtacattactaccattgcaggggtcatgacactgtcgcaagtaaaaggattcgtgaggaaaaacggcgtaaacgaggcgaagattgatgagatcaaaaacgataatgttcaagatacagctgagcagaaggtgcagctgcttagaaattggcaccaactccacgggaagaaggaggcatacgatacactgatcaaagaccttaaaaaggctaatctctgcaccttggcggaaaaaattcagacgattattctaaaagatatcacctctgattccgaaaactctaacttccgtaatgagatccaatctcttgtctag

SEQ ID NO: 335615 - DNA, 1089 bp, Artificial Sequence
  derived and/or modified sequence
atgcttcgggtgtgcgctcaggggtggcacgcacagggacttcctcacgggaccaactcactgttgaaggggggtaccgagaccagtctgtctactcctacgaggctggtggtgttgacatcggtcgcgcgattgagcagcaagtccgttaatgctcaagttactgatatcaactctaaaggtctggaactgcgtaagaccgttaccactgtggagactcagaatctggaggggctccatcatgatggtcagttttgccacaagccttgtcctcccggagaacgaaaggcccgagattgtacagttaatggggatgaacctgactgcgtgccatgtcaagaaggaaaggagtatacagataaggcccacttctccagtaaatgtcggcgttgcaggttatgtgacgagggtcatggtctggaggtcgagatcaattgcacccgcacccagaacactaagtgtaggtgtaagccaaatttcttctgcaacagcaccgtgtgcgaacattgcgacccctgtacaaagtgtgaacacgggatcataaaagaatgtaccctcacatctaacaccaaatgcaaggaggaaggctcgcgatctaatcttggttggctctgcttgctcctcctgcctatacctctcatcgtgtgggtaaaacgcaaggaggtgcagaaaacctgtagaaagcaccggaaggagaaccaaggcagccacgaatctcccacactcaacccagtggggatcgaaattgacttctcggatgtggacctcagcaaatacattacaactattgcaggagtcatgactctttctcaggttaaagggttcgtgagaaaaaatggtgtcaatgaggctaagatcgatgagataaagaatgataacgtgcaggacactgctgagcagaaggtccagcttctccgtaattggcaccagttacatggtaagaaggaagcctacgatacgctaataaaagatctcaaaaaggccaatctgtgtacactggcagaaaaaattcaaacaattattttaaaggatatcacctccgactcagaaaatagcaattttaggaatgagatacaaagtctcgtctag

SEQ ID NO: 335616 - DNA, 417 bp, Artificial Sequence
  derived and/or modified sequence
gtgactgccaatgtgggaagtttgttcgatgacccagaaaatcttcagaagaattggctgagagaattttatcaagcccttggttccttttacttcctgcatgagtctctgaaaaacatttaccagtttgatttcaaggctaaaaagtataggaaggtcgccggtaaggagatctatagcgatacattggaatctacacctatgttggagaaggagaaatttcctcaagactattttcctgagtgtaagtggtcacggaagggctttattcgaaccagatggtgcatcgccgattgcgcatttgatcttgtcaatatccacctgtttcatgacgcctcgaatctggtggcatgggaaaccagtccttccgtgtactcgggaattcggcataaagccctgggttacgtgctggactag

SEQ ID NO: 335617 - DNA, 315 bp, Artificial Sequence
  derived and/or modified sequence
ctcgacatttcctttccaccttcatacccctattccgaggatgctcgacagggggagcagtatatgaatacgagatgtccggcttggtgcgaccggatcttgatgtctcccagtgctaaggaactcgttctacgctcagagtccgaagagaaggtcgtcacttatgatcacattggtcctaatgtctgcatgggcgatcacaagcctgtgttcctagcgttccgcatcatgccaggagccggtaagcggtgccaacgccacgaacgaaccctacgggaaccaccgtgcagcagggggccaaatacacacagctag

SEQ ID NO: 335618 - DNA, 459 bp, Artificial Sequence
  derived and/or modified sequence
atggcaggcaaggctgccgctccaggcaccgctgttttgctggtgaccgcaaatgttggatccctgtttgacgacccagagaacctgcagaagaactggctgagggaattctatcaggctttggggagcttttacttcttgcacgagtctctaaagaacatttatcaatttgactttaaggccaagaagtaccgcaaagtcgctgggaaggaaatctattccgacaccttggagagcaccccaatgctggagaaagaaaagttccctcaggactattttcccgagtgcaagtggtcacgaaaggggttcatcaggaccaggtggtgcatcgctgattgtgcattcgacctggtgaatattcatttgtttcatgacgcgagcaatttggttgcttgggaaacctccccctctgtctactccggcattcggcataaagcccttggctacgtgctagattag

SEQ ID NO: 335619 - DNA, 416 bp, Artificial Sequence
  derived and/or modified sequence
gtcacggccaacgtgggctcgctcttcgacgacccagaaaacctgcagaagaactggcttcgggaattttaccaggcactaggaagcttttattttcttcatgagtccttaaaaaacatctaccagtttgactttaaagctaagaagtatagaaaggtcgctggcaaagagatctactcggataccttagagagcacgcccatgctggagaaggagaagtttccgcaggactacttccccgagtgcaaatggtcaagaaaaggcttcatccggacgaggtggtgcattgcagactgtgcctttgacttggtgaatatccatcttttccatgatgcttccaatctggtcgcctgggaaacaagcccttccgtgtactcgggaatccggcacaaggcactgggctacgtgctggacag

SEQ ID NO: 335620 - DNA, 610 bp, Artificial Sequence
  derived and/or modified sequence
ctggacatctcgttccctcccagctacccgtacagtgaggacgcccgccagggtgagcagtacatgaacacccggtgcccagcctggtgtgaccgcatcctcatgtccccgtctgccaaggagctggtgctgcggtcggagagcgaggagaaggttgtcacctatgaccacattgggcccaacgtctgcatgggagaccacaagcccgtgttcctggccttccgaatcatgcccggggcagggaagagatgccagcgccacgagaggacacttcgtgagcctccctgtagccgtggaccgaatacgcactcttgaaagctgcatcgagaacccgcccaagcgccacctgctagacggccagccccacacttcgcttcagcctccggaccattccggagcagcctcacatacctcactgtctcgtctgtctatgtgacattaagtagaaatattggttttttttttttttttttaaataagtcacagtcctgttgtcaaaactctaatagacagcaaagagggtctgtaccgtagacttcacagttttcagtttttaatgattgccagtggaggggcttcttcagcacagagaccccccactgtgtccagg

SEQ ID NO: 335621 - DNA, 2749 bp, Artificial Sequence
  derived and/or modified sequence
gcgcgggccgctgtgaggcgcggcggcgagcgacgggcgcggggccgcggagcagcgagcgagcgagcgagcgcgaggccggagccccggccaggcccggccgacccgccgagcccgcgatgcgccccggggccgccccccggcgcagctgacgccccgcggccccgcgaagaccccggccggccggtcccggaggaagcggccgccgccgccgccgcccagcccagcgcccgcgccgcccgggcaccatggcggggaaggcggccgccccgggcaccgcggtgctgctggtcacggccaacgtgggctcgctcttcgacgacccagaaaacctgcagaagaactggcttcgggaattttaccaggcactaggaagcttttattttcttcatgagtccttaaaaaacatctaccagtttgactttaaagctaagaagtatagaaaggtcgctggcaaagagatctactcggataccttagagagcacgcccatgctggagaaggagaagtttccgcaggactacttccccgagtgcaaatggtcaagaaaaggcttcatccggacgaggtggtgcattgcagactgtgcctttgacttggtgaatatccatcttttccatgatgcttccaatctggtcgcctgggaaacaagcccttccgtgtactcgggaatccggcacaaggcactgggctacgtgctggacagaatcattgatcagcgattcgagaaggtttcctactttgtatttggtgatttcaacttccggctggattccaagtccgtcgtggagacgctctgcacaaaagccaccatgcagacggtccgggccgccgacaccaatgaagtggtgaagctcatatttcgtgagtcggacaacgaccggaaggttatgctccagttagaaaagaaactcttcgactacttcaaccaggaggttttccgagacaacaacggcaccgcgctcttggagtttgacaaggagttgtctgtctttaaggacagactgtatgaactggacatctcgttccctcccagctacccgtacagtgaggacgcccgccagggtgagcagtacatgaacacccggtgcccagcctggtgtgaccgcatcctcatgtccccgtctgccaaggagctggtgctgcggtcggagagcgaggagaaggttgtcacctatgaccacattgggcccaacgtctgcatgggagaccacaagcccgtgttcctggccttccgaatcatgcccggggcaggtaaacctcatgcccatgtgcacaagtgttgtgtcgtgcagtgacgtggtgggaagagatgccagcgccacgagaggacacttcgtgagcctccctgtagccgtggaccgaatacgcactcttgaaagctgcatcgagaacccgcccaagcgccacctgctagacggccagccccacacttcgcttcagcctccggaccattccggagcagcctcacatacctcactgtctcgtctgtctatgtgacattaagtagaaatattggttttttttttttttttttaaataagtcacagtcctgttgtcaaaactctaatagacagcaaagagggtctgtaccgtagacttcacagttttcagtttttaatgattgccagtggaggggcttcttcagcacagagaccccccactgtgtccagggaccccctctgccaggtggaggtgtgtccaggggctggggaagccgagacgggcactccctctgccggccggcagcgtggccctgagcatggcaagggggtctgtctctgccgatgctccttccgcggcactgactctgcgccgtgtcacatggtttttgaatcacactgcagctgctttccatttttatatatatataaatatatataaatatatactttttaaaaataatttataaatcttaccaaaacttatgctaaatatactttccagtatgaacgcacaggagagtcccatcagcaggcggcattggagtctaggagctcagctgtgtgtccatcaacacacaaattcgtaaaaaacacacatggcctcgccatcgtgggtaaaatcggccccacagcacgtctgcaccagcgggccgttactcccatgccgttcttctgtgtaatattaagaactgaatgtgaagtttatagctagcctgggtgtaccttttaagaattttgtaaaccgtttgtctgtcttttgttactgttttatggtgccaagtatcctacgttacaacaataatatcatgggagaaatagaaatagcctagtttgcttccaatagaaactgcttttaacatgggctgtatataaaaatattaaagagaaacaaaactgtacatttcctcattgctccgctacagacaacccatgtcataaccttgttgcaaatatttttctcctatagcagtaagtacagcattagaaggtgattagagagtctgttgatgaaacacaaatgtatgttttattgattttactttagaacactacagagttcctggaccgggtgaaggcattagctgggtgtttgtgtgggataaatactaccactgcaagtgactgctgtccgctgcggaatctgttcttggtggaagcacaggtccgtgtcgctgctgtggttgccgctgtccgcggttcaacacggagtccgccccgcgggtttcagctgttggtcgttctgaggggcctttggaagtgaccggtctggttcctaagcaataaaattgaccgtggtgaaaata

SEQ ID NO: 335622 - DNA, 417 bp, Artificial Sequence
  derived and/or modified sequence
gtcacagccaacgtgggcagcctgtttgatgatcctgagaacctgcagaagaactggctgcgggagttctaccaggccctgggcagcttctacttcctgcacgagagcctgaagaacatctaccagtttgacttcaaggccaagaagtacaggaaggtggccggcaaggagatctacagcgacaccctggagagcacccccatgctggagaaggagaagttcccccaggactacttccctgagtgcaagtggagcaggaagggcttcatccgcacccgctggtgcatcgctgactgtgcctttgacctggtgaacatccacctgttccatgatgccagcaacctggtggcctgggagaccagccccagcgtgtacagcggcatccgccacaaggccctgggctacgtgctggactag

SEQ ID NO: 335623 - DNA, 315 bp, Artificial Sequence
  derived and/or modified sequence
ctggacatctccttcccccccagctacccctacagtgaagatgcccggcagggcgagcagtacatgaacacccgctgcccagcctggtgtgaccgcatcctgatgagccccagcgccaaggagctggtgctgcggtctgagagcgaggagaaggtggtgacctatgaccacatcggccccaacgtgtgcatgggagaccacaagcctgtgttcctggccttccgcatcatgcctggggccggcaagcgctgccagagacatgagaggaccctgcgggagcccccctgcagccggggccccaacacccacagctag

SEQ ID NO: 335624 - DNA, 459 bp, Artificial Sequence
  derived and/or modified sequence
atggccggcaaggccgccgcccctggaacagctgtgctgctggtgacagccaacgtgggcagcctgtttgatgatcctgagaacctgcagaagaactggctgcgggagttctaccaggccctgggcagcttctacttcctgcacgagagcctgaagaacatctaccagtttgacttcaaggccaagaagtacaggaaggtggccggcaaggagatctacagcgacaccctggagagcacccccatgctggagaaggagaagttcccccaggactacttccctgagtgcaagtggagcaggaagggcttcatccgcacccgctggtgcatcgctgactgtgcctttgacctggtgaacatccacctgttccatgatgccagcaacctggtggcctgggagaccagccccagcgtgtacagcggcatccgccacaaggccctgggctacgtgctggactag

SEQ ID NO: 335625 - DNA, 417 bp, Artificial Sequence
  derived and/or modified sequence
gtgaccgccaacgtgggcagcctgttcgacgaccccgagaacctgcaaaaaaactggcttagagagttctatcaggccttgggcagtttctactttttgcacgaaagcttaaagaatatctaccagtttgattttaaggccaagaagtaccgtaaggtggccgggaaggagatatactctgatacactcgagtcaacgccaatgctcgagaaggagaaattcccccaggactacttccccgagtgcaagtggtcacgcaaagggttcatccgaaccagatggtgtattgccgactgcgcgtttgacctggtcaacattcatctgttccacgacgcctctaaccttgttgcttgggagacctcgccctccgtgtatagtggaattcgccacaaggcactgggctatgtgctggactag

SEQ ID NO: 335626 - DNA, 315 bp, Artificial Sequence
  derived and/or modified sequence
ctggacatcagcttcccccccagctacccctacagcgaggacgcccgtcagggggaacagtatatgaatactcgttgcccggcttggtgcgatcgcatcctgatgtctccctcagcaaaagaactggtgctgcggtccgagagtgaggaaaaggtcgtgacatacgaccacattgggccaaatgtctgcatgggcgaccataagcctgtatttttagccttcagaatcatgccgggtgctggtaaacggtgccagcgccacgagaggaccctgagggagccgccatgctcaaggggccccaatactcattcttag

SEQ ID NO: 335627 - DNA, 459 bp, Artificial Sequence
  derived and/or modified sequence
atggccggcaaggccgccgcccccggcaccgccgtgctgctggtgacagccaatgtgggttccctttttgatgatcccgagaatttgcagaaaaactggctgcgcgagttttatcaggccctcggttcgttctattttttacatgaatctcttaaaaatatctaccagtttgacttcaaagctaagaaatatagaaaggtggctggaaaagagatctattcagacacacttgaatccacgcctatgcttgaaaaagaaaagttcccacaggactatttccctgaatgcaagtggtcaaggaagggatttatccggacccggtggtgcatcgctgactgtgcctttgacctcgtcaatattcatctgttccacgacgcttccaatcttgtggcatgggaaacatctccaagtgtttacagtggcattaggcacaaggcactggggtacgtcttagactag

SEQ ID NO: 335628 - DNA, 417 bp, Artificial Sequence
  derived and/or modified sequence
gtgacggccaatgtggggtctttgtttgacgatcctgaaaaccttcagaagaactggctgcgagagttctaccaggctttgggttcattttacttcctccatgaaagtcttaagaacatctaccaattcgactttaaggcaaaaaaatatcgcaaggtagccggaaaagaaatatactccgacactctggagtccacaccaatgctcgagaaagaaaagttcccccaggactacttcccagaatgtaagtggtccagaaaagggtttatccgcaccagatggtgtatcgccgactgtgcgttcgatttggtgaacatccatctgttccacgatgcatctaaccttgtcgcttgggaaacttctccctctgtgtactccggcatccgccataaagccttaggctatgtgctggactag

SEQ ID NO: 335629 - DNA, 315 bp, Artificial Sequence
  derived and/or modified sequence
ctggatatttcgttccctccgagctatccctatagtgaagacgccagacagggcgagcaatatatgaacacgaggtgcccagcctggtgcgatcgcattttaatgtctcccagcgcaaaagagctagttctaagaagcgagagtgaggagaaggtcgttacatatgaccatattggacctaatgtgtgcatgggcgatcataagcctgtcttcttagctttccgaatcatgccaggcgcaggtaaacgttgccagagacatgaacgaaccctgcgagagcctccatgctccagaggacctaacactcacagctag

SEQ ID NO: 335630 - DNA, 459 bp, Artificial Sequence
  derived and/or modified sequence
atggcaggaaaagccgctgcgccaggcactgctgtgctcctagttaccgcaaatgtgggctctctctttgatgaccctgaaaacctgcagaagaattggctcagagagttttatcaggctctgggttccttctactttctccacgaaagcctcaaaaatatttatcaatttgacttcaaagccaagaagtacaggaaggtcgccggtaaggaaatctactccgacaccctagagtccacaccaatgcttgaaaaagaaaagtttccccaagactactttcccgaatgcaagtggagtcgtaagggattcattaggacaaggtggtgtattgctgactgtgcgtttgatctggtgaacattcacctctttcacgacgccagcaatcttgtggcatgggagacttcgccatctgtctattctggcattcgccacaaggccctcggttatgtgttggactag

SEQ ID NO: 335631 - DNA, 417 bp, Artificial Sequence
  derived and/or modified sequence
gtgaccgccaacgtgggcagcctgttcgacgaccccgagaacctgcagaagaactggctgagagagttctaccaggccctgggcagcttctacttcctgcacgagagcctgaagaacatctaccagttcgacttcaaggccaagaagtacagaaaggtggccggcaaggagatctacagcgacaccctggagagcacccccatgctggagaaggagaagttcccccaggactacttccccgagtgcaagtggagcagaaagggcttcatcagaaccagatggtgcatcgccgactgcgccttcgacctggtgaacatccacctgttccacgacgccagcaacctggtggcctgggagaccagccccagcgtgtacagcggcatcagacacaaggccctgggctacgtgctggactag

SEQ ID NO: 335632 - DNA, 315 bp, Artificial Sequence
  derived and/or modified sequence
ctggacatcagcttcccccccagctacccctacagcgaggacgccagacagggcgagcagtacatgaacaccagatgccccgcctggtgcgacagaatcctgatgagccccagcgccaaggagctggtgctgagaagcgagagcgaggagaaggtggtgacctacgaccacatcggccccaacgtgtgcatgggcgaccacaagcccgtgttcctggccttcagaatcatgcccggcgccggcaagagatgccagagacacgagagaaccctgagagagcccccctgcagcagaggccccaacacccacagctag

SEQ ID NO: 335633 - DNA, 459 bp, Artificial Sequence
  derived and/or modified sequence
atggccggcaaggccgccgcccccggcaccgccgtgctgctggtgaccgccaacgtgggcagcctgttcgacgaccccgagaacctgcagaagaactggctgagagagttctaccaggccctgggcagcttctacttcctgcacgagagcctgaagaacatctaccagttcgacttcaaggccaagaagtacagaaaggtggccggcaaggagatctacagcgacaccctggagagcacccccatgctggagaaggagaagttcccccaggactacttccccgagtgcaagtggagcagaaagggcttcatcagaaccagatggtgcatcgccgactgcgccttcgacctggtgaacatccacctgttccacgacgccagcaacctggtggcctgggagaccagccccagcgtgtacagcggcatcagacacaaggccctgggctacgtgctggactag

SEQ ID NO: 335634 - protein, 989 aa, Artificial Sequence [sequence omitted]

SEQ ID NO: 335635 - protein, 886 aa, Artificial Sequence
  derived and/or modified sequence
  misc_feature (1)..(1): Xaa can be any naturally occurring amino acid
XNSGDPWENFQNNQALTYWECVYLLMVTMSTVGYGDVYAKTTLGRLFMVFFILGGLAMFASYVPEIIELIGNRKKYGGSYSAVSGRKHIVVCGHITLESVSNFLKDFLHKDRDDVNVEIVFLHNISPNLELEALFKRHFTQVEFYQGSVLNPHDLARVKIESADACLILANKYCADPDAEDASNIMRVISIKNYHPKIRIITQMLQYHNKAHLLNIPSWNWKEGDDAICLAELKLGFIAQSCLAQGLSTMLANLFSMRSFIKIEEDTWQKYYLEGVSNEMYTEYLSSAFVGLSFPTVCELCFVKLKLLMIAIEYKSANRESRILINPGNHLKIQEGTLGFFIASDAKEVKRAFFYCKACHDDITDPKRIKKCGCKRLKVAARSRYSKDPFEFKKETPNSRLVTEPVEDEQPSTLSPKKKQRNGGMRNSPNTSPKLMRHDPLLIPGNDQIDNMDSNVKKYDSTGMFHWCAPKEIEKVILTRSEAAMTVLSGHVVVCIFGDVSSALIGLRNLVMPLRASNFHYHELKHIVFVGSIEYLKREWETLHNFPKVSILPGTPLSRADLRAVNINLCDMCVILSANQNNIDDTSLQDKECILASLNIKSMQFDDSIGVLQANSQGFTPPGMDRSSPDNSPVHGMLRQPSITTGVNIPIITELVNDTNVQFLDQDDDDDPDTELYLTQPFACGTAFAVSVLDSLMSATYFNDNILTLIRTLVTGGATPELEALIAEENALRGGYSTPQTLANRDRCRVAQLALLDGPFADLGDGGCYGDLFCKALKTYNMLCFGIYRLRDAHLSTPSQCTKRYVITNPPYEFELVPTDLIFCLMQFDHNAGQSRASLSHSSHSSQSSSKKSSSVHSIPSTANRQNRPKSRESRDKQKYVQEERL

SEQ ID NO: 335636 - DNA, 2970 bp, Artificial Sequence
  derived and/or modified sequence
atggccttcaacgtattctttctgctgtatttcgggctcagatttatcgcagcgaacgacaaactgtggttttggctggaagtgaactccgtggttgatttctttactgtaccacccgtgtttgtgagtgtgtacctcaatagatcgtggctggggctccgctttcttcgcgcgctccggctgattcagttttcagagatcctccagtttctgaatattttgaagacctcaaactcaatcaagcttgttaatctactttcaatcttcatctctacctggctcactgcagccggatttattcatctcgtcgagaacagcggcgacccgtgggagaattttcagaacaaccaggcattgacctactgggagtgtgtgtatctattgatggtgactatgtctactgtagggtacggtgatgtgtacgcaaagaccaccctggggcggttgttcatggtgttcttcattttaggggggcttgcaatgttcgcaagctacgtgcccgagattatcgagctgattggaaaccgcaagaagtacggcggttcctactctgcggtgagtgggcgcaaacacatagtcgtgtgcggccacatcaccttggaatcagtctcaaacttcctgaaagatttcctgcacaaggatcgcgacgacgttaatgtggaaatcgtgtttttacataacatctcaccaaacctggaacttgaagccctttttaagcgtcatttcacgcaggttgaattctaccaaggctctgtgctgaacccccacgacctagctcgcgtgaaaattgaaagcgccgatgcctgtctcatcctcgccaataagtactgcgcggatccagacgccgaggatgcctcaaatatcatgagggttatatctataaaaaactaccacccgaagattcggataattacgcaaatgctgcaataccacaacaaagcccaccttctcaatatcccttcgtggaactggaaggaaggagatgacgcaatttgcctcgcagaactgaagctcggttttatagcccagtcctgcctagcgcaggggcttagtaccatgctggccaatctattcagcatgcgctcatttattaagatagaggaggacacctggcagaaatactacctggagggcgtctccaacgaaatgtatactgagtatttaagcagcgccttcgtgggactttcctttccaacagtctgtgagctgtgttttgtaaaactcaagctgctgatgattgccatcgagtataaatccgccaatagggaatcaaggattttaattaacccgggcaaccatttgaaaatacaagaggggaccctgggatttttcatagcttccgacgccaaagaagttaaacgcgcctttttttactgcaaagcctgtcacgacgatatcaccgatccaaagaggatcaagaagtgcggctgtaagagacttaaggttgcggctaggagccgctatagtaaggatccattcgaatttaagaaagagaccccaaacagccgacttgtgaccgagccagtcgaggacgagcagccttccaccctatctcctaaaaaaaaacagagaaacgggggaatgaggaattccccaaacacaagccctaaattgatgcgccacgatcctctcctcattcccgggaacgatcagatcgacaacatggattccaacgtgaagaagtacgacagcacaggtatgtttcactggtgcgctcctaaggagatcgaaaaggttatcctcaccagatccgaggccgcaatgactgtcctcagtggtcacgtggtggtgtgtatctttggtgacgtatcatccgcattaatagggctcagaaacttagttatgccactgcgggccagcaactttcactatcacgagcttaaacacatagtcttcgtggggtccatcgagtaccttaaaagggagtgggaaacactgcataattttcccaaggtgtccatcctccctggcacaccgcttagtcgggcagatctcagggcagttaatattaacctatgtgatatgtgcgttatattgtctgccaaccaaaataacattgatgatacctccctgcaggacaaagaatgcatcctagctagtctgaacataaagtcaatgcagtttgacgatagtataggagttctgcaagccaatagccagggcttcacaccccccggcatggacagaagctcaccggacaattctcccgtgcacggcatgctgcgccagccctctattactaccggggttaatatcccaattattactgagctggtcaacgatacaaacgtgcagtttctagaccaggacgacgacgacgacccagatacggaactgtacctgacacaaccctttgcgtgtggaaccgcctttgccgtctcagtgctggattccctcatgagcgccacctacttcaatgataacatactgacgctgatccggaccttggtgacgggtggagctactccagagcttgaggcactcattgccgaagaaaacgctctccgtggcgggtacagcacaccccaaactctcgcaaatagggataggtgccgtgtagcacagctggctctgttggatggaccattcgctgacctaggtgacggtggctgttacggcgacttgttctgcaaagcattgaagacatacaatatgctgtgcttcggcatttataggctgcgagacgcccacctctcgacaccctcacaatgtaccaagcggtacgtcatcactaatccaccctatgaattcgagctcgtccctaccgatctgattttctgtctcatgcagtttgaccataacgccggccagtcccgcgctagcctcagtcactcctcgcattcctcacagtctagctcaaaaaagagctctagcgtccatagcattccctcaaccgcaaataggcaaaataggcccaaatcgcgcgagagcagggataaacagaagtatgtccaagaggagaggctgtag

SEQ ID NO: 335637 - DNA, 2661 bp, Artificial Sequence
  derived and/or modified sequence
taaaatagcggtgacccgtgggaaaatttccaaaataaccaggccctgacttattgggagtgcgtgtacttgctgatggtgactatgtcgaccgtagggtacggggatgtgtacgcaaagacaacattgggcagactgtttatggttttctttatcctcggaggattagccatgtttgcctcttacgtgccagaaattatcgaactcataggcaaccggaagaagtacggaggatcatattcagcagtgtccggacgaaagcacatcgtcgtctgcggacacatcacactggagtccgtgtctaattttttaaaagattttcttcacaaggacagagatgatgtcaacgtggagatcgtattcttgcacaatatcagtcctaatcttgagctggaagcattatttaagagacacttcactcaagttgaattttaccagggcagcgtgttgaacccccatgacttggccagggtgaagatcgaatctgctgacgcttgcttgattcttgctaataagtactgtgcagatcctgacgcggaggacgcatctaacattatgagagtgatcagcatcaagaactaccaccctaaaatcagaatcatcactcaaatgctccagtatcacaataaggcacacctgctgaacattcccagctggaactggaaggagggggacgacgccatctgtctcgcagagttgaaactgggcttcattgcccagtcttgcctggcccaagggctaagtacaatgcttgcaaatctgttttctatgaggagctttatcaagatcgaagaggacacctggcagaagtactacctggagggtgtctcaaatgagatgtacaccgaatacctcagtagcgccttcgtaggattgtcgttccctaccgtttgtgagttgtgcttcgtcaagttgaagcttcttatgattgccattgagtacaaaagcgcaaacagagaaagcagaatactgatcaaccccgggaatcacctaaagatccaagagggcactctaggcttttttattgctagtgatgcgaaggaggtcaaaagggctttcttttactgtaaggcttgccatgatgatatcacagatccaaagaggataaaaaaatgtggctgtaagcgtttgaaagttgcggcccggtctcggtactccaaggacccttttgaattcaagaaggagacccccaacagtaggctggttacagagccagtggaggacgaacaaccaagcacattaagcccaaaaaagaaacagagaaatggaggaatgcgaaatagccctaatacaagccctaagctcatgcgccatgatcctctgcttatcccggggaacgaccaaatagataacatggacagtaatgtgaagaagtacgattcaaccgggatgtttcattggtgcgcccccaaggagatcgagaaagttatcttgacaaggagcgaagcagccatgacggtgctgtccgggcatgtcgtcgtctgcatatttggcgatgtgtccagtgctctcatcggcctgcgcaacctggtcatgcccctacgggcgagcaatttccactatcacgagctgaaacacattgtcttcgtcggatccatcgagtacttgaaacgcgaatgggagaccctgcataacttccctaaggtaagcatcctgccaggcacccctctgtcacgagccgacctgcgcgcagtcaacatcaacctctgtgatatgtgtgtgatcctgagtgcaaaccagaataatatcgatgatactagtctgcaggataaggagtgcatcctggcctcgctcaacataaaaagcatgcagttcgacgacagcattggggtgcttcaggccaactctcagggcttcactcctccgggtatggacagaagttccccagataacagccctgtacacgggatgttgagacagccaagcatcaccacaggagtaaatattcccatcattaccgaactcgtaaacgatacaaatgtccagtttttggaccaagatgacgacgacgatcccgacacagaactgtatttgacacagccttttgcttgtggcacggcgtttgcagtgagtgttctggactcactgatgtccgctacatacttcaacgataatatactcacactgataagaaccctggtgaccggcggcgcgacaccagaattagaggccctgattgcggaagaaaatgctcttcgtgggggctattccacccctcaaacactggccaatcgagatcgctgtcgggtggctcagctggcgctcctggatggtccatttgctgaccttggtgatggaggctgctacggggacttgttctgcaaggctttgaaaacttataatatgctatgctttggaatctaccgtctcagggacgcccacctcagcacccctagccagtgcactaaaaggtatgtgatcacgaaccctccatacgagttcgaactggttcccaccgatctgatcttctgtcttatgcagttcgatcacaatgctggccagtcccgggcttcactctctcacagttcccacagctcccagtcctcaagcaagaaaagcagctctgtacactccattccatctaccgccaaccgacagaaccggccgaagtcacgcgaaagccgcgacaagcagaaatacgtgcaggaagagcgcctgtag

SEQ ID NO: 335638 - DNA, 2970 bp, Artificial Sequence
  derived and/or modified sequence
atggccttcaacgtgttcttcctgctgtacttcggcctgcgcttcatcgccgccaatgacaagctgtggttctggctggaggtgaacagcgtggtggacttcttcaccgtgccccctgtgtttgtgtctgtgtacctgaacagatcctggctgggcctgcgcttcctgcgggccctgcggctcatccagttcagcgagatcctgcagttcctgaacatcctgaagaccagcaacagcatcaagctggtgaacctgctgagcatcttcatcagcacctggctgacagctgctggcttcatccacctggtggagaacagcggggacccctgggagaacttccagaacaaccaggccctgacctactgggagtgtgtgtacctgctgatggtgaccatgagcacagtgggctatggagatgtgtatgccaagaccaccctgggccgcctcttcatggtgttcttcatcctgggcggcctggccatgtttgccagctatgtgcctgagatcatcgagctgattggcaacaggaagaagtatggaggcagctacagcgctgtgtctggcaggaagcacatcgtggtgtgtggccacatcaccctggagagcgtgagcaacttcctgaaggacttcctgcacaaggacagagatgatgtgaatgtggagatcgtgttcctgcacaacatcagccccaacctggagctggaggccctcttcaagaggcacttcacccaggtggagttctaccagggctctgtgctgaacccccatgacctggcccgggtgaagattgaatctgcagatgcctgcctgatcctggccaacaagtactgtgccgaccctgatgctgaagatgccagcaacatcatgagggtcatcagcatcaagaactaccaccccaagatccgcatcatcacccagatgctgcagtaccacaacaaggcccacctgctgaacatccccagctggaactggaaggagggagatgatgccatctgcctggccgagctgaagctgggcttcatcgcccagagctgcctggcccagggcctgagcaccatgctggccaacctcttctccatgaggagcttcatcaagattgaggaggacacctggcagaagtactacctggagggcgtgtccaatgagatgtacacagagtacctgagcagcgcctttgtgggcctgtccttccccaccgtgtgtgagctgtgctttgtgaagctgaagctgctgatgattgccatcgagtacaagagcgccaaccgggagagccgcatcctgatcaaccctggcaaccacctgaagatccaggagggcaccctgggcttcttcatcgccagtgatgccaaggaggtgaagagggccttcttctactgcaaggcctgccatgatgacatcacagaccccaagaggatcaagaagtgtggctgcaagaggctgaaggtggccgcccggagccgctacagcaaggacccctttgagttcaagaaggagacccccaacagccggctggtgacagagcctgtggaggatgagcagcccagcaccctgagccccaagaagaagcagagaaatggaggcatgaggaacagccccaacaccagccccaagctgatgagacatgaccccctgctgatccctggaaatgaccagattgacaacatggacagcaatgtgaagaagtatgacagcacaggcatgttccactggtgtgcccccaaggagattgagaaggtgatcctgaccaggtctgaggccgccatgacagtgctgagcggccacgtggtggtgtgcatctttggagatgtgtcctctgccctgattggcctgaggaacctggtgatgcccctgcgggccagcaacttccactaccacgagctgaagcacatcgtgtttgtgggcagcattgagtacctgaagcgggagtgggagaccctgcacaacttccccaaggtgtccatcctgcccggcacccccctgagcagagctgacctgcgggctgtgaacatcaacctgtgtgacatgtgtgtgatcctgagcgccaaccagaacaacattgatgacaccagcctgcaggacaaggagtgcatcctggccagcctgaacatcaagtccatgcagtttgatgacagcattggagtgctgcaggccaacagccagggcttcaccccacctggcatggacaggagcagcccagacaacagccctgtgcacggcatgctgcggcagcccagcatcaccaccggggtgaacatccccatcatcacagagctggtgaatgacaccaacgtgcagttcctggaccaggatgatgatgatgatcctgacacagagctgtacctgacccagccctttgcctgtggcacagcctttgctgtgtctgtgctggacagcctgatgtctgccacctacttcaatgacaacatcctgaccctcatccgcaccctggtgactggaggagccaccccagagctggaggccctgattgctgaggagaatgccctgcggggcggctacagcaccccccagaccctggccaacagagaccgctgccgggtggcccagctggccctgctggatggcccctttgctgacctgggagatggcggctgctacggggacctcttctgcaaggccctgaagacctacaacatgctgtgcttcggcatctaccgcctgagagatgcccacctgagcacccccagccagtgcaccaagcgctacgtgatcaccaaccccccctatgaatttgagctggtgcccacagacctgatcttctgcctgatgcagtttgaccacaatgccggccagagccgggccagcctgagccacagcagccacagcagccagagcagcagcaagaagagcagctctgtgcacagcatccccagcacagccaaccggcagaaccggcccaagagccgggagagccgggacaagcagaagtatgtgcaggaggagcggctgtag

SEQ ID NO: 335639 - DNA, 2661 bp, Artificial Sequence
  derived and/or modified sequence
tgaaattctggggacccctgggagaacttccagaacaaccaggccctgacctactgggagtgtgtgtacctgctgatggtgaccatgagcacagtgggctatggagatgtgtatgccaagaccaccctgggccgcctcttcatggtgttcttcatcctgggcggcctggccatgtttgccagctatgtgcctgagatcatcgagctgattggcaacaggaagaagtatggaggcagctacagcgctgtgtctggcaggaagcacatcgtggtgtgtggccacatcaccctggagagcgtgagcaacttcctgaaggacttcctgcacaaggacagagatgatgtgaatgtggagatcgtgttcctgcacaacatcagccccaacctggagctggaggccctcttcaagaggcacttcacccaggtggagttctaccagggctctgtgctgaacccccatgacctggcccgggtgaagattgagagcgcagatgcctgcctgatcctggccaacaagtactgtgccgaccctgatgctgaagatgccagcaacatcatgagggtcatcagcatcaagaactaccaccccaagatccgcatcatcacccagatgctgcagtaccacaacaaggcccacctgctgaacatccccagctggaactggaaggagggagatgatgccatctgcctggccgagctgaagctgggcttcatcgcccagagctgcctggcccagggcctgagcaccatgctggccaacctcttctccatgaggagcttcatcaagattgaggaggacacctggcagaagtactacctggagggcgtgtccaatgagatgtacacagagtacctgagcagcgcctttgtgggcctgtccttccccaccgtgtgtgagctgtgctttgtgaagctgaagctgctgatgattgccatcgagtacaagagcgccaaccgggagagccgcatcctgatcaaccctggcaaccacctgaagatccaggagggcaccctgggcttcttcatcgccagtgatgccaaggaggtgaagagggccttcttctactgcaaggcctgccatgatgacatcacagaccccaagaggatcaagaagtgtggctgcaagaggctgaaggtggccgcccggagccgctacagcaaggacccctttgagttcaagaaggagacccccaacagccggctggtgacagagcctgtggaggatgagcagcccagcaccctgagccccaagaagaagcagagaaatggaggcatgaggaacagccccaacaccagccccaagctgatgagacatgaccccctgctgatccctggaaatgaccagattgacaacatggacagcaatgtgaagaagtatgacagcacaggcatgttccactggtgtgcccccaaggagattgagaaggtgatcctgaccaggtctgaggccgccatgacagtgctgagcggccacgtggtggtgtgcatctttggagatgtgagcagcgccctgattggcctgaggaacctggtgatgcccctgcgggccagcaacttccactaccacgagctgaagcacatcgtgtttgtgggcagcattgagtacctgaagcgggagtgggagaccctgcacaacttccccaaggtgtccatcctgcccggcacccccctgagcagagctgacctgcgggctgtgaacatcaacctgtgtgacatgtgtgtgatcctgagcgccaaccagaacaacattgatgacaccagcctgcaggacaaggagtgcatcctggccagcctgaacatcaagtccatgcagtttgatgacagcattggagtgctgcaggccaacagccagggcttcaccccacctggcatggacaggagcagcccagacaacagccctgtgcacggcatgctgcggcagcccagcatcaccactggagtgaacatccccatcatcacagagctggtgaatgacaccaacgtgcagttcctggaccaggatgatgatgatgatcctgacacagagctgtacctgacccagccctttgcctgtggcacagcctttgctgtgtctgtgctggacagcctgatgtctgccacctacttcaatgacaacatcctgaccctcatccgcaccctggtgactggaggagccaccccagagctggaggccctgattgctgaagaaaatgccctgcggggcggctacagcaccccccagaccctggccaacagagaccgctgccgggtggcccagctggccctgctggatggcccctttgctgacctgggagatggcggctgctatggagacctcttctgcaaggccctgaagacctacaacatgctgtgcttcggcatctaccgcctgagagatgcccacctgagcacccccagccagtgcaccaagagatatgtgatcaccaaccccccctatgaatttgagctggtgcccacagacctgatcttctgcctgatgcagtttgaccacaatgccggccagagccgggccagcctgagccacagcagccacagcagccagagcagcagcaagaagagcagctctgtgcacagcatccccagcacagccaaccggcagaaccggcccaagagccgggagagccgggacaagcagaagtatgtgcaggaggagcggctgtag

SEQ ID NO: 335640 - DNA, 2970 bp, Artificial Sequence
  derived and/or modified sequence
atggccttcaacgtgttcttcctgctgtacttcggcctgcggttcatagcggcaaatgacaaactgtggttttggcttgaagtcaactccgttgtggatttctttaccgtcccgccagttttcgtttccgtctatctgaatcgcagttggctcggtttacgttttctccgggctctccggctgatccagttcagtgagattttacaattcctgaacatcctgaagacgtctaatagcatcaaattggtcaatcttctgagtatattcatcagcacatggctcaccgccgccggcttcatccacttagtggagaactcaggggacccgtgggaaaatttccaaaataaccaagctttaacttattgggaatgcgtctatttgttgatggtgactatgagtacggttggatatggtgacgtttacgcaaaaacgacgctgggtcggctctttatggtcttttttattcttggcggcttggccatgttcgcgagctatgtgcctgagatcattgaactaatcggcaatcggaaaaagtatgggggatcatattctgcggtgagcgggcgcaagcatatcgtcgtgtgtggccacatcacacttgaatccgtctccaattttctcaaagactttctccacaaggatagggacgatgttaatgtggagattgtctttcttcacaacattagcccaaatcttgaacttgaagccctgttcaagagacactttacccaggtcgagttttaccagggcagcgtgcttaatccgcatgatcttgccagggtgaagatcgaaagcgccgacgcttgcctgattctcgccaataaatactgtgcagaccctgacgccgaagacgccagtaatattatgagagtcatcagtattaagaattaccatccaaaaattcgaatcatcacacaaatgcttcaatatcataataaagcacacttactaaacatccctagttggaactggaaagaaggcgatgatgcaatttgtcttgccgaactgaagctagggttcatcgcacagtcctgcttagcccaaggcttaagtactatgctggcaaacctcttctccatgaggtcctttattaagatagaagaggatacctggcagaagtactacctggaaggcgtgtccaacgagatgtacactgagtatctgtcatctgcctttgtcggcctctccttcccgaccgtctgtgagctgtgcttcgttaagctcaagctgcttatgattgcaatcgaatataaatcagctaatagggaaagcagaattttgatcaatccagggaaccacttaaagattcaggaaggcacactgggattctttattgccagcgatgctaaggaggtgaaacgtgcctttttttattgtaaggcatgtcatgatgacataacggaccctaaaaggattaagaaatgcggatgtaaacgactgaaggtggccgcccggtccaggtatagcaaagacccattcgagttcaagaaagaaacacctaatagcagactggtgacagagcctgtcgaggatgagcagcccagtacgttatcaccaaaaaagaagcagagaaacggcggcatgcgtaactctcccaacacctctcctaaattgatgaggcatgacccattacttatccctggaaatgatcagatcgacaacatggactctaatgtaaagaagtacgattctacagggatgtttcattggtgcgctcccaaggaaatcgaaaaggtcattctgacgcggtccgaggctgctatgacagtgcttagcgggcacgtggtggtgtgcatcttcggggatgtttcttcagctttaatcgggctcaggaacctggttatgccactacgtgcctccaattttcattaccatgagctgaagcacatcgtatttgtgggctccattgagtatttgaaacgcgaatgggagactctacacaacttccctaaggtttccattcttcccggcacccccctgagtcgggctgatctacgcgccgtcaacatcaacctctgtgacatgtgtgttatcttgagcgcaaaccagaataatatcgatgacacgagtcttcaggacaaagaatgcatcctggcctctctcaacatcaaatcaatgcaattcgatgactcaattggcgtgctgcaagccaatagccagggctttaccccaccaggcatggaccgctccagccccgataacagtcccgttcacgggatgctccgtcagccctctataacaacgggtgtcaacattccaatcatcacggagctggtaaacgataccaatgttcaattcctcgatcaggacgatgacgatgatcctgataccgagctttatctcacgcaacccttcgcatgcggcacagcctttgctgttagcgtgctcgatagcttaatgagcgccacttactttaacgacaatattcttacccttattcgaaccctcgtaaccggaggcgctacgcccgaacttgaagctctcatcgccgaagaaaatgctctaaggggcggctattctacccctcagaccctcgcaaatcgcgaccgttgtcgagttgctcagctagccctgctcgacgggccctttgctgacttgggtgacggaggctgttatggcgacctcttctgtaaggctctcaaaacttacaacatgctgtgtttcggtatttacaggctgcgggacgcccacttgtcaaccccttcacagtgcacaaagagatatgtgattacgaacccaccatatgagttcgaactggtccctaccgacctgatcttctgtcttatgcaattcgaccataacgccggccagagccgagcgtccctaagtcactcatcccactcatctcaatcaagtagtaaaaagtcctcatccgtccacagcattccctcaacggctaacaggcagaaccgccctaagtcccgagagagtcgcgacaaacaaaagtatgtccaagaggaacggctttag

SEQ ID NO: 335641 - DNA, 2661 bp, Artificial Sequence
  derived and/or modified sequence
tgaaacagcggcgacccctgggagaacttccagaacaaccaggccctgacgtattgggagtgtgtgtatcttcttatggtcaccatgagcacggttgggtatggtgatgtgtacgctaagactaccctgggaaggctgtttatggtgttttttattctcggggggctggcgatgttcgcttcttacgtgcccgagattattgagcttatcggcaacagaaaaaagtatggcggcagttatagtgccgtatcaggtcgcaaacatattgttgtctgcggtcatattacactcgaatctgtttctaatttcctgaaagactttctgcacaaggatagggacgacgtgaatgtggagattgttttcctccacaatatcagccctaacctcgaactggaagcgctcttcaagaggcacttcacccaggtcgagttctatcaggggtctgtgctgaatcctcacgatctggctagggtgaagattgaatctgcagacgcctgtctcattctcgcaaacaagtactgtgctgatccagatgctgaggatgcctctaatatcatgcgggttatctctatcaaaaactatcatcctaagatcagaatcattactcagatgctgcagtatcacaataaggcccacttactcaacatcccaagctggaactggaaggagggagacgacgctatttgcctggcagaactcaaactgggatttatagctcagtcctgtttggcacagggattaagcactatgttagctaacctcttctctatgcgttctttcatcaaaatcgaggaagatacctggcagaagtactacttagagggggtgtccaatgagatgtacactgagtacctctcctctgcattcgtgggattaagctttcccacagtgtgcgaactctgctttgtcaaactgaaacttctaatgattgctatagagtataaaagtgctaatcgggagagtagaatattaatcaatccaggaaatcacctgaaaattcaggagggaacgctcggattctttatagcgtccgatgccaaggaggtgaagcgggccttcttttactgcaaagcctgccacgacgatatcacagatccaaagcgtatcaaaaagtgtggttgtaagcgactgaaagtcgccgcccgtagtcgatatagtaaagacccatttgagttcaagaaagagaccccaaactcccgtttggttactgaaccggttgaggacgagcagccaagcaccttgagtccaaagaaaaaacaacggaacgggggcatgagaaatagtccgaacacatctcccaagctaatgcggcacgatccgctgttgattccaggtaacgaccaaattgataatatggactctaatgtgaagaagtatgattcgacgggtatgttccactggtgtgccccaaaagagattgagaaggtgatcttaactcggtctgaggcagccatgacagtgctgtctggacatgtggtggtttgtatctttggtgatgtgtcatctgccttaatcggcctgcggaatttagtgatgcctctcagggcctccaacttccactatcacgagctgaagcacatcgtgttcgttggatcgatagagtacttgaagcgtgaatgggagacactccataatttcccaaaagtgtctattttacccggaacgcccctgagccgcgcggacttgcgtgccgtaaacataaatctgtgcgacatgtgtgtgatactgagcgccaatcagaacaacatcgatgatacatccttgcaagataaggaatgcatacttgcttccctgaacatcaaatctatgcagtttgatgatagtatcggggtgctgcaggccaattcacaagggttcactcctcccggtatggaccgctcttctccagacaatagcccagtccatggaatgctgcgtcagccgtcaattaccacaggcgtaaacattccgatcatcactgaattagtcaacgatacaaacgtccagtttctagatcaggacgatgatgacgatcctgacacagaactttacctgacgcagccttttgcctgtgggacagcatttgcggtctccgtactggactctcttatgtcggctacatacttcaacgataacattctcactctgatccgcaccttggtcactggcggagccacaccagaactggaggccttgattgcagaggaaaacgccttgcgaggagggtattcgacaccacagaccctggctaatcgggaccggtgcagggtggctcagctagctctgcttgacgggccttttgccgatctgggagatggtggatgctacggcgatctgttctgtaaagctctgaagacatacaacatgctgtgctttggaatttatcgccttagagacgcacatctctcgacaccatcccaatgcacaaaacgttatgtgataaccaacccaccctacgaatttgagctagtgcctacagatctcattttttgtcttatgcaatttgatcataacgcaggccagagcagagcttctctctcccactccagtcattcttcacagagctcctccaagaagagttcttctgtccatagtatccccagcactgccaatagacaaaatcggccgaaaagcagagagtccagggataagcagaaatatgttcaggaagaacggctctag

SEQ ID NO: 335642 - DNA, 3761 bp, Artificial Sequence
  derived and/or modified sequence
agctgaagaggggagagagacaccctccccacccccatatgaggatggtctgtgatgatatgcatgcaggggaagggacttatccaaggtccctgatagatagggactggaattttggcagtgtcttttctagagtagaacaaatttatcagttgaatttgctgtagttctctgaaggtttctttggccacattagaatttttgagccctggcatccaagtaggccaacttcaaaatggctgtgtgctccactcagagattctgctgtgaagactggcaggagattttttagcctattctgaactccaactgttccagttcctcttgctttccagaggtgtgagcacctggaagcccctgctctggtctacaccccaggctcaagattcatcctgctcactcagccactcatgctgtcaccagtgataaaactgagatgcattccccagaaccaagcaaacaagaagaaggtcctccttcagtgggctgtcatcgatcattccccgttccatggccacaggactgactgctgatgaaatctaaaagaccagcttgcagaaggcatggaaatcctggggttaggggcccctctgctatggaggttgtcttagtctttgctctcagcatcggtgcacttgtaatatacttcatagattcatcaaactcctggagacttcatggcaaaccaacatattgaatgcaggaaattccagggtggccaagaatattctccagaaatcccaatagaatcctgccagaatttctacaaagatttcacattacagatcgacatggctttcaacgtgttcttccttctctacttcggcttgcggtttattgcagccaacgataaattgtggttctggctggaagtgaactctgtagtggatttcttcacggtgccccccgtgtttgtgtctgtgtacttaaacagaagttggcttggtttgagatttttaagagctctgagactgatacagttttcagaaattttgcagtttctgaatattcttaaaacaagtaattccatcaagctggtgaatctgctctccatatttatcagcacgtggctgactgcagccgggttcatccatttggtggagaattcaggggacccatgggaaaatttccaaaacaaccaggctctcacctactgggaatgtgtctatttactcatggtcacaatgtccaccgttggttatggggatgtttatgcaaaaaccacacttgggcgcctcttcatggtcttcttcatcctcgggggactggccatgtttgccagctacgtccctgaaatcatagagttaataggaaaccgcaagaaatacgggggctcctatagtgcggttagtggaagaaagcacattgtggtctgcggacacatcactctggagagtgtttccaacttcctgaaggactttctgcacaaggaccgggatgacgtcaatgtggagatcgtttttcttcacaacatctcccccaacctggagcttgaagctctgttcaaacgacattttactcaggtggaattttatcagggttccgtcctcaatccacatgatcttgcaagagtcaagatagagtcagcagatgcatgcctgatccttgccaacaagtactgcgctgacccggatgcggaggatgcctcgaatatcatgagagtaatctccataaagaactaccatccgaagataagaatcatcactcaaatgctgcagtatcacaacaaggcccatctgctaaacatcccgagctggaattggaaagaaggtgatgacgcaatctgcctcgcagagttgaagttgggcttcatagcccagagctgcctggctcaaggcctctccaccatgcttgccaacctcttctccatgaggtcattcataaagattgaggaagacacatggcagaaatactacttggaaggagtctcaaatgaaatgtacacagaatatctctccagtgccttcgtgggtctgtccttccctactgtttgtgagctgtgttttgtgaagctcaagctcctaatgatagccattgagtacaagtctgccaaccgagagagccgtatattaattaatcctggaaaccatcttaagatccaagaaggtactttaggatttttcatcgcaagtgatgccaaagaagttaaaagggcatttttttactgcaaggcctgtcatgatgacatcacagatcccaaaagaataaaaaaatgtggctgcaaacggctcaaggttgcagctagatcacgctattccaaagatccatttgagttcaagaaggagactcccaattctcggcttgtgaccgagccagttgaagatgagcagccgtcaacactatcaccaaaaaaaaagcaacggaatggaggcatgcggaactcacccaacacctcgcctaagctgatgaggcatgaccccttgttaattcctggcaatgatcagattgacaacatggactccaatgtgaagaagtacgactctactgggatgtttcactggtgtgcacccaaggagatagagaaagtcatcctgactcgaagtgaagctgccatgaccgtcctgagtggccatgtcgtggtctgcatctttggcgacgtcagctcagccctgatcggcctccggaacctggtgatgccgctccgtgccagcaactttcattaccatgagctcaagcacattgtgtttgtgggctctattgagtacctcaagcgggaatgggagacgcttcataacttccccaaagtgtccatattgcctggtacgccattaagtcgggctgatttaagggctgtcaacatcaacctctgtgacatgtgcgttatcctgtcagccaatcagaataatattgatgatacttcgctgcaggacaaggaatgcatcttggcgtcactcaacatcaaatctatgcagtttgatgacagcatcggagtcttgcaggctaattcccaagggttcacacctccaggaatggatagatcctctccagataacagcccagtgcacgggatgttacgtcaaccatccatcacaactggggtcaacatccccatcatcactgaactagtgaacgatactaatgttcagtttttggaccaagacgatgatgatgaccctgatacagaactgtacctcacgcagccctttgcctgtgggacagcatttgccgtcagtgtcctggactcactcatgagcgcgacgtacttcaatgacaatatcctcaccctgatacggaccctggtgaccggaggagccacgccggagctggaggctctgattgctgaggaaaacgcccttagaggtggctacagcaccccgcagacactggccaatagggaccgctgccgcgtggcccagttagctctgctcgatgggccatttgcggacttaggggatggtggttgttatggtgatctgttctgcaaagctctgaaaacatataatatgctttgttttggaatttaccggctgagagatgctcacctcagcacccccagtcagtgcacaaagaggtatgtcatcaccaacccgccctatgagtttgagctcgtgccgacggacctgatcttctgcttaatgcagtttgaccacaatgccggccagtcccgggccagcctgtcccattcctcccactcgtcgcagtcctccagcaagaagagctcctctgttcactccatcccatccacagcaaaccgacagaaccggcccaagtccagggagtcccgggacaaacagaagtacgtgcaggaagagcggctttga

SEQ ID NO: 335643 - DNA, 3090 bp, Artificial Sequence
  derived and/or modified sequence
gaattcaggggacccatgggaaaatttccaaaacaaccaggctctcacctactgggaatgtgtctatttactcatggtcacaatgtccaccgttggttatggggatgtttatgcaaaaaccacacttgggcgcctcttcatggtcttcttcatcctcgggggactggccatgtttgccagctacgtccctgaaatcatagagttaataggaaaccgcaagaaatacgggggctcctatagtgcggttagtggaagaaagcacattgtggtctgcggacacatcactctggagagtgtttccaacttcctgaaggactttctgcacaaggaccgggatgacgtcaatgtggagatcgtttttcttcacaacatctcccccaacctggagcttgaagctctgttcaaacgacattttactcaggtggaattttatcagggttccgtcctcaatccacatgatcttgcaagagtcaagatagagtcagcagatgcatgcctgatccttgccaacaagtactgcgctgacccggatgcggaggatgcctcgaatatcatgagagtaatctccataaagaactaccatccgaagataagaatcatcactcaaatgctgcagtatcacaacaaggcccatctgctaaacatcccgagctggaattggaaagaaggtgatgacgcaatctgcctcgcagagttgaagttgggcttcatagcccagagctgcctggctcaaggcctctccaccatgcttgccaacctcttctccatgaggtcattcataaagattgaggaagacacatggcagaaatactacttggaaggagtctcaaatgaaatgtacacagaatatctctccagtgccttcgtgggtctgtccttccctactgtttgtgagctgtgttttgtgaagctcaagctcctaatgatagccattgagtacaagtctgccaaccgagagagccgtatattaattaatcctggaaaccatcttaagatccaagaaggtactttaggatttttcatcgcaagtgatgccaaagaagttaaaagggcatttttttactgcaaggcctgtcatgatgacatcacagatcccaaaagaataaaaaaatgtggctgcaaacggctcaaggttgcagctagatcacgctattccaaagatccatttgagttcaagaaggagactcccaattctcggcttgtgaccgagccagttgaagatgagcagccgtcaacactatcaccaaaaaaaaagcaacggaatggaggcatgcggaactcacccaacacctcgcctaagctgatgaggcatgaccccttgttaattcctggcaatgatcagattgacaacatggactccaatgtgaagaagtacgactctactgggatgtttcactggtgtgcacccaaggagatagagaaagtcatcctgactcgaagtgaagctgccatgaccgtcctgagtggccatgtcgtggtctgcatctttggcgacgtcagctcagccctgatcggcctccggaacctggtgatgccgctccgtgccagcaactttcattaccatgagctcaagcacattgtgtttgtgggctctattgagtacctcaagcgggaatgggagacgcttcataacttccccaaagtgtccatattgcctggtacgccattaagtcgggctgatttaagggctgtcaacatcaacctctgtgacatgtgcgttatcctgtcagccaatcagaataatattgatgatacttcgctgcaggacaaggaatgcatcttggcgtcactcaacatcaaatctatgcagtttgatgacagcatcggagtcttgcaggctaattcccaagggttcacacctccaggaatggatagatcctctccagataacagcccagtgcacgggatgttacgtcaaccatccatcacaactggggtcaacatccccatcatcactgaactagtgaacgatactaatgttcagtttttggaccaagacgatgatgatgaccctgatacagaactgtacctcacgcagccctttgcctgtgggacagcatttgccgtcagtgtcctggactcactcatgagcgcgacgtacttcaatgacaatatcctcaccctgatacggaccctggtgaccggaggagccacgccggagctggaggctctgattgctgaggaaaacgcccttagaggtggctacagcaccccgcagacactggccaatagggaccgctgccgcgtggcccagttagctctgctcgatgggccatttgcggacttaggggatggtggttgttatggtgatctgttctgcaaagctctgaaaacatataatatgctttgttttggaatttaccggctgagagatgctcacctcagcacccccagtcagtgcacaaagaggtatgtcatcaccaacccgccctatgagtttgagctcgtgccgacggacctgatcttctgcttaatgcagtttgaccacaatgccggccagtcccgggccagcctgtcccattcctcccactcgtcgcagtcctccagcaagaagagctcctctgttcactccatcccatccacagcaaaccgacagaaccggcccaagtccagggagtcccgggacaaacagaagtacgtgcaggaagagcggctttgatatgtcttccttcacttcccccattgccaccccccaatcccagtccccccatcggtctgttcacatctctgtgttcatcttggcaagacctactcaatcaagtgatgatgccagttgataaacttccctggaaaacatttacagctattccatttggcaaacttgcttctctgtcaatatttcatcctcctttaaaccaggagggttattaatggcaaaagcattggtcttctttatgcttgatcagtatgactcaaattaaaagtgttctgctgtgtatatcaactcagtagcccacacccagttatctgggagctgatggttcagtcactgtattacccaaatctttcctgccagctgcctttcagacatttgttaaatcccaaccagagaccgggcagatagagagaagtaaatccgaagtgcgtttt

SEQ ID NO: 335644 - DNA, 2970 bp, Artificial Sequence
  derived and/or modified sequence
atggccttcaatgtgttcttcctcctttatttcgggcttcgtttcattgcggcaaacgacaagctttggttttggttggaagtgaattcagtcgtagacttttttactgtccccccagtgttcgtttcagtctacctgaaccggagctggctgggtctgcgctttctgagagcactacgccttatacaattttccgagatccttcaattcctcaacattttgaaaactagcaacagcatcaaactcgtgaaccttctgtctattttcatctctacatggctgactgctgccggtttcatccacctcgttgaaaattcgggagacccatgggagaactttcaaaacaatcaggcattgacatactgggagtgcgtgtatcttctgatggtgacgatgagcaccgtcgggtatggagacgtttatgcgaagactaccctcgggaggctgttcatggtgttctttattctgggcggtctggcaatgttcgctagttacgtgccggagatcattgagctgatcggcaaccgaaaaaaatatggcggtagctattctgccgtctcgggccgaaaacacattgttgtgtgcggccacattactctagagtctgtcagcaatttcctcaaggactttctgcacaaagacagagatgacgtgaacgtggaaatagtgttccttcacaatataagccccaatctagaactcgaagccttgttcaaaaggcacttcacccaggtcgaattttaccaaggtagcgttttaaatccccacgatttggctagggtgaaaattgagtcagcggacgcctgcctgattctagctaacaaatattgcgccgatccggacgcagaagatgcaagcaacattatgcgggtgataagtattaagaactatcatccgaaaatccgcatcatcactcagatgctccaataccacaataaagcccatcttctgaatatcccttcgtggaactggaaggagggcgatgatgctatttgcctggcagagttgaagttggggtttatcgcccagagttgtcttgcacagggcctctcaaccatgctagctaacctcttttctatgcggtcctttattaaaatagaggaagatacttggcaaaagtactaccttgaaggagtcagtaacgaaatgtataccgagtatttgagcagcgccttcgtcgggttatcttttcctacggtgtgtgaactatgtttcgttaagttgaagctgttgatgatcgccatcgaatacaagagtgctaaccgcgagtcacgcattctgattaatccaggcaatcacctaaaaatccaggagggcaccctggggttcttcatagcttcagacgcaaaagaagtgaagagggcattcttctactgtaaagcgtgtcatgatgatatcaccgaccctaagagaatcaagaagtgtggatgcaagagactgaaagtggctgctcgatccagatattccaaagacccattcgaattcaaaaaagagacacctaatagtagactggttacggagccggtcgaggatgagcagccatccaccctgtcccccaagaagaaacagagaaacggcggtatgcgaaactctcctaacacatctcccaaattgatgcggcacgatcccttactgattcccggaaacgatcagatcgataacatggattcaaacgtgaaaaagtacgacagtaccggcatgtttcactggtgcgccccaaaagagatcgaaaaggttatactgaccagaagcgaggctgctatgaccgtgctgagtggtcacgttgtggtctgtatcttcggtgacgtgtcgagcgcactaatcggcctgaggaatttggtcatgccgctgagagcctctaatttccattatcacgagctcaaacacatagtcttcgtcggcagcatcgagtatctgaaacgggaatgggagactttacataatttcccaaaagtttcaattctccctggtactccattaagcagggccgacctgcgtgctgtgaatatcaacctgtgcgatatgtgtgtgatcctgagtgccaatcagaacaacattgatgacaccagcctccaggataaggagtgtatcttggcgagcctcaatattaaatcaatgcagttcgacgactctattggagtgctgcaggctaacagtcaaggcttcacaccccctgggatggaccggtcgagtcctgacaatagccctgtgcacggaatgcttagacagccctcaatcacaaccggcgtgaatattcctatcatcacagagctggtcaacgacacgaatgtgcagttcctggaccaggacgatgacgacgaccccgacacagagctctatctgactcagccattcgcctgcggcaccgccttcgctgtctccgtgctagatagcttgatgtccgccacttacttcaatgataatatcctgaccctcatcaggacccttgtgaccggtggggctacgccggaactggaggccttgatcgctgaggaaaatgccctgcgcggaggatattccaccccccagaccctggcaaaccgcgatcgctgtagagtggcacagttggcgctgctggacggcccatttgcggatctgggggatggcggatgctacggcgatcttttttgtaaggcgttgaaaacttataatatgttgtgttttggtatttaccgcctgcgtgacgcgcatctgagcacaccctcccagtgcactaaaaggtatgtgattaccaatcctccttacgaattcgaactggtcccaaccgatctcattttctgtctcatgcagttcgaccataatgctggccaatcccgagccagtctgagtcactcttcacactcgagtcagtcttcaagcaagaaatcctcttccgtacattcaatcccttccaccgctaataggcaaaatcggcctaagtcaagggaaagtagagataaacagaaatacgttcaagaggaaagactgtag

SEQ ID NO: 335645 - DNA, 2661 bp, Artificial Sequence
  derived and/or modified sequence
tgaaactctggagacccatgggagaactttcagaacaaccaggccctcacttactgggaatgcgtttatctgctgatggtgactatgtctaccgtaggatacggtgacgtttacgccaaaacaactttaggtaggctttttatggtgttctttatcctgggagggttagcaatgtttgcttcgtatgtacccgaaatcatcgagctgatcggcaacaggaagaagtacggtgggtcctatagcgcagtctctgggaggaagcacattgtagtttgcgggcacattaccctcgagagtgtttccaattttttgaaggattttctgcacaaggaccgcgatgacgtgaatgtggaaattgtattcctgcataacatcagccccaacctagagttggaagccctgtttaaaagacatttcacccaggtggagttctaccaaggctccgtcttgaacccacatgacctggctagagtcaaaatcgagtccgccgacgcttgtttgatcctggccaataaatattgcgccgaccccgatgccgaagacgcctctaatattatgagggtaatttctatcaaaaattatcacccaaagatccgtatcatcactcagatgctgcaataccataataaagcgcacctgctcaacattccgagctggaattggaaggagggagacgatgcaatctgtttggctgaattgaaactcgggtttattgctcaaagttgtctggcccagggcctgagtaccatgcttgctaacctgtttagcatgcgatccttcataaagatcgaagaagacacatggcaaaagtattatcttgaaggcgtctcaaatgagatgtacactgagtacctttcaagtgccttcgtcggcctctccttccccactgtctgtgaactgtgtttcgttaaactgaagctcctgatgatcgcgattgagtacaaatctgcgaacagggaaagcagaatcctcattaacccgggtaatcacttaaagatccaggaggggacgttagggttctttattgcttctgacgctaaagaagtcaagagggcctttttttattgtaaagcatgccacgatgatatcacagaccctaaacgcataaagaaatgcggctgtaagagactcaaggtcgccgcaaggagtagatattcaaaggatccatttgagtttaaaaaagagacaccaaacagccgcctggtgactgagcccgtagaggacgagcagccatctaccctgagtcctaaaaagaagcagcggaatgggggtatgaggaactcaccaaacacgtctcctaagcttatgcgccacgaccccctactgattccagggaatgatcagatcgataacatggattcaaatgtcaagaagtatgacagtacaggcatgtttcattggtgcgcgcctaaggaaatcgaaaaggtcatactgacaaggtctgaggctgcgatgacggtcctgtccggtcatgtggtggtgtgcatcttcggggatgtgtcctcagcattgatcggactgcgaaacctggttatgcccctgagagcctccaatttccactatcatgagctgaagcacatagtgtttgtaggtagcatagaatacctcaagagagagtgggagactctgcataacttcccaaaggtcagcatcctgcccggaacccctctcagtagggctgatctgagggcagtgaacatcaacctctgcgacatgtgcgtcatcctttcggcgaatcagaacaatatcgacgatacatccctgcaggacaaagaatgtatcctggctagcctaaatataaagagtatgcaatttgatgattcaattggagtccttcaggctaatagtcaaggatttacacctcccggtatggataggagctctccagacaactcaccagtgcacggaatgttaaggcagccatccataacgaccggagtcaacattcccattatcactgagctcgtgaatgacacaaacgtccagttccttgaccaggatgatgatgacgatccggacactgagctgtacctcacgcagccatttgcctgcgggacagccttcgcagttagtgtgctggacagcttgatgtccgcgacctatttcaatgataacatcctcactctgatccgaaccttggtcacagggggagcaacacctgagcttgaggcccttattgctgaagaaaacgctctgagaggtggctactccacaccccagaccttagccaaccgtgatagatgccgggtggcccagttggcgttactcgatgggcctttcgcagatctgggcgatggaggttgctatggggacctgttttgtaaggctctgaagacctataacatgctctgcttcggtatataccggctgagagatgcgcatttgtcgacccccagccagtgtaccaagaggtacgtcataacgaaccctccgtatgaatttgagctcgttccgacagatcttatcttctgcctgatgcaatttgaccacaacgccggtcaatcacgagcctctttgagccattcgtctcattcaagccagtcaagttctaaaaagtcgagctcagtgcatagtattcccagcacggctaaccggcaaaacagaccaaaatcacgtgaatctagggataagcagaagtatgtgcaggaagagcgcctttag

SEQ ID NO: 335646 - DNA, 2970 bp, Artificial Sequence
  derived and/or modified sequence
atggccttcaacgtgttcttcctgctgtacttcggcctgagattcatcgccgccaacgacaagctgtggttctggctggaggtgaacagcgtggtggacttcttcaccgtgccccccgtgttcgtgagcgtgtacctgaacagaagctggctgggcctgagattcctgagagccctgagactgatccagttcagcgagatcctgcagttcctgaacatcctgaagaccagcaacagcatcaagctggtgaacctgctgagcatcttcatcagcacctggctgaccgccgccggcttcatccacctggtggagaacagcggcgacccctgggagaacttccagaacaaccaggccctgacctactgggagtgcgtgtacctgctgatggtgaccatgagcaccgtgggctacggcgacgtgtacgccaagaccaccctgggcagactgttcatggtgttcttcatcctgggcggcctggccatgttcgccagctacgtgcccgagatcatcgagctgatcggcaacagaaagaagtacggcggcagctacagcgccgtgagcggcagaaagcacatcgtggtgtgcggccacatcaccctggagagcgtgagcaacttcctgaaggacttcctgcacaaggacagagacgacgtgaacgtggagatcgtgttcctgcacaacatcagccccaacctggagctggaggccctgttcaagagacacttcacccaggtggagttctaccagggcagcgtgctgaacccccacgacctggccagagtgaagatcgagagcgccgacgcctgcctgatcctggccaacaagtactgcgccgaccccgacgccgaggacgccagcaacatcatgagagtgatcagcatcaagaactaccaccccaagatcagaatcatcacccagatgctgcagtaccacaacaaggcccacctgctgaacatccccagctggaactggaaggagggcgacgacgccatctgcctggccgagctgaagctgggcttcatcgcccagagctgcctggcccagggcctgagcaccatgctggccaacctgttcagcatgagaagcttcatcaagatcgaggaggacacctggcagaagtactacctggagggcgtgagcaacgagatgtacaccgagtacctgagcagcgccttcgtgggcctgagcttccccaccgtgtgcgagctgtgcttcgtgaagctgaagctgctgatgatcgccatcgagtacaagagcgccaacagagagagcagaatcctgatcaaccccggcaaccacctgaagatccaggagggcaccctgggcttcttcatcgccagcgacgccaaggaggtgaagagagccttcttctactgcaaggcctgccacgacgacatcaccgaccccaagagaatcaagaagtgcggctgcaagagactgaaggtggccgccagaagcagatacagcaaggaccccttcgagttcaagaaggagacccccaacagcagactggtgaccgagcccgtggaggacgagcagcccagcaccctgagccccaagaagaagcagagaaacggcggcatgagaaacagccccaacaccagccccaagctgatgagacacgaccccctgctgatccccggcaacgaccagatcgacaacatggacagcaacgtgaagaagtacgacagcaccggcatgttccactggtgcgcccccaaggagatcgagaaggtgatcctgaccagaagcgaggccgccatgaccgtgctgagcggccacgtggtggtgtgcatcttcggcgacgtgagcagcgccctgatcggcctgagaaacctggtgatgcccctgagagccagcaacttccactaccacgagctgaagcacatcgtgttcgtgggcagcatcgagtacctgaagagagagtgggagaccctgcacaacttccccaaggtgagcatcctgcccggcacccccctgagcagagccgacctgagagccgtgaacatcaacctgtgcgacatgtgcgtgatcctgagcgccaaccagaacaacatcgacgacaccagcctgcaggacaaggagtgcatcctggccagcctgaacatcaagagcatgcagttcgacgacagcatcggcgtgctgcaggccaacagccagggcttcaccccccccggcatggacagaagcagccccgacaacagccccgtgcacggcatgctgagacagcccagcatcaccaccggcgtgaacatccccatcatcaccgagctggtgaacgacaccaacgtgcagttcctggaccaggacgacgacgacgaccccgacaccgagctgtacctgacccagcccttcgcctgcggcaccgccttcgccgtgagcgtgctggacagcctgatgagcgccacctacttcaacgacaacatcctgaccctgatcagaaccctggtgaccggcggcgccacccccgagctggaggccctgatcgccgaggagaacgccctgagaggcggctacagcaccccccagaccctggccaacagagacagatgcagagtggcccagctggccctgctggacggccccttcgccgacctgggcgacggcggctgctacggcgacctgttctgcaaggccctgaagacctacaacatgctgtgcttcggcatctacagactgagagacgcccacctgagcacccccagccagtgcaccaagagatacgtgatcaccaaccccccctacgagttcgagctggtgcccaccgacctgatcttctgcctgatgcagttcgaccacaacgccggccagagcagagccagcctgagccacagcagccacagcagccagagcagcagcaagaagagcagcagcgtgcacagcatccccagcaccgccaacagacagaacagacccaagagcagagagagcagagacaagcagaagtacgtgcaggaggagagactgtag

SEQ ID NO: 335647 - DNA, 2661 bp, Artificial Sequence
  derived and/or modified sequence
tgaaacagcggcgacccctgggagaacttccagaacaaccaggccctgacctactgggagtgcgtgtacctgctgatggtgaccatgagcaccgtgggctacggcgacgtgtacgccaagaccaccctgggcagactgttcatggtgttcttcatcctgggcggcctggccatgttcgccagctacgtgcccgagatcatcgagctgatcggcaacagaaagaagtacggcggcagctacagcgccgtgagcggcagaaagcacatcgtggtgtgcggccacatcaccctggagagcgtgagcaacttcctgaaggacttcctgcacaaggacagagacgacgtgaacgtggagatcgtgttcctgcacaacatcagccccaacctggagctggaggccctgttcaagagacacttcacccaggtggagttctaccagggcagcgtgctgaacccccacgacctggccagagtgaagatcgagagcgccgacgcctgcctgatcctggccaacaagtactgcgccgaccccgacgccgaggacgccagcaacatcatgagagtgatcagcatcaagaactaccaccccaagatcagaatcatcacccagatgctgcagtaccacaacaaggcccacctgctgaacatccccagctggaactggaaggagggcgacgacgccatctgcctggccgagctgaagctgggcttcatcgcccagagctgcctggcccagggcctgagcaccatgctggccaacctgttcagcatgagaagcttcatcaagatcgaggaggacacctggcagaagtactacctggagggcgtgagcaacgagatgtacaccgagtacctgagcagcgccttcgtgggcctgagcttccccaccgtgtgcgagctgtgcttcgtgaagctgaagctgctgatgatcgccatcgagtacaagagcgccaacagagagagcagaatcctgatcaaccccggcaaccacctgaagatccaggagggcaccctgggcttcttcatcgccagcgacgccaaggaggtgaagagagccttcttctactgcaaggcctgccacgacgacatcaccgaccccaagagaatcaagaagtgcggctgcaagagactgaaggtggccgccagaagcagatacagcaaggaccccttcgagttcaagaaggagacccccaacagcagactggtgaccgagcccgtggaggacgagcagcccagcaccctgagccccaagaagaagcagagaaacggcggcatgagaaacagccccaacaccagccccaagctgatgagacacgaccccctgctgatccccggcaacgaccagatcgacaacatggacagcaacgtgaagaagtacgacagcaccggcatgttccactggtgcgcccccaaggagatcgagaaggtgatcctgaccagaagcgaggccgccatgaccgtgctgagcggccacgtggtggtgtgcatcttcggcgacgtgagcagcgccctgatcggcctgagaaacctggtgatgcccctgagagccagcaacttccactaccacgagctgaagcacatcgtgttcgtgggcagcatcgagtacctgaagagagagtgggagaccctgcacaacttccccaaggtgagcatcctgcccggcacccccctgagcagagccgacctgagagccgtgaacatcaacctgtgcgacatgtgcgtgatcctgagcgccaaccagaacaacatcgacgacaccagcctgcaggacaaggagtgcatcctggccagcctgaacatcaagagcatgcagttcgacgacagcatcggcgtgctgcaggccaacagccagggcttcaccccccccggcatggacagaagcagccccgacaacagccccgtgcacggcatgctgagacagcccagcatcaccaccggcgtgaacatccccatcatcaccgagctggtgaacgacaccaacgtgcagttcctggaccaggacgacgacgacgaccccgacaccgagctgtacctgacccagcccttcgcctgcggcaccgccttcgccgtgagcgtgctggacagcctgatgagcgccacctacttcaacgacaacatcctgaccctgatcagaaccctggtgaccggcggcgccacccccgagctggaggccctgatcgccgaggagaacgccctgagaggcggctacagcaccccccagaccctggccaacagagacagatgcagagtggcccagctggccctgctggacggccccttcgccgacctgggcgacggcggctgctacggcgacctgttctgcaaggccctgaagacctacaacatgctgtgcttcggcatctacagactgagagacgcccacctgagcacccccagccagtgcaccaagagatacgtgatcaccaaccccccctacgagttcgagctggtgcccaccgacctgatcttctgcctgatgcagttcgaccacaacgccggccagagcagagccagcctgagccacagcagccacagcagccagagcagcagcaagaagagcagcagcgtgcacagcatccccagcaccgccaacagacagaacagacccaagagcagagagagcagagacaagcagaagtacgtgcaggaggagagactgtag

SEQ ID NO: 335648 - protein, 1239 aa, Artificial Sequence
  derived and/or modified sequence
MANGGGGGGGSSGGGGGGGGSSLRMSSNIHANHLSLDASSSSSSSSSSSSSSSSSSSSSSVHEPKMDALIIPVTMEVPCDSRGQRMWWAFLASSMVTFFGGLFIILLWRTLKYLWTVCCHCGGKTKEAQKINNGSSQADGTLKPVDEKEEAVAAEVGWMTSVKDWAGVMISAQTLTGRVLVVLVFALSIGALVIYFIDSSNPIESCQNFYKDFTLQIDMAFNVFFLLYFGLRFIAANDKLWFWLEVNSVVDFFTVPPVFVSVYLNRSWLGLRFLRALRLIQFSEILQFLNILKTSNSIKLVNLLSIFISTWLTAAGFIHLVENSGDPWENFQNNQALTYWECVYLLMVTMSTVGYGDVYAKTTLGRLFMVFFILGGLAMFASYVPEIIELIGNRKKYGGSYSAVSGRKHIVVCGHITLESVSNFLKDFLHKDRDDVNVEIVFLHNISPNLELEALFKRHFTQVEFYQGSVLNPHDLARVKIESADACLILANKYCADPDAEDASNIMRVISIKNYHPKIRIITQMLQYHNKAHLLNIPSWNWKEGDDAICLAELKLGFIAQSCLAQGLSTMLANLFSMRSFIKIEEDTWQKYYLEGVSNEMYTEYLSSAFVGLSFPTVCELCFVKLKLLMIAIEYKSANRESRILINPGNHLKIQEGTLGFFIASDAKEVKRAFFYCKACHDDITDPKRIKKCGCKRRWEEHCSLWRLESKGNVRRLNYCRGQQTFSVKVKVAARSRYSKDPFEFKKETPNSRLVTEPVEDEQPSTLSPKKKQRNGGMRNSPNTSPKLMRHDPLLIPGNDQIDNMDSNVKKYDSTGMFHWCAPKEIEKVILTRSEAAMTVLSGHVVVCIFGDVSSALIGLRNLVMPLRASNFHYHELKHIVFVGSIEYLKREWETLHNFPKVSILPGTPLSRADLRAVNINLCDMCVILSANQNNIDDTSLQDKECILASLNIKSMQFDDSIGVLQANSQGFTPPGMDRSSPDNSPVHGMLRQPSITTGVNIPIITELVNDTNVQFLDQDDDDDPDTELYLTQPFACGTAFAVSVLDSLMSATYFNDNILTLIRTLVTGGATPELEALIAEENALRGGYSTPQTLANRDRCRVAQLALLDGPFADLGDGGCYGDLFCKALKTYNMLCFGIYRLRDAHLSTPSQCTKRYVITNPPYEFELVPTDLIFCLMQFDHNAGQSRASLSHSSHSSQSSSKKSSSVHSIPSTANRQNRPKSRESRDKQKYVQEERL

SEQ ID NO: 335649 - DNA, 3720 bp, Artificial Sequence
  derived and/or modified sequence
atggcaaacggtggtggaggtggggggggcagttcaggcggtggcgggggcggaggcgggagttcactgcgcatgtcctcaaacattcacgcgaaccatctgagtctcgacgcaagcagctcctctagcagttcctcaagcagcagcagctcctcgagctcgagttcctccagttcttcggttcacgagccgaaaatggacgcactgataattcctgttacaatggaggtgccctgcgactcaagaggacagaggatgtggtgggcttttctagcctcatccatggtgacattctttggtgggctgtttataatcctgctgtggcgtactctgaaatacctctggaccgtctgttgtcactgtgggggcaaaacaaaagaggcacagaagataaacaacgggagttcccaggcggacggcacactcaagccagttgacgagaaggaagaagcggtggccgccgaagttggctggatgactagtgtcaaagactgggcgggcgtgatgatctcagctcagacgctaactggccgggtgctagttgtgcttgtctttgccctctcaatcggagcactggtgatttactttattgattctagcaacccgatcgaaagctgtcagaacttctataaggattttacacttcagatcgacatggccttcaacgtgttcttcctactgtattttggcctccgtttcattgctgctaatgacaagctctggttctggctggaggtcaactccgtcgtagatttctttaccgttcctccagtgtttgtctcagtatatctgaaccgctcctggcttggccttcgctttctacgcgccttgcggctgatccagttctctgagatactccagtttcttaatatcttgaagacttcgaatagtatcaagttggtcaatctcctttctatctttatttcaacttggctgacagcagcaggtttcattcaccttgtcgaaaacagtggagatccttgggagaactttcagaataatcaagccctgacgtattgggaatgcgtttacctgctgatggtcacaatgagtacggtgggctatggcgatgtgtacgccaagacgacactgggccgcctcttcatggtgttttttattctgggcggactggcaatgtttgcctcctacgttcccgagataatcgaactcatcggtaatcgtaaaaaatacgggggcagttactccgcggtgtctggacgaaagcatattgttgtgtgcggccacatcacattagagagcgtcagcaattttctgaaagatttcctgcacaaggacagagatgatgtcaacgtggaaatcgtgttcctgcataacatttctcccaacctggagcttgaagccttgtttaaacgccacttcactcaggttgagttttatcaaggatcggtcttaaatccccatgacctcgcaagggttaaaattgaatctgcagatgcatgcctgattctcgcgaacaagtattgcgccgatcctgatgccgaggacgccagcaacatcatgcgcgtgattagcattaagaattaccaccccaagatccggatcatcacacagatgctgcagtatcacaacaaggcccatctcctgaacatccctagttggaactggaaagaaggggacgacgccatctgcctcgcggagcttaagctaggcttcatcgctcagtcctgtctcgcccagggcctgagcacaatgttggcaaacttgttcagcatgcggtccttcatcaagatagaggaggatacatggcaaaagtattacttggagggagtgtctaacgaaatgtacacggagtacctgtcctctgcttttgtgggccttagctttcctaccgtgtgcgagttgtgttttgtgaagctaaaattactcatgatagctattgaatacaaatccgccaatagggagtctcggatcttaatcaatccagggaaccacctgaagatccaggagggaaccctgggcttttttattgcatctgatgctaaggaggtgaagcgagccttcttttactgcaaggcctgtcatgacgacattaccgatcccaaaagaatcaagaaatgcggatgcaagcgcagatgggaggagcattgttccctgtggagactcgaaagtaagggcaacgtgcgaagactgaattactgccggggccagcagactttctcagtgaaggtgaaggtggcagcacgcagcaggtacagtaaggacccattcgagttcaagaaggagactccaaacagtcgccttgtcactgagcctgtggaggatgagcagccaagcaccctgagccctaaaaaaaaacagcgcaatggaggtatgcgtaactccccaaatacatccccaaagctcatgcggcatgacccactcctcatccccggcaacgaccagattgataacatggacagtaatgtcaaaaaatatgacagcacagggatgttccattggtgcgccccaaaggagatagagaaagtgatcctgacaagatctgaggccgctatgaccgtcctgtcaggccatgtggtggtctgcatctttggagacgtcagtagcgctctgatcggccttcggaatctggttatgccacttagagctagcaactttcactatcacgagctgaaacatattgtgttcgtgggttctattgaatatctgaagagggagtgggagactctgcacaactttcccaaagtgtccattctacccgggacaccacttagcagggctgatctcagagctgttaacattaacctgtgcgatatgtgcgttattctgtccgcgaatcagaacaacattgatgacacctcccttcaggataaagaatgtattctggcctccttgaacatcaaaagcatgcaattcgacgactctataggggtgctgcaggccaacagtcagggttttaccccgccaggtatggatcgctcatcccctgataattctccagtgcacgggatgctgcgtcagccatctatcaccacaggcgtgaacattccaatcatcacagagcttgtgaatgacactaatgtccaatttctggaccaggacgacgacgatgaccccgacacggaactgtacctgactcagccatttgcctgcgggacggccttcgcagtcagtgttttggatagcctgatgagtgcgacctatttcaacgataacatcctgactctgataagaacactggtgacgggtggggccaccccagaacttgaagcccttatagccgaggaaaacgccctcaggggcgggtatagcacgccacaaacgctggccaacagagatcgttgccgggtggcgcaactggctctgcttgatggaccattcgctgacttgggcgacggaggatgttacggggatcttttttgtaaggcattaaaaacatataacatgttgtgttttggcatctaccgtctccgggacgctcacctgtctacaccgagccagtgcacaaagcggtacgtgatcacaaaccccccttacgagttcgagttggttcctacagatctcattttttgcctgatgcaatttgaccacaatgctgggcagtcccgagcctcactctctcactcctctcactcctcgcagtcctctagtaaaaagtctagcagcgtccactcaattccatcaaccgcgaaccggcaaaacagaccaaaatcgcgcgagagtagagataagcaaaagtatgtgcaggaagaacgactttag

SEQ ID NO: 335650 - DNA, 3720 bp, Artificial Sequence
  derived and/or modified sequence
atggccaatggaggcggcggcggcggcggcagcagcggcggcggcggcggcggcggcggcagcagcctgaggatgagcagcaacatccacgccaaccacctgagcctggatgccagcagcagcagcagcagcagcagcagcagcagcagcagcagcagcagcagcagcagcagcagctctgtgcatgagcccaagatggatgccctgatcatccctgtgaccatggaggtgccctgtgacagccggggccagaggatgtggtgggccttcctggccagctccatggtgaccttctttggaggcctcttcatcatcctgctgtggaggaccctgaagtacctgtggacagtgtgctgccactgcggcggcaagaccaaggaggcccagaagatcaacaacggcagcagccaggctgatggcaccctgaagcctgtggatgagaaggaggaggccgtggccgctgaggtgggctggatgacctctgtgaaggactgggccggcgtgatgatcagcgcccagaccctgaccggccgggtgctggtggtgctggtgtttgccctgagcattggagccctggtgatctacttcatcgacagcagcaaccccatcgagagctgccagaacttctacaaggacttcaccctgcagattgacatggccttcaacgtgttcttcctgctgtacttcggcctgcgcttcatcgccgccaatgacaagctgtggttctggctggaggtgaacagcgtggtggacttcttcaccgtgccccctgtgtttgtgtctgtgtacctgaacagatcctggctgggcctgcgcttcctgcgggccctgcggctcatccagttcagcgagatcctgcagttcctgaacatcctgaagaccagcaacagcatcaagctggtgaacctgctgagcatcttcatcagcacctggctgacagctgctggcttcatccacctggtggagaacagcggggacccctgggagaacttccagaacaaccaggccctgacctactgggagtgtgtgtacctgctgatggtgaccatgagcacagtgggctatggagatgtgtatgccaagaccaccctgggccgcctcttcatggtgttcttcatcctgggcggcctggccatgtttgccagctatgtgcctgagatcatcgagctgattggcaacaggaagaagtatggaggcagctacagcgctgtgtctggcaggaagcacatcgtggtgtgtggccacatcaccctggagagcgtgagcaacttcctgaaggacttcctgcacaaggacagagatgatgtgaatgtggagatcgtgttcctgcacaacatcagccccaacctggagctggaggccctcttcaagaggcacttcacccaggtggagttctaccagggctctgtgctgaacccccatgacctggcccgggtgaagattgaatctgcagatgcctgcctgatcctggccaacaagtactgtgccgaccctgatgctgaagatgccagcaacatcatgagggtcatcagcatcaagaactaccaccccaagatccgcatcatcacccagatgctgcagtaccacaacaaggcccacctgctgaacatccccagctggaactggaaggagggagatgatgccatctgcctggccgagctgaagctgggcttcatcgcccagagctgcctggcccagggcctgagcaccatgctggccaacctcttctccatgaggagcttcatcaagattgaggaggacacctggcagaagtactacctggagggcgtgtccaatgagatgtacacagagtacctgagcagcgcctttgtgggcctgtccttccccaccgtgtgtgagctgtgctttgtgaagctgaagctgctgatgattgccatcgagtacaagagcgccaaccgggagagccgcatcctgatcaaccctggcaaccacctgaagatccaggagggcaccctgggcttcttcatcgccagtgatgccaaggaggtgaagagggccttcttctactgcaaggcctgccatgatgacatcacagaccccaagaggatcaagaagtgtggctgcaagaggcgctgggaggagcactgcagcctgtggaggctggagagcaaaggaaatgtgcggcggctgaactactgccggggccagcagaccttctctgtgaaggtgaaggtggccgcccggagccgctacagcaaggacccctttgagttcaagaaggagacccccaacagccggctggtgacagagcctgtggaggatgagcagcccagcaccctgagccccaagaagaagcagagaaatggaggcatgaggaacagccccaacaccagccccaagctgatgagacatgaccccctgctgatccctggaaatgaccagattgacaacatggacagcaatgtgaagaagtatgacagcacaggcatgttccactggtgtgcccccaaggagattgagaaggtgatcctgaccaggtctgaggccgccatgacagtgctgagcggccacgtggtggtgtgcatctttggagatgtgtcctctgccctgattggcctgaggaacctggtgatgcccctgcgggccagcaacttccactaccacgagctgaagcacatcgtgtttgtgggcagcattgagtacctgaagcgggagtgggagaccctgcacaacttccccaaggtgtccatcctgcccggcacccccctgagcagagctgacctgcgggctgtgaacatcaacctgtgtgacatgtgtgtgatcctgagcgccaaccagaacaacattgatgacaccagcctgcaggacaaggagtgcatcctggccagcctgaacatcaagtccatgcagtttgatgacagcattggagtgctgcaggccaacagccagggcttcaccccacctggcatggacaggagcagcccagacaacagccctgtgcacggcatgctgcggcagcccagcatcaccaccggggtgaacatccccatcatcacagagctggtgaatgacaccaacgtgcagttcctggaccaggatgatgatgatgatcctgacacagagctgtacctgacccagccctttgcctgtggcacagcctttgctgtgtctgtgctggacagcctgatgtctgccacctacttcaatgacaacatcctgaccctcatccgcaccctggtgactggaggagccaccccagagctggaggccctgattgctgaggagaatgccctgcggggcggctacagcaccccccagaccctggccaacagagaccgctgccgggtggcccagctggccctgctggatggcccctttgctgacctgggagatggcggctgctacggggacctcttctgcaaggccctgaagacctacaacatgctgtgcttcggcatctaccgcctgagagatgcccacctgagcacccccagccagtgcaccaagcgctacgtgatcaccaaccccccctatgaatttgagctggtgcccacagacctgatcttctgcctgatgcagtttgaccacaatgccggccagagccgggccagcctgagccacagcagccacagcagccagagcagcagcaagaagagcagctctgtgcacagcatccccagcacagccaaccggcagaaccggcccaagagccgggagagccgggacaagcagaagtatgtgcaggaggagcggctgtag

SEQ ID NO: 335651 - DNA, 3720 bp, Artificial Sequence
  derived and/or modified sequence
atggccaacggcggcggcggcggcggcggcagcagcggcggcggcggaggtggtggaggttcctctctcaggatgtctagcaacatacacgccaatcatttgagcctggacgcgtcctcttcttctagctcatctagcagttctagtagcagctccagctcctccagctcttcctcctccgtccatgagccaaaaatggatgctttgatcattccagtaaccatggaggtcccctgtgacagtaggggacagcggatgtggtgggccttcctcgcctctagcatggtcaccttctttggaggtttatttattattttgttgtggcggacattgaagtacctgtggacagtttgctgccactgtggtggtaagaccaaggaggcccaaaaaataaacaatgggagctcacaggccgatggcaccctgaaacccgttgatgagaaagaggaggctgtggccgcggaggtgggttggatgaccagcgtgaaagactgggctggcgttatgatctccgcccagactctgaccggaagggttctggtcgtgcttgtttttgccctgagtatcggcgctctggtcatctatttcatagatagcagcaatcctatcgaatcttgtcaaaacttttacaaggatttcacactgcagatagacatggcctttaacgtgttttttcttctgtatttcggactgcgcttcatagccgccaacgataaattatggttctggctggaggttaacagcgtggtcgatttcttcaccgtcccgccagtatttgtttcagtgtatttgaacaggagctggctgggtctacgcttccttagggcactgagacttatccagtttagcgaaatcctgcaattcttgaatatcctaaagacttcgaacagcataaaactggttaatcttcttagtatctttatctccacctggctcactgcagctggtttcattcacttggtagagaactccggcgatccctgggaaaactttcaaaacaatcaggccttgacctactgggagtgtgtttacctcctcatggtgacaatgtctacggtgggttacggagacgtctatgccaaaaccactctggggagacttttcatggtcttcttcattctggggggcctggccatgtttgccagctatgtccctgaaatcatagagttgatcggaaacaggaaaaaatacggtgggtcatactctgcagtttctggaagaaagcatattgtcgtttgcgggcacattacgctggaatccgtcagcaattttctcaaagattttctgcacaaagacagggacgacgtgaacgttgaaatcgttttcctgcataacattagtccgaatctggagctcgaagcactctttaagaggcacttcacgcaggtagagttctaccagggaagcgtcttgaatccacacgacctcgccagggttaaaattgaaagcgctgatgcctgtctaatcctggcaaacaaatactgcgctgatcccgacgcagaggatgcgagtaacattatgcgcgtgatctcaatcaagaactatcatcccaagatcagaatcattactcaaatgttgcaatatcataataaagcgcacctgctcaacatcccgtcatggaactggaaggagggggacgacgccatctgtctggcggagttgaagctgggttttatcgctcagtcatgtcttgcccaggggttgagtacgatgttggccaatctcttttctatgcgttcatttatcaaaatcgaggaggacacctggcagaagtactacctggaaggggtgtccaatgaaatgtatacagaatatctgtcctccgcgtttgtgggcctgtccttcccaaccgtgtgcgagctctgctttgtcaagctaaaactgctgatgatcgccatcgagtacaagagtgccaaccgcgaaagtcggatcctgattaatcccgggaatcacctgaagatccaagagggcactctgggatttttcatcgcatcagacgcaaaggaggtgaagcgagcttttttttactgcaaagcatgccacgacgatattaccgaccccaagcgcataaagaagtgcgggtgcaaacgacgctgggaagaacattgcagcctgtggcgcctcgagtcaaaggggaacgtgagacggcttaactattgtagaggccaacagaccttctctgtaaaagtcaaggtagccgcccgatcaaggtactcaaaagatcccttcgagttcaaaaaggagacccccaacagtagactggtcacggaacccgtggaagatgagcaaccatccactctgtcccccaagaaaaagcagaggaacgggggtatgcgcaatagtcctaataccagcccaaaacttatgagacatgatccacttctgattcctggcaatgaccagattgacaacatggacagcaacgtcaagaaatatgattcgacgggaatgtttcactggtgcgcccctaaagaaattgagaaggtgattctgacccggagtgaggccgccatgactgtgctatcgggccacgttgtcgtgtgtatcttcggagacgtgtcgtctgcacttatcggtctcaggaacctcgtgatgccattgagagctagcaacttccattatcatgaactcaagcacattgtgtttgtgggcagcattgagtacttgaagagagaatgggagacgctgcataattttccaaaggtttccatcctgccagggacgcctcttagccgtgctgatttacgcgcagtcaatataaacctgtgcgatatgtgcgtgatcctcagtgctaatcaaaataacatagatgataccagcctccaggataaggaatgtattttggcttcactgaacatcaagtctatgcagttcgatgacagtattggagtactacaggctaactcacaaggcttcacgcctcctggaatggatcgctcgagccccgataacagccccgtgcacggaatgctgagacagccaagtattaccacaggcgtcaatattccaattatcacagagttggttaatgacaccaacgtgcagtttctggaccaggacgacgatgacgacccggacacagaactgtatctgacgcagcccttcgcttgtgggacggccttcgccgtcagtgtgcttgacagcttaatgtccgccacgtattttaatgataatatcttgactctcatcaggaccctggtcacaggaggagcaacaccagaactcgaggccctgatcgctgaggagaatgctttgagggggggctactccacccctcaaaccctcgctaatagggacaggtgcagggtcgcccagctcgccctattagacggaccattcgctgatctgggagatggaggctgctacggggatctgttctgcaaagccttaaaaacatataacatgttgtgtttcgggatctacaggctgcgggacgcccatctcagtactccatcacagtgcactaagcgctacgtcattacgaatccaccatacgagtttgagctggtgcctacagatttgatcttttgtctgatgcaatttgatcacaacgccggccagagcagagcctccctgagccactcctcccacagctcacagagctccagcaaaaagagcagctccgtgcactccattccctccaccgccaatcggcagaacaggccaaagagtagggagtcccgggacaagcagaagtatgtccaagaggagaggctctag

SEQ ID NO: 335652 - DNA, 3720 bp, Artificial Sequence
  derived and/or modified sequence
atggcaaatggtggcggcggcggcggcggcagcagcggcggcggcggcggcggcggaggcagcagtcttagaatgagtagcaatatccacgcgaaccatctcagcctagacgcgtcctcctcctcctcctcctcctcttcctcttcttcttcttcctcctcctcttcctcctcgtcctcggtccacgagcccaagatggatgcgctcatcatcccggtgaccatggaggtgccgtgcgacagccggggccaacgcatgtggtgggctttcctggcctcctccatggtgactttcttcgggggcctcttcatcatcttgctctggcggacgctcaagtacctgtggaccgtgtgctgccactgcgggggcaagacgaaggaggcccagaagattaacaatggctcaagccaggcggatggcactctcaaaccagtggatgaaaaagaggaggcagtggccgccgaggtcggctggatgacctccgtgaaggactgggcgggggtgatgatatccgcccagacactgactggcagagtcctggttgtcttagtctttgctctcagcatcggtgcacttgtaatatacttcatagattcatcaaacccaatagaatcctgccagaatttctacaaagatttcacattacagatcgacatggctttcaacgtgttcttccttctctacttcggcttgcggtttattgcagccaacgataaattgtggttctggctggaagtgaactctgtagtggatttcttcacggtgccccccgtgtttgtgtctgtgtacttaaacagaagttggcttggtttgagatttttaagagctctgagactgatacagttttcagaaattttgcagtttctgaatattcttaaaacaagtaattccatcaagctggtgaatctgctctccatatttatcagcacgtggctgactgcagccgggttcatccatttggtggagaattcaggggacccatgggaaaatttccaaaacaaccaggctctcacctactgggaatgtgtctatttactcatggtcacaatgtccaccgttggttatggggatgtttatgcaaaaaccacacttgggcgcctcttcatggtcttcttcatcctcgggggactggccatgtttgccagctacgtccctgaaatcatagagttaataggaaaccgcaagaaatacgggggctcctatagtgcggttagtggaagaaagcacattgtggtctgcggacacatcactctggagagtgtttccaacttcctgaaggactttctgcacaaggaccgggatgacgtcaatgtggagatcgtttttcttcacaacatctcccccaacctggagcttgaagctctgttcaaacgacattttactcaggtggaattttatcagggttccgtcctcaatccacatgatcttgcaagagtcaagatagagtcagcagatgcatgcctgatccttgccaacaagtactgcgctgacccggatgcggaggatgcctcgaatatcatgagagtaatctccataaagaactaccatccgaagataagaatcatcactcaaatgctgcagtatcacaacaaggcccatctgctaaacatcccgagctggaattggaaagaaggtgatgacgcaatctgcctcgcagagttgaagttgggcttcatagcccagagctgcctggctcaaggcctctccaccatgcttgccaacctcttctccatgaggtcattcataaagattgaggaagacacatggcagaaatactacttggaaggagtctcaaatgaaatgtacacagaatatctctccagtgccttcgtgggtctgtccttccctactgtttgtgagctgtgttttgtgaagctcaagctcctaatgatagccattgagtacaagtctgccaaccgagagagccgtatattaattaatcctggaaaccatcttaagatccaagaaggtactttaggatttttcatcgcaagtgatgccaaagaagttaaaagggcatttttttactgcaaggcctgtcatgatgacatcacagatcccaaaagaataaaaaaatgtggctgcaaacggcgttgggaagaacattgttctttgtggagactggaaagcaagggaaatgtgagaagattaaactactgcaggggtcagcaaactttctctgtcaaagtcaaggttgcagctagatcacgctattccaaagatccatttgagttcaagaaggagactcccaattctcggcttgtgaccgagccagttgaagatgagcagccgtcaacactatcaccaaaaaaaaagcaacggaatggaggcatgcggaactcacccaacacctcgcctaagctgatgaggcatgaccccttgttaattcctggcaatgatcagattgacaacatggactccaatgtgaagaagtacgactctactgggatgtttcactggtgtgcacccaaggagatagagaaagtcatcctgactcgaagtgaagctgccatgaccgtcctgagtggccatgtcgtggtctgcatctttggcgacgtcagctcagccctgatcggcctccggaacctggtgatgccgctccgtgccagcaactttcattaccatgagctcaagcacattgtgtttgtgggctctattgagtacctcaagcgggaatgggagacgcttcataacttccccaaagtgtccatattgcctggtacgccattaagtcgggctgatttaagggctgtcaacatcaacctctgtgacatgtgcgttatcctgtcagccaatcagaataatattgatgatacttcgctgcaggacaaggaatgcatcttggcgtcactcaacatcaaatctatgcagtttgatgacagcatcggagtcttgcaggctaattcccaagggttcacacctccaggaatggatagatcctctccagataacagcccagtgcacgggatgttacgtcaaccatccatcacaactggggtcaacatccccatcatcactgaactagtgaacgatactaatgttcagtttttggaccaagacgatgatgatgaccctgatacagaactgtacctcacgcagccctttgcctgtgggacagcatttgccgtcagtgtcctggactcactcatgagcgcgacgtacttcaatgacaatatcctcaccctgatacggaccctggtgaccggaggagccacgccggagctggaggctctgattgctgaggaaaacgcccttagaggtggctacagcaccccgcagacactggccaatagggaccgctgccgcgtggcccagttagctctgctcgatgggccatttgcggacttaggggatggtggttgttatggtgatctgttctgcaaagctctgaaaacatataatatgctttgttttggaatttaccggctgagagatgctcacctcagcacccccagtcagtgcacaaagaggtatgtcatcaccaacccgccctatgagtttgagctcgtgccgacggacctgatcttctgcttaatgcagtttgaccacaatgccggccagtcccgggccagcctgtcccattcctcccactcgtcgcagtcctccagcaagaagagctcctctgttcactccatcccatccacagcaaaccgacagaaccggcccaagtccagggagtcccgggacaaacagaagtacgtgcaggaagagcggctttga

SEQ ID NO: 335653 - DNA, 3720 bp, Artificial Sequence
  derived and/or modified sequence
atggccaacggaggcggagggggtgggggttcctctgggggtggaggcggaggagggggttcatctctgcggatgtcctcgaacatccacgccaatcacctctctctggacgcttcatcctccagctcgtcttccagtagttcctccagcagcagttcaagtagcagctcctcctcaagcgtccacgaaccaaaaatggacgcgcttatcataccagttacaatggaggtgccgtgtgacagtcgtggacagcgaatgtggtgggcgtttctagctagctcgatggttacttttttcgggggtctcttcattattctactctggaggacactgaagtatttatggaccgtgtgctgccactgcggcggaaaaactaaggaggcacagaagattaataacggcagcagccaggccgatggtacgcttaagcccgtggacgaaaaggaggaagcggttgccgcagaggtgggatggatgacttctgtgaaggactgggcaggcgtgatgatcagcgcccaaacactcaccggcagagtactagtggtactggtattcgctctgtccataggcgcactcgtgatttatttcatcgacagttcaaaccccatcgaaagttgccagaatttttataaagacttcactctgcagatcgacatggcctttaatgtcttttttctcctttactttggcttaagattcatcgccgctaacgacaaactctggttctggcttgaggtgaactcagtcgtggacttcttcacggtgcctcctgtcttcgtgagtgtgtatctcaataggagctggcttggcctcagattcctgagggctctgaggctaatccagttctcagagatccttcaattcctgaatatcttgaaaacctctaatagcataaagctcgtcaacttgctgagcatttttatctccacctggcttacggcagcaggcttcattcacttggtcgagaattctggtgacccctgggagaacttccaaaacaatcaggccctaacttattgggagtgcgtataccttctgatggtcactatgagcaccgtcggctatggcgacgtatatgccaaaacgactctgggccgactattcatggtcttcttcattttgggcggacttgcaatgttcgcatcctacgttcctgagattatagagctgatcggcaaccgcaaaaagtatggaggatcatacagcgccgtgagtggaaggaaacatattgtggtgtgtggacatattacactcgaaagtgtgtccaacttcctgaaggacttcttgcacaaggatcgcgatgatgtgaatgtggaaatcgtctttctgcacaacatctcgccgaatttagaactcgaggctctcttcaaacgccatttcactcaagtggaattttatcagggatctgtgctcaacccgcatgatttggctcgcgtaaagatcgagagcgctgacgcatgtctgatcctagcgaacaaatattgcgccgacccggatgccgaagatgcctcaaacataatgcgtgttatatcaatcaaaaactaccatccaaagatccgcattataacacagatgttgcagtaccacaacaaggctcaccttctaaacatcccttcatggaactggaaagagggcgatgatgcaatttgtttggcagagctcaagttaggatttattgcacaatcgtgtctggcgcaaggactgtcaaccatgcttgccaatctcttttcaatgcggtcctttatcaagatagaggaggacacatggcaaaaatactacttagaaggagtgagcaatgagatgtataccgaatacctctcttccgctttcgtcggattaagcttccctacggtttgcgagctgtgcttcgtaaagctgaaactactgatgatcgccattgaatacaaaagcgccaatcgggagagtaggatcctgatcaatcctggaaaccacctgaagatacaggaaggcacccttgggttctttattgccagtgatgccaaggaagtcaagagggcttttttctattgtaaagcctgccatgatgatattacagacccgaaacgtatcaagaagtgcggatgcaagagacggtgggaagagcactgctctctctggcgtctggaaagcaagggcaatgtgcgcaggctgaactattgccgtggccagcaaaccttcagcgtcaaagttaaggttgcagctagaagcaggtatagcaaggatccctttgagttcaagaaagaaacacccaatagccgccttgtgaccgagcccgtcgaggacgaacagccctctactctcagtccaaagaagaagcagcggaatgggggtatgagaaattccccgaatacctcacccaagctgatgaggcacgacccacttctgattcccggtaacgatcagatcgacaacatggattccaatgtgaaaaagtacgacagcactggcatgtttcattggtgtgcaccaaaggaaattgagaaggtgatcttgacccggtccgaggccgcaatgacagtgctctccggtcacgtggtggtttgcatatttggggacgtaagctctgccctgatcggccttaggaacttggtcatgcctctcagggccagtaatttccactaccacgaattaaagcacatagtattcgttggcagcattgaatacctcaaaagagaatgggagaccttgcacaattttcctaaggtcagtattctccccggaactcctctcagccgcgcagatctgagagcggttaacattaacctttgcgacatgtgcgtgattctctcggctaatcagaacaatatcgacgacacatcgttgcaggacaaagaatgcattctcgccagcttaaatatcaagtcgatgcagttcgacgactccataggagtgctccaggccaattcccaaggattcacaccaccaggtatggacaggagttccccagacaactccccagtgcacggaatgttgcgccagccctcgattaccacaggggtgaacataccaatcatcacggagctggtcaacgacaccaatgtgcaatttctagatcaggatgatgatgacgacccagacaccgagctctatctgacccagccgttcgcctgtggaactgcttttgcggtgagcgtgcttgactctctcatgtctgccacgtattttaatgacaatattctcactctcattcgtactcttgtgactggcggagcgacacccgaactggaagcccttattgccgaagaaaacgctctgcgcggtggatattctaccccacagactctggcaaatcgcgatcgttgtagggtcgctcaacttgccctgctggatgggcctttcgccgacctgggagacggaggatgttatggggacctgttctgtaaggcccttaagacttataatatgctgtgctttggcatctatcgcctgcgggatgctcacttgagtactccaagccagtgtacgaaaagatatgtgatcacgaacccaccatacgagtttgaattggtccccaccgatcttattttttgtctgatgcagttcgaccacaatgcaggacagtccagggcttccctgagccattcctcccattcctctcagtcttcttcaaaaaaaagcagctccgtgcactcgatcccctcaaccgccaacaggcagaacaggccaaagagcagggagagccgcgataaacagaagtacgtccaggaggaacgactgtag

SEQ ID NO: 335654 - DNA, 3720 bp, Artificial Sequence
  derived and/or modified sequence
atggccaacggcggcggcggcggcggcggcagcagcggcggcggcggcggcggcggcggcagcagcctgagaatgagcagcaacatccacgccaaccacctgagcctggacgccagcagcagcagcagcagcagcagcagcagcagcagcagcagcagcagcagcagcagcagcagcagcgtgcacgagcccaagatggacgccctgatcatccccgtgaccatggaggtgccctgcgacagcagaggccagagaatgtggtgggccttcctggccagcagcatggtgaccttcttcggcggcctgttcatcatcctgctgtggagaaccctgaagtacctgtggaccgtgtgctgccactgcggcggcaagaccaaggaggcccagaagatcaacaacggcagcagccaggccgacggcaccctgaagcccgtggacgagaaggaggaggccgtggccgccgaggtgggctggatgaccagcgtgaaggactgggccggcgtgatgatcagcgcccagaccctgaccggcagagtgctggtggtgctggtgttcgccctgagcatcggcgccctggtgatctacttcatcgacagcagcaaccccatcgagagctgccagaacttctacaaggacttcaccctgcagatcgacatggccttcaacgtgttcttcctgctgtacttcggcctgagattcatcgccgccaacgacaagctgtggttctggctggaggtgaacagcgtggtggacttcttcaccgtgccccccgtgttcgtgagcgtgtacctgaacagaagctggctgggcctgagattcctgagagccctgagactgatccagttcagcgagatcctgcagttcctgaacatcctgaagaccagcaacagcatcaagctggtgaacctgctgagcatcttcatcagcacctggctgaccgccgccggcttcatccacctggtggagaacagcggcgacccctgggagaacttccagaacaaccaggccctgacctactgggagtgcgtgtacctgctgatggtgaccatgagcaccgtgggctacggcgacgtgtacgccaagaccaccctgggcagactgttcatggtgttcttcatcctgggcggcctggccatgttcgccagctacgtgcccgagatcatcgagctgatcggcaacagaaagaagtacggcggcagctacagcgccgtgagcggcagaaagcacatcgtggtgtgcggccacatcaccctggagagcgtgagcaacttcctgaaggacttcctgcacaaggacagagacgacgtgaacgtggagatcgtgttcctgcacaacatcagccccaacctggagctggaggccctgttcaagagacacttcacccaggtggagttctaccagggcagcgtgctgaacccccacgacctggccagagtgaagatcgagagcgccgacgcctgcctgatcctggccaacaagtactgcgccgaccccgacgccgaggacgccagcaacatcatgagagtgatcagcatcaagaactaccaccccaagatcagaatcatcacccagatgctgcagtaccacaacaaggcccacctgctgaacatccccagctggaactggaaggagggcgacgacgccatctgcctggccgagctgaagctgggcttcatcgcccagagctgcctggcccagggcctgagcaccatgctggccaacctgttcagcatgagaagcttcatcaagatcgaggaggacacctggcagaagtactacctggagggcgtgagcaacgagatgtacaccgagtacctgagcagcgccttcgtgggcctgagcttccccaccgtgtgcgagctgtgcttcgtgaagctgaagctgctgatgatcgccatcgagtacaagagcgccaacagagagagcagaatcctgatcaaccccggcaaccacctgaagatccaggagggcaccctgggcttcttcatcgccagcgacgccaaggaggtgaagagagccttcttctactgcaaggcctgccacgacgacatcaccgaccccaagagaatcaagaagtgcggctgcaagagaagatgggaggagcactgcagcctgtggagactggagagcaagggcaacgtgagaagactgaactactgcagaggccagcagaccttcagcgtgaaggtgaaggtggccgccagaagcagatacagcaaggaccccttcgagttcaagaaggagacccccaacagcagactggtgaccgagcccgtggaggacgagcagcccagcaccctgagccccaagaagaagcagagaaacggcggcatgagaaacagccccaacaccagccccaagctgatgagacacgaccccctgctgatccccggcaacgaccagatcgacaacatggacagcaacgtgaagaagtacgacagcaccggcatgttccactggtgcgcccccaaggagatcgagaaggtgatcctgaccagaagcgaggccgccatgaccgtgctgagcggccacgtggtggtgtgcatcttcggcgacgtgagcagcgccctgatcggcctgagaaacctggtgatgcccctgagagccagcaacttccactaccacgagctgaagcacatcgtgttcgtgggcagcatcgagtacctgaagagagagtgggagaccctgcacaacttccccaaggtgagcatcctgcccggcacccccctgagcagagccgacctgagagccgtgaacatcaacctgtgcgacatgtgcgtgatcctgagcgccaaccagaacaacatcgacgacaccagcctgcaggacaaggagtgcatcctggccagcctgaacatcaagagcatgcagttcgacgacagcatcggcgtgctgcaggccaacagccagggcttcaccccccccggcatggacagaagcagccccgacaacagccccgtgcacggcatgctgagacagcccagcatcaccaccggcgtgaacatccccatcatcaccgagctggtgaacgacaccaacgtgcagttcctggaccaggacgacgacgacgaccccgacaccgagctgtacctgacccagcccttcgcctgcggcaccgccttcgccgtgagcgtgctggacagcctgatgagcgccacctacttcaacgacaacatcctgaccctgatcagaaccctggtgaccggcggcgccacccccgagctggaggccctgatcgccgaggagaacgccctgagaggcggctacagcaccccccagaccctggccaacagagacagatgcagagtggcccagctggccctgctggacggccccttcgccgacctgggcgacggcggctgctacggcgacctgttctgcaaggccctgaagacctacaacatgctgtgcttcggcatctacagactgagagacgcccacctgagcacccccagccagtgcaccaagagatacgtgatcaccaaccccccctacgagttcgagctggtgcccaccgacctgatcttctgcctgatgcagttcgaccacaacgccggccagagcagagccagcctgagccacagcagccacagcagccagagcagcagcaagaagagcagcagcgtgcacagcatccccagcaccgccaacagacagaacagacccaagagcagagagagcagagacaagcagaagtacgtgcaggaggagagactgtag

SEQ ID NO: 335655 - protein, 180 aa, Artificial Sequence
  derived and/or modified sequence
  misc_feature (1)..(1): Xaa can be any naturally occurring amino acid
XKIRIITQMLQYHNKAHLLNIPSWNWKEGDDAICLAELKLGFIAQSCLAQGLSTMLANLFSMRSFIKIEEDTWQKYYLEGVSNEMYTEYLSSAFVGLSFPTVCELCFVKLKLLMIAIEYKSANRESRILINPGNHLKIQEGTLGFFIASDAKEVKRPPQLCLPLAAQKRCFQSDKLDIFI

SEQ ID NO: 335656 - DNA, 543 bp, Artificial Sequence
  derived and/or modified sequence
taaaaaattaggattatcacacagatgctccagtaccacaataaggcccatctgttgaacataccttcatggaattggaaagaaggcgacgacgccatctgtctggcagaactcaaattggggtttattgcccagtcgtgcctggcacaaggattatccaccatgctggccaatctgttttctatgcggtctttcatcaaaattgaggaggatacatggcagaaatactatctggaaggtgtgagcaacgagatgtataccgaatacctttccagtgcctttgtcggcttgagtttcccgaccgtgtgtgaactgtgctttgtcaagctgaaattactcatgattgcgatcgaatataaatccgctaacagggagagcaggattctcatcaatccaggcaaccacctgaaaatccaagagggcacattgggatttttcatcgcatcggacgccaaagaagtcaagcgccctccccaactttgtctgcccctggctgctcagaaacgttgctttcagtcagataagctcgatatctttatctag

SEQ ID NO: 335657 - DNA, 543 bp, Artificial Sequence
  derived and/or modified sequence
tgaaaaatccgcatcatcacccagatgctgcagtaccacaacaaggcccacctgctgaacatccccagctggaactggaaggagggagatgatgccatctgcctggccgagctgaagctgggcttcatcgcccagagctgcctggcccagggcctgagcaccatgctggccaacctcttctccatgaggagcttcatcaagattgaggaggacacctggcagaagtactacctggagggcgtgtccaatgagatgtacacagagtacctgagcagcgcctttgtgggcctgtccttccccaccgtgtgtgagctgtgctttgtgaagctgaagctgctgatgattgccatcgagtacaagagcgccaaccgggagagccgcatcctgatcaaccctggcaaccacctgaagatccaggagggcaccctgggcttcttcatcgccagtgatgccaaggaggtgaagaggcctccccagctgtgcctgcccctggccgcccagaagcgctgcttccagagcgacaagctggacatcttcatctag

SEQ ID NO: 335658 - DNA, 543 bp, Artificial Sequence
  derived and/or modified sequence
tgaaagatccggatcatcacccagatgctgcagtaccacaacaaggcgcacttactcaacattcctagctggaattggaaggagggtgacgatgctatatgcttagccgaattgaagctgggcttcatagcacagtcctgcttagcccagggcctgagcacgatgctcgcaaacctattttctatgcggagctttattaagatagaagaggatacatggcagaagtattatcttgaaggggtctcaaatgaaatgtacacggaatatttgagcagtgctttcgtgggactgtcctttcccacggtgtgcgaactgtgctttgttaaacttaaactgctgatgattgccattgagtacaagagcgccaacagagaatctcgtattctgataaacccaggaaaccatctcaagattcaggaaggaactttggggttctttattgcctctgacgctaaggaggtgaagcggcctcctcaactttgcctgccccttgccgcccagaaacggtgttttcaatccgataaactggacatctttatctag

SEQ ID NO: 335659 - DNA, 826 bp, Artificial Sequence
  derived and/or modified sequence
cgaagataagaatcatcactcaaatgctgcagtatcacaacaaggcccatctgctaaacatcccgagctggaattggaaagaaggtgatgacgcaatctgcctcgcagagttgaagttgggcttcatagcccagagctgcctggctcaaggcctctccaccatgcttgccaacctcttctccatgaggtcattcataaagattgaggaagacacatggcagaaatactacttggaaggagtctcaaatgaaatgtacacagaatatctctccagtgccttcgtgggtctgtccttccctactgtttgtgagctgtgttttgtgaagctcaagctcctaatgatagccattgagtacaagtctgccaaccgagagagccgtatattaattaatcctggaaaccatcttaagatccaagaaggtactttaggatttttcatcgcaagtgatgccaaagaagttaaaagacctcctcaactctgtctccctttggctgcccagaaaaggtgctttcagagtgacaagcttgatatttttatttgactgagaaacgacatacttctgccccctcaaatatatatttgaccagactgtgggaattttggtgttgtatttaacttccccaccaagggcccagggctcattgcccacatgtccccacgagtagcatcaaaggctgttctcaaaaatgaaagacgaatgagcagacacagtgtgtcacatcagcaacttttttcccagtttctttgtaaatggaagtttatgaaaaggagcactaactcaaatcacagaatcctgtgtttgaaataaatggtcttgcaacaaac

SEQ ID NO: 335660 - DNA, 543 bp, Artificial Sequence
  derived and/or modified sequence
tgaaaaatcagaatcatcactcagatgcttcagtatcacaataaggcgcacctcttgaacattcccagctggaattggaaagaaggagacgacgccatatgcctggctgagctgaagcttggcttcattgcgcagtcttgcctggctcaaggtctcagtaccatgttagccaatctcttcagcatgcgaagcttcataaagatcgaggaagatacatggcagaagtattatcttgagggagtgagtaatgaaatgtacaccgagtatttgagctccgctttcgttggcctgtctttccccacggtgtgcgagctgtgtttcgtcaagctcaaactgctcatgatcgcgatcgagtacaaatcagcaaatcgggagtctcgcatcttaataaatcccggtaatcatctgaaaatccaggagggcacccttggttttttcatcgcttcagacgcaaaagaggtaaaacgccctcctcagctgtgccttccactggcggcacagaagagatgctttcagtccgacaagctcgatatctttatctag

SEQ ID NO: 335661 - DNA, 543 bp, Artificial Sequence
  derived and/or modified sequence
tgaaagatcagaatcatcacccagatgctgcagtaccacaacaaggcccacctgctgaacatccccagctggaactggaaggagggcgacgacgccatctgcctggccgagctgaagctgggcttcatcgcccagagctgcctggcccagggcctgagcaccatgctggccaacctgttcagcatgagaagcttcatcaagatcgaggaggacacctggcagaagtactacctggagggcgtgagcaacgagatgtacaccgagtacctgagcagcgccttcgtgggcctgagcttccccaccgtgtgcgagctgtgcttcgtgaagctgaagctgctgatgatcgccatcgagtacaagagcgccaacagagagagcagaatcctgatcaaccccggcaaccacctgaagatccaggagggcaccctgggcttcttcatcgccagcgacgccaaggaggtgaagagacccccccagctgtgcctgcccctggccgcccagaagagatgcttccagagcgacaagctggacatcttcatctag

SEQ ID NO: 335662 - DNA, 795 bp, Artificial Sequence
  derived and/or modified sequence
tgagtgatttccatcaaaaattaccacccgaaaataagaatcattactcagatgctgcagtaccataacaaggctcacctcctcaatatcccttcttggaattggaaagagggggacgacgctatctgcctcgcagaattgaagttggggttcatagcccaatcatgccttgcacaggggctgtctacaatgctggcaaatctgttctccatgcgaagttttattaaaatcgaagaggacacctggcaaaagtactacctggaaggtgtgtccaatgagatgtatactgagtacctgagcagcgcctttgtgggactgtcattccctactgtctgtgagctgtgttttgttaagcttaagctgctgatgatcgccatagaatacaagtcagcgaacagggaaagtcgtattctgattaatccgggaaatcatctgaaaatccaggaaggaaccttaggattcttcatcgcctccgatgctaaggaagttaagagagcatttttttactgcaaagcatgccatgacgatatcactgaccccaagcgcatcaagaaatgcgggtgcaagcgcttggccggctcccaggatacacaccctgactccttttaccaccaagctgtgaacgctagttcctatctccatgggggtgggcagatgtggcctgtgagcagctcttcaagcatattgctgcattatttacgacggcaaatgcctgggcctgccaggctgccgctggagctatcatgccaggggagcgccctcagccctaatccggacctatactgtatgaagtag

SEQ ID NO: 335663 - DNA, 795 bp, Artificial Sequence
  derived and/or modified sequence
tgagtcatcagcatcaagaactaccaccccaagatccgcatcatcacccagatgctgcagtaccacaacaaggcccacctgctgaacatccccagctggaactggaaggagggagatgatgccatctgcctggccgagctgaagctgggcttcatcgcccagagctgcctggcccagggcctgagcaccatgctggccaacctcttctccatgaggagcttcatcaagattgaggaggacacctggcagaagtactacctggagggcgtgtccaatgagatgtacacagagtacctgagcagcgcctttgtgggcctgtccttccccaccgtgtgtgagctgtgctttgtgaagctgaagctgctgatgattgccatcgagtacaagagcgccaaccgggagagccgcatcctgatcaaccctggcaaccacctgaagatccaggagggcaccctgggcttcttcatcgccagtgatgccaaggaggtgaagagggccttcttctactgcaaggcctgccatgatgacatcacagaccccaagaggatcaagaagtgtggctgcaagaggctggccggcagccaggacacccacccagacagcttctaccaccaggccgtgaatgccagcagctacctgcacggcggcggccagatgtggcctgtgagcagcagcagcagcatcctgctgcactacctgcggcggcagatgcctggccctgcccggctgcccctggagctgagctgccagggcagcgccctgagccccaacccagacctgtactgcatgaagtag

SEQ ID NO: 335664 - DNA, 795 bp, Artificial Sequence
  derived and/or modified sequence
tgagtgatcagcatcaagaactaccaccccaagatccggatcatcactcagatgcttcagtaccacaataaggcccacctgctgaacataccaagttggaactggaaagaaggagatgacgcgatttgtctcgctgagctgaagctgggattcatcgcccagtcgtgtctggcccaaggactcagtaccatgctcgcaaacctgttctcaatgagaagctttattaaaattgaggaagatacctggcagaaatattaccttgagggagttagcaacgagatgtacacagagtatctgtcctctgccttcgtggggctgtcattccccacagtgtgcgaactttgctttgtcaaacttaagctgctgatgatagccattgaatacaaatctgccaatcgcgagtcacgcattctgatcaaccctggaaaccacctgaagatccaggaaggaacgctcggattcttcatcgcttcagacgccaaagaggtgaagagagcctttttctactgtaaggcatgccacgacgacatcaccgaccccaagaggatcaagaaatgtggttgtaagcggctcgctggatcccaggatacacaccccgacagcttctaccatcaagccgttaatgccagctcctacctgcacgggggcggccagatgtggccagttagctcgagtagcagcatccttctgcactacttacgacgacagatgcccggccccgcaagactgcccctcgagcttagttgtcaaggatcagcactgagcccaaatcccgacctgtactgcatgaagtag

SEQ ID NO: 335665 - DNA, 994 bp, Artificial Sequence
  derived and/or modified sequence
agtaatctccataaagaactaccatccgaagataagaatcatcactcaaatgctgcagtatcacaacaaggcccatctgctaaacatcccgagctggaattggaaagaaggtgatgacgcaatctgcctcgcagagttgaagttgggcttcatagcccagagctgcctggctcaaggcctctccaccatgcttgccaacctcttctccatgaggtcattcataaagattgaggaagacacatggcagaaatactacttggaaggagtctcaaatgaaatgtacacagaatatctctccagtgccttcgtgggtctgtccttccctactgtttgtgagctgtgttttgtgaagctcaagctcctaatgatagccattgagtacaagtctgccaaccgagagagccgtatattaattaatcctggaaaccatcttaagatccaagaaggtactttaggatttttcatcgcaagtgatgccaaagaagttaaaagggcatttttttactgcaaggcctgtcatgatgacatcacagatcccaaaagaataaaaaaatgtggctgcaaacggctggccggttctcaggatactcatcctgacagcttctaccaccaggcagtgaatgcttcctcttacctccatggtggagggcagatgtggccagttagctcctcatcttccatcctcctccactatctcaggcgacagatgccagggccagcccgccttccacttgagctttcttgtcaaggctctgccttgagcccaaatcctgacctttactgtatgaaataaagtactgatgaacaagcagaggtttgaattagagcaggcttggagcaaatgtcaagtccgtctctgcctctttcctccacctgcaccaggagcctcgattagacccagtgtggagtttgcagcgccttaggctttatgggtctggggagacataacttattaacaaagagttattaaatttttatcaattttacaacacaa

SEQ ID NO: 335666 - DNA, 795 bp, Artificial Sequence
  derived and/or modified sequence
tgagtcatatccattaagaattatcatccaaaaattagaatcattacccagatgctccagtaccataataaagctcacctgctgaacatcccatcttggaactggaaggagggtgatgatgcaatctgcttggcagaattgaaactggggttcattgcccagagttgtctcgctcaagggctgtcaacaatgctggccaaccttttctcaatgcgcagcttcattaagatcgaagaagacacatggcagaaatattatcttgagggcgtaagtaacgaaatgtacaccgagtatctctcgagcgcatttgtgggacttagtttccccactgtgtgtgaactgtgcttcgtcaaactgaagctcctcatgatagcaattgaatacaaaagcgcgaacagggaatcccggatcctaataaatcccggaaaccacttaaagatacaggaaggcactttaggcttcttcattgctagtgatgcaaaggaggttaaacgtgcatttttttactgcaaagcatgccatgacgatatcactgacccaaaacgcatcaagaagtgtggctgcaagagacttgctggatctcaggacactcatcctgatagcttttaccatcaggcggtgaatgctagctcctacctgcacggtgggggacaaatgtggccagtttcgtcttccagcagcatcctgctccactatctgcgccgtcagatgcctggccctgcacgcctgcccctggagttgtcatgccagggatctgctctgagtcctaaccctgacctctactgtatgaagtag

SEQ ID NO: 335667 - DNA, 795 bp, Artificial Sequence
  derived and/or modified sequence
tgagtgatcagcatcaagaactaccaccccaagatcagaatcatcacccagatgctgcagtaccacaacaaggcccacctgctgaacatccccagctggaactggaaggagggcgacgacgccatctgcctggccgagctgaagctgggcttcatcgcccagagctgcctggcccagggcctgagcaccatgctggccaacctgttcagcatgagaagcttcatcaagatcgaggaggacacctggcagaagtactacctggagggcgtgagcaacgagatgtacaccgagtacctgagcagcgccttcgtgggcctgagcttccccaccgtgtgcgagctgtgcttcgtgaagctgaagctgctgatgatcgccatcgagtacaagagcgccaacagagagagcagaatcctgatcaaccccggcaaccacctgaagatccaggagggcaccctgggcttcttcatcgccagcgacgccaaggaggtgaagagagccttcttctactgcaaggcctgccacgacgacatcaccgaccccaagagaatcaagaagtgcggctgcaagagactggccggcagccaggacacccaccccgacagcttctaccaccaggccgtgaacgccagcagctacctgcacggcggcggccagatgtggcccgtgagcagcagcagcagcatcctgctgcactacctgagaagacagatgcccggccccgccagactgcccctggagctgagctgccagggcagcgccctgagccccaaccccgacctgtactgcatgaagtag

SEQ ID NO: 335668 - protein, 530 aa, Artificial Sequence
  derived and/or modified sequence
MFTEGEEMYLQGSTVWHPDCKQSTKTEEKLRLPNIRRSSSDFFYSKSLIRRTGRSPSLQPTRTSSESIYSRPGSSIPGSPGHTIYAKVDNEILDYKDLAAIPKVKAIYDIERPDLITYEPFYTSGYDDKQERQSLGESPRTLSPTPSAEGYQDVRDRMIHRSTSQGSINSPVYSRHSYTPTTSRSPQHFHRPELLSPGVQRLSYLRTSSLSPTHSDSRPNPPFRHHFIPHIKGNEPSSGRNSPLPYRPDSRPLTPTYAQAPKHFHVPDQGINIYRKPPIYKQHAALAAQSKSSEDIIKFSKFPAAQAPDPSETPKIETDHWPGPPSFAVVGPDMKRRSSGREEDDEELLRRRQLQEEQLMKLNSGLGQLILKEEMEKESRERSSLLASRYDSPINSASHIPSSKTASLPGYGRNGLHRPVSTDFAQYNSYGDVSGGVRDYQTLPDGHMPAMRMDRGVSMPNMLEPKIFPYEMLMVTNRGRNKILREVDRTRLERHLAPEVFREIFGMSIQEFDRLPLWRRNDMKKKAKLF

SEQ ID NO: 335669 - DNA, 2541 bp, Artificial Sequence
  derived and/or modified sequence
atgcccgccttcctgggcctgaagtgcctgggcaagctgtgcagcagcgagaagagcaaggtgaccagcagcgagagaaccagcgccagaggcagcaacagaaagagactgatcgtggaggacagaagagtgagcggcaccagcttcaccgcccacagaagagccaccatcacccacctgctgtacctgtgccccaaggactactgccccagaggcagagtgtgcaacagcgtggaccccttcgtggcccacccccaggacccccaccaccccagcgagaagcccgtgatccactgccacaagtgcggcgagccctgcaagggcgaggtgctgagagtgcagaccaagcacttccacatcaagtgcttcacctgcaaggtgtgcggctgcgacctggcccagggcggcttcttcatcaagaacggcgagtacctgtgcaccctggactaccagagaatgtacggcaccagatgccacggctgcggcgagttcgtggagggcgaggtggtgaccgccctgggcaagacctaccaccccaactgcttcgcctgcaccatctgcaagagacccttcccccccggcgacagagtgaccttcaacggcagagactgcctgtgccagctgtgcgcccagcccatgagcagcagccccaaggagaccaccttcagcagcaactgcgccggctgcggcagagacatcaagaacggccaggccctgctggccctggacaagcagtggcacctgggctgcttcaagtgcaagagctgcggcaaggtgctgaccggcgagtacatcagcaaggacggcgccccctactgcgagaaggactaccagggcctgttcggcgtgaagtgcgaggcctgccaccagttcatcaccggcaaggtgctggaggccggcgacaagcactaccaccccagctgcgccagatgcagcagatgcaaccagatgttcaccgagggcgaggagatgtacctgcagggcagcaccgtgtggcaccccgactgcaagcagagcaccaagaccgaggagaagctgagactgcccaacatcagaagaagcagcagcgacttcttctacagcaagagcctgatcagaagaaccggcagaagccccagcctgcagcccaccagaaccagcagcgagagcatctacagcagacccggcagcagcatccccggcagccccggccacaccatctacgccaaggtggacaacgagatcctggactacaaggacctggccgccatccccaaggtgaaggccatctacgacatcgagagacccgacctgatcacctacgagcccttctacaccagcggctacgacgacaagcaggagagacagagcctgggcgagagccccagaaccctgagccccacccccagcgccgagggctaccaggacgtgagagacagaatgatccacagaagcaccagccagggcagcatcaacagccccgtgtacagcagacacagctacacccccaccaccagcagaagcccccagcacttccacagacccgagctgctgagccccggcgtgcagagactgagctacctgagaaccagcagcctgagccccacccacagcgacagcagacccaacccccccttcagacaccacttcatcccccacatcaagggcaacgagcccagcagcggcagaaacagccccctgccctacagacccgacagcagacccctgacccccacctacgcccaggcccccaagcacttccacgtgcccgaccagggcatcaacatctacagaaagccccccatctacaagcagcacgccgccctggccgcccagagcaagagcagcgaggacatcatcaagttcagcaagttccccgccgcccaggcccccgaccccagcgagacccccaagatcgagaccgaccactggcccggcccccccagcttcgccgtggtgggccccgacatgaagagaagaagcagcggcagagaggaggacgacgaggagctgctgagaagaagacagctgcaggaggagcagctgatgaagctgaacagcggcctgggccagctgatcctgaaggaggagatggagaaggagagcagagagagaagcagcctgctggccagcagatacgacagccccatcaacagcgccagccacatccccagcagcaagaccgccagcctgcccggctacggcagaaacggcctgcacagacccgtgagcaccgacttcgcccagtacaacagctacggcgacgtgagcggcggcgtgagagagtaccagaccctgcccgacggccacatgcccgccatgagaatggacagaggcgtgagcatgcccaacatgctggagcccaagatcttcccctacgagatgctgatggtgaccaacagaggcagaaacaagatcctgagagaggtggacagaaccagactggagagacacctggcccccgaggtgttcagagagatcttcggcatgagcatccaggagttcgacagactgcccctgtggagaagaaacgacatgaagaagaaggccaagctgttctag

SEQ ID NO: 335670 - DNA, 2541 bp, Artificial Sequence
  derived and/or modified sequence
atgccagcttttctcggcctgaagtgtttggggaaactatgctcatcggagaagtccaaagtgacctcctccgagcggacctcagcaagaggaagtaaccggaagcggcttattgtggaggatcggcgcgtgagcggaacaagtttcaccgcccaccgacgcgcgacaatcacgcaccttctgtacctctgcccaaaagactattgcccgagaggtagggtgtgcaattctgtcgacccatttgtggctcacccacaggatccacatcacccatccgagaagcccgtaatccactgtcacaagtgtggcgaaccgtgcaaaggagaggttttgcgggtacagaccaagcatttccatataaaatgtttcacgtgcaaagtatgtggctgtgatctcgcccagggaggcttctttattaagaacggggaatacttgtgtacactggactaccagcgcatgtacggcacgcgctgccacggctgtggagaattcgttgaaggggaggttgttactgcgcttggaaagacttatcaccctaactgtttcgcttgtacaatatgcaaacgtccctttccaccaggcgatagggttaccttcaacgggcgggattgtctatgccaactgtgtgctcaacccatgtcgtcatctcctaaggagactacattcagctccaattgtgcagggtgtgggcgcgatattaaaaatgggcaggcactgctcgcactggacaaacaatggcatttagggtgttttaagtgcaagtcgtgtggcaaagtgctgaccggggagtatattagcaaagacggtgcaccatactgtgagaaagattaccagggactcttcggggtcaaatgtgaggcctgtcaccagttcattacaggcaaggtacttgaggccggggacaaacattaccacccgtcctgtgcaagatgtagtcgctgtaatcagatgtttacagaaggcgaagagatgtaccttcaaggcagcacagtatggcaccctgactgcaaacaatcaacaaaaacggaagagaagctgaggcttccgaatatccggcgctcatcttccgactttttttactccaaatcgctaattagacgaacggggaggagcccatctctgcagccaacacgaaccagcagtgagagcatctactcacgccccggatcctcaatacctggcagccctgggcacaccatctacgccaaggtggataatgagatcctcgattacaaggacttagccgccatcccgaaagttaaggcaatatacgatattgagaggccagacttgatcacttatgaaccattttatactagtggatacgatgacaagcaggagagacagagcctcggcgaaagtccccgtactctttctcccactcccagtgcggaggggtaccaggacgtgcgggaccggatgatccataggagtacgagccagggttctatcaactcacctgtctatagtcgccacagttacactcccaccacttcaaggagcccacagcactttcacagaccagaactcctcagtcccggagtgcagagattgagttatctacggacatcatccttgtcccccactcattctgacagtagaccgaatccacctttccggcaccactttattccgcacatcaaagggaacgagccatcctccggacgtaactcccctctcccttatcgacccgactctcgccccctgacgccgacatacgcgcaggctcctaagcattttcatgtgcccgatcagggcatcaatatctatagaaagcctccaatttacaagcagcacgcagccctggcggctcagagcaaatcaagcgaggacattatcaagttctcaaaatttcctgcagctcaagcgccagacccatctgagacacccaagatcgaaacagatcactggccaggtcctccaagcttcgcggtggtgggccctgatatgaaaaggcggagcagtggccgtgaagaggacgacgaagagctgctgaggcgccggcagctacaggaggagcagctgatgaagttgaatagtggcctcggccaattgatattaaaggaagagatggagaaggaatctagggaacgttccagcctgctggctagccggtacgacagcccaattaacagcgcctctcacatccctagcagcaaaaccgcctcattaccaggctacggacgaaacggtttacaccgtcccgtcagcaccgattttgctcaatataattcctatggtgacgtgagcgggggagttcgggactaccagaccctgcccgatgggcacatgcccgcgatgaggatggatagaggcgtctcaatgcctaacatgctcgagccaaagatctttccatatgaaatgctcatggtgaccaacagaggaagaaataaaattctccgtgaagtcgaccgaacaaggctggagaggcacctggcccccgaggtttttagagagatttttgggatgagcatccaagaatttgaccggttgcctttatggcgtcgaaacgacatgaaaaagaaagcaaaactgttttag

SEQ ID NO: 335671 - DNA, 2541 bp, Artificial Sequence
  derived and/or modified sequence
atgcccgcctttctcggactcaagtgtctcggaaaactgtgtagtagtgagaagtcaaaagtcactagttctgaacgcaccagtgccaggggcagcaatagaaaacgcctgattgtcgaggatcgtagagtcagtggaacctcttttacagcacaccggcgcgccacgatcacccacttattgtatctgtgccctaaggattattgccctcgtgggcgagtgtgtaacagcgttgacccttttgtggctcaccctcaggacccacatcatccatctgaaaagccagtaattcactgccataaatgcggcgaaccttgcaaaggcgaagtcctgcgcgtgcagacaaaacacttccacatcaagtgcttcacatgcaaagtgtgcggctgcgacctcgcccaggggggtttttttatcaaaaatggtgagtatctgtgcacgctggattatcagcggatgtatgggactcgttgccatggctgcggcgagttcgtggagggtgaggtggtgacggctctcggaaagacctatcatcccaactgcttcgcgtgcaccatttgcaagcgcccttttccacctggcgatagagtgacattcaacgggcgcgattgcctatgccagctttgcgcccagccaatgagttcttcaccaaaagaaacgaccttctcatctaattgcgccggctgcgggagggatatcaaaaacgggcaggccctgcttgccctcgataaacaatggcatcttggctgctttaagtgtaagtcatgcggcaaggtactcactggagagtacatttctaaggacggtgcaccctattgcgaaaaggactaccaggggctgttcggtgttaaatgcgaggcctgccaccagtttataacagggaaggtactggaggccggagacaagcactatcatccttcctgtgccaggtgttcaagatgtaaccagatgtttacggagggcgaagagatgtacctgcagggtagcactgtgtggcatcccgactgtaagcaatcaacaaagactgaggagaagctccggttgccaaatattcgtcggtcctcatccgactttttttattctaaatctcttattcgccggaccggtaggtctccgagcctgcagccgacccggacctctagcgagagtatatacagccgaccaggctcaagtatccccggatctccaggtcatactatttacgcaaaagtggacaatgagattctggactataaagacctggccgcaattcctaaggtgaaggccatctatgatatcgaaagacccgacctgataacctacgagcccttttataccagcgggtatgacgataagcaagagcgtcaaagcctgggagagtctccgcggaccctaagtcccacaccttccgcggaaggttatcaggacgtacgagacaggatgattcaccgctccacctcccaaggctccatcaactctcccgtatactcgagacattcgtacacacctactacctcccgtagccctcaacacttccaccgccctgagctgctcagcccaggggtgcagcggctcagctatctgcggacttctagcctttcgcctacccattcagactctaggcctaaccccccattcaggcaccatttcatcccacatataaaaggtaatgagccctcatcagggaggaacagccctttgccgtatcggccagattcccggcccctaacacccacatacgcccaggcgcccaagcacttccacgtgccagatcagggcatcaacatctatcgcaaaccccccatctacaaacagcatgcagcgttggccgcgcagtctaagtccagtgaggatatcattaagttctccaagttccctgccgctcaagctcctgatccttcagagacacccaagatcgagaccgaccattggcccggccctccgagcttcgcagtcgtgggtccagacatgaagcggagatcatccggtagggaagaagacgacgaggaactgctgaggcgccgccagttgcaagaggagcagctcatgaagctaaattcaggcctcggtcaattgatcctgaaggaggaaatggagaaagaatcacgggagcgctcaagcttacttgcatcacgttacgactctccaatcaactctgccagtcatatcccaagcagcaaaaccgctagtctgccaggatatggacggaatggtttacatcggcctgtgagcacagattttgcacagtacaattcctacggcgacgtgagcggcggggtacgggagtaccaaactctgcctgacgggcatatgcctgcaatgcgtatggaccgcggtgtgtcaatgccaaacatgctcgagccaaaaatattcccatacgaaatgctgatggtcaccaaccgcggccgtaataaaattctacgcgaggtagacaggaccagactcgagagacacctggctccggaggtgtttcgcgaaatctttggcatgtcaattcaggagttcgaccgcctccccttatggcgaaggaatgacatgaagaagaaagcgaaactgttctag

SEQ ID NO: 335672 - DNA, 7688 bp, Artificial Sequence
  derived and/or modified sequence
atgcctgccttccttggtctaaagtgtctggggaaattgtgcagctctgagaaaagcaaagtcacctcatctgagagaaccagtgccaggggctcgaacagaaagagactgattgttgaggaccggagggtctctgggacctccttcaccgctcataggcgtgccactatcactcatttgctgtatctctgtcccaaggactactgcccacgtgggcgtgtatgtaacagcgttgatccttttgtggcccaccctcaggaccctcaccacccatcagagaagcctgtcattcactgccataaatgtggggagccttgcaagggtgaagtgcttcgggtccagaccaaacatttccacatcaagtgtttcacctgcaaagtgtgtggctgtgacctggcacaagggggcttcttcataaagaacggagagtatctctgcaccctggactaccagcggatgtacgggacacgctgccatggctgtggggagttcgtggagggcgaagtggtgactgctctgggcaagacctaccatcccaattgctttgcttgtactatctgcaagcgcccgtttccacccggagaccgagtcacattcaatgggagagactgcctttgtcaactctgtgcacagccgatgtcgtccagtccgaaagaaaccaccttctccagcaattgtgccggctgcggaagagatatcaagaatgggcaggcgctgctggcgctggataagcagtggcacttggggtgctttaaatgcaagtcctgcgggaaggtcctcaccggggagtacatcagcaaggatggtgctccgtactgtgaaaaggactaccagggactctttggggtgaaatgtgaggcgtgtcaccagtttatcacagggaaagtcctggaggcaggtgacaaacattaccaccccagctgtgcacgatgcagcagatgcaaccagatgttcacagaaggagaggaaatgtatcttcaaggctccaccgtttggcatcccgactgtaagcaatctacgaagaccgaggaaaagctgcggctgccaaacattcggcgttcttcatccgatttcttttattccaaaagtctgattcgacgcacaggacggtctccgtctctgcagcctaccaggacatcctcggaaagtatttattctaggccaggctccagtattcctggctcaccaggtcatactatctatgcaaaagtagacaatgagatcctggattacaaggatttagcagccattccgaaggtcaaggcaatttatgacattgaacgtccagatcttattacctatgagcctttctacacttcgggctatgatgacaaacaggagagacagagccttggagagtctccgaggactttgtctcctactccatcagcagaagggtaccaggatgttcgggatcggatgatccatcggtccacgagccagggctccatcaactcccctgtgtacagccgccacagctacactccaaccacgtcccgctctccccagcatttccacagacctgagcttttgtctcctggtgtgcagaggttgtcgtacctgcgcaccagcagcctcagccccacccacagcgactcccgccccaacccccctttccgacaccacttcattccccatatcaaaggcaatgagccgtccagcggccggaactcccctctcccttaccggccagacagccgccctctaactccaacttacgctcaggcccctaaacatttccatgttccagatcaaggaatcaacatttaccgaaagccacccatctacaaacagcatgctgccttggcagcccagagcaagtcctcagaagatatcatcaagttttccaagttcccagcagcccaggcaccagaccccagcgagacaccaaagattgagacggaccactggcctggtcccccctcatttgctgtcgtaggacctgacatgaaacgcagatctagtggcagagaggaagatgatgaggaacttctgagacgtcggcagcttcaagaagagcaattaatgaagcttaactcaggcctgggacagttgatcttgaaagaagagatggagaaagagagccgggaaaggtcatctctgttagccagtcgctacgattctcccatcaactcagcttcacatattccatcatctaaaactgcatctctccctggctatggaagaaatgggcttcaccggcctgtttctaccgacttcgctcagtataacagctatggggatgtcagcgggggagtgcgagaatatcagacactcccagatggccacatgcctgcaatgagaatggaccgaggagtgtctatgcccaacatgttggaaccaaagatatttccatatgaaatgctcatggtgaccaacagagggcgaaacaaaatcctcagagaggtggacagaaccaggctggagcgccacttagcccctgaagtgtttcgggaaatctttggaatgtccatacaggagtttgacaggttacctctttggagacgcaacgacatgaagaaaaaagcaaaactcttctaagtcccactcgtgaatggcaattagagaaaggactgacagtggcggtgccccataggatgtcatattgaggcccaaacttgattggagaatttgcaaactaccgtcgctcagcaacaccaaaaagagaaagtctggttaaaacaccatgagtcaaatgtcgggccagccaacagtaacacttgccaagaagcatggcgtagaaatttctatgttccgaaacacagagtagtgtccacatgtgagcttttcacattaccttatgtatacaacaggagctgcgttgttttcttctttttcttttcctttatctgttgtccaacaacagtgctgactgtccggataagagctggcaagtgcccttaggatgccgcatgggaaaaatcggttatcataatttcaaagtataaatatatttattaagtagcgctgcggctaagaaggaagagtgaggggtctgtccatggggtggcagtgatttcacacccgcctttcttgaatggcttcgtgttactcagccgtgccctggcaggaatggaactccatcagggaacagggcagctctgtttgaatggggtgaaaaacagcaaaattaattcttagcaagctccttgttctctactgttcaccgggacctggctggcaaatgacttagctattagtatatttaaaaactgttcaaaagcaaaagagaaggaacaggaatgaaaggaaaccttcccttaactctttctgcttcccatagcaggtctggttcctgctccccgcctaggacaggagctgtctggagctccacctttgcaaagaaaggaaaaacacaaattgcccccagattggcccagtggcatgccattaggtgattttgcataggggccatatcattcatggccaaaaaaaaccaaaaagcaaaaaacaaaaacaagtcccatgtcctactgactctagttcttccagtcgttatcctctgctgtctctctggcatcctatgaatcagatcaagcccatgctgttgttggtttttaaggtttctttcaataataggctaaggaaagacatgtttttctcttttaaatctctgcaactccaaagtagactccttcgaacgtatttaatttggccttttcagctttcttcttgcccagctctgtcgaattcatgggtgtgtgtgcacatgttggtttcactcacccagagtaattttgtgagcatgcatgtgctttttaatttctgcttgaatgtttgtcctgctgtgttgcagcttctaaagacattgtcaccgagtgtgtgtgactcaaagatcaagagtgaggctaaactgcgaccccaacatcacttccttcatggaaaggtgttggcgctgatgtagctcatggaaggatcagactgggaaccacagaggaaggatgaggtgggatgtggaggtcagagcatctcacgagagtccctcaggctctgcaacactagattcgaatatgagcctagggtttccccaacacgtgcgtgcatatgaaaccacatcatgattcccgacgtgagttagatgagggagagtttgtgtaactccacacccaggagggtaagccactttattatcatgctttggggctgtgcttaagaatttaagctctgttttaaagccgaagaagaaaacatttgaatttaccttcatatgccactaagaacaaaagctctgaagttcttcctgctggcaccaaatattaggattacaagctgtctctctgacaccagtggtaaaaaagcaagtagaatagtttctgagtctgtgttgcagcctctgacacgtggctcaccgctgtcatttgggggatggaatgaacagtcactgttctatagcatcctcctgtgctcttacctaaggaatctaaattgtcctagccttccattgctatgcactgaatgaggactactctcgtgtgtgtgtgtgtgtgtgtgtgtgtgtgtgtgtgtgtgtgtgtgtgtgttggatctactaacatgtttagcaaatggctctgacagggtggccatgagcagatgagaccagctcttgcttggttggaagccacactgcagtttgcagtttagcctttggtgtctcagtggcttcttgcttattccatgctttttctatcccatcctctctctgtgccctcctgcaatggcagccttggcacaatgcctgggtgtcctcatccttgctttactctggaaagtgtggggatggagaggatggtgcatttccagtgcttccttacctgtcaataacaatggtggccacctgggtcccagcacttggctggtggagagatttttttcattatggagctaataaagggtccctacgttttacattgattaatgaattatcacccagacatgtgcagatgaaatgtcaatataagaaaaatcaaggtatttgggaaacatgggcataatcaggtagttttgctaaaattcctcttccttggtctacataaagaagacatgggtctgtcatagaatggggacattagactgaaaactgggacaacccccttccttattttatagagactaggagttaaggggcctgcctaagattgcagtgataaagaactgaaccctaaatcagctcccactaatgaaaccctgctttccttgtatcttttaaactcagttctgcatccaacttgagaagaaaaaaagcttctttccatatcaagtaccatatgagttcatttaaactgcaccttgcagaaatgcattgccagaaagcaccagtagcctcctatctgcaagcagagtagtgctctgctctggggaggggtcattggaaaccataatgcagagtgggccccctactccatttcccagcaaaaggctccagctggagggatgggttgtggggcaacctggttcctgctaactgccagattgaatgtgtgggctagaatgcctgcacatttagttaaactgggctcagcatgcttgtcctcaaaatgtccatcctggtcacagcacacaagatggctattggtctgcttttaccctaccctgtactatacatgaaaattccagttattaacacactcaaactggtggagcttgttcaccctaggaaggggattgtatatatggcaggcttccctggtgccgatgtaaagggctacatttgggaacatttgacttccttgggactcttaagtgcataatgatggcatgaagtaaaaggggcctcaatgatgataggaaaatcagttcttttaaaatttcttcaagaaaatccaggctatcacatagtctttctgtgtgacttattaggagataggaagagcattgggaaacttgcacagctagctatgcatctacattttggtttggggttagttatgaaatgttcttaatatgacgtgttcaataacttcacataaacttcctgttctccaaaacctcaaagagatagagttaatgagttgttgtttttttttaaatgggggtagttttctatctgtcatgggctctagcatctactccgctacccaattctgtcatctccaagctgagtttcctcttctgaggcagaggctggagcagttctttttcagttctcatcctctccatcccaatccagtatatcaatcaactctaactcggagacgtctagctggcaatgtttctaaaactttcactggatttctttagacattgaagcaaacatttttttctaagaattgcttctcagatgatgatatcaaatgtatatgcttttgcaagtttgaaaagttcaaattaaccacttttgactaggtaagtctttctaaaaaccatttaaagctaactgggtcttagcatcctcctgtgtatggaagagacaggtgaccgctccaggttgggtgctcacagaacccttttcctgactctcatggaagatggtggaaggaaaatagactgtctcatcaaccctcctgtgtcctctgaagcaatctcagtttttattaaccacctcttctgtgtttctggtagctatttaacctgtatttaatctgtacttcctatgccagcctcaattttatttgatttttacaattattctcttctaaccaatgaagtgtttgtcagtatgccccaaagcttgctcttttgtgctcccttttgaataactttctatccagaaaaagagattatttgggacttgagatttgcagtgataccaacttatagcaatgatgtactttaagggaactacccaactatgttgtgatagaagaaagagaaaccttcactttggcatttttttttaatcactgtttatttttctgtttgcggcccaggaagcagtgggaggtggtggcagatatgctttgcatatggattgttatgtttttatttgggcaagtttaatcatggaaaactcaaaaagaaggggggaaatggtcagtttaagccaaaagaaactttctaaacaatgtataggtacacagcaaaattaaacaaatccaacaatttctgaagcttagtgtaattgagtggtggttgttattcaataaaattattcccaaaagtgtttctcctaagagtgcagttcccatgagtcacttcctgaacccattgaccaaaggtggacagagacaatcctgtagaccttgacattcagaaagatgtgagctgcttactgatcatatatgcatacgtttctttacagcagaggaaaccattgtccacaaaactgatgttcttttggggttttatgtacagacttgtccaatcatgtgtgtggttcctgcgagttgctgatgactccgcattgaagctctctgagttctttgattttaagttgggtttatggaattttttcaaatgttggaaggtgtgtggttcttcctgccctccctccccttttggaaatatgaaagcaaatgtttagaagaattccttttgaaaagctgtgtcgtgttccctgtgaaactgagcaggtgtgtgttggcgcgctaagtgccacatgcttgtgtgtagaggaggaggtggccctgccggctccgcgctgctgtgcctgtgatccctacctgctccccgctcctgttgccagcagcactcactgcactcctttgtcatatactctgcatcactgtcatactcacaacttcgtgaataaagttgtgtgctttattcgt

SEQ ID NO: 335673 - DNA, 2541 bp, Artificial Sequence
  derived and/or modified sequence
atgcctgccttcctgggcctgaagtgcctgggcaagctgtgcagcagcgagaagagcaaggtgaccagcagcgagaggaccagcgcccggggcagcaacaggaagaggctcatcgtggaggaccggcgggtgtctggcaccagcttcaccgcccacagaagagccaccatcacccacctgctgtacctgtgccccaaggactactgcccccggggccgggtgtgcaacagcgtggacccctttgtggcccacccccaggacccccaccaccccagcgagaagcctgtgatccactgccacaagtgtggggagccctgcaagggggaggtgctgcgggtgcagaccaagcacttccacatcaagtgcttcacctgcaaggtgtgtggctgtgacctggcccagggcggcttcttcatcaagaatggagagtacctgtgcaccctggactaccagaggatgtatggcacccgctgccacggctgtggggagtttgtggagggggaggtggtgacagccctgggcaagacctaccaccccaactgctttgcctgcaccatctgcaagaggcccttccccccaggggacagagtgaccttcaacggccgggactgcctgtgccagctgtgtgcccagcccatgagcagcagccccaaggagaccaccttcagcagcaactgtgccggctgcggccgggacatcaagaatggccaggccctgctggccctggacaagcagtggcacctgggctgcttcaagtgcaagagctgtgggaaggtgctgactggagagtacatcagcaaggatggagccccctactgtgagaaggactaccagggcctgtttggagtgaagtgtgaggcctgccaccagttcatcaccgggaaggtgctggaggccggggacaagcactaccaccccagctgtgcccgctgcagccgctgcaaccagatgttcacagaaggagaggagatgtacctgcagggcagcacagtgtggcacccagactgcaagcagagcaccaagacagaggagaagctgcggctgcccaacatccgccgcagcagcagtgacttcttctacagcaagagcctcatccggaggacaggccgcagccccagcctgcagcccaccaggaccagcagcgagagcatctacagccggcccggcagcagcatccctggcagccctggccacaccatctatgccaaggtggacaatgagatcctggactacaaggacctggccgccatccccaaggtgaaggccatctatgacatcgagaggccagacctgatcacctatgagcccttctacaccagcggctatgatgacaagcaggagcggcagagcctgggggagagccccaggaccctgagccccaccccatctgctgagggctaccaggatgtgcgggacaggatgatccacaggagcaccagccagggcagcatcaacagccctgtgtacagccgccacagctacacccccaccaccagccgcagcccccagcacttccacaggcctgagctgctgagccctggggtgcagaggctgagctacctgcggaccagcagcctgagccccacccacagcgacagccggcccaacccccccttccgccaccacttcatcccccacatcaagggaaatgagcccagcagcggcaggaacagccccctgccctacagaccagacagccggcccctgacccccacctacgcccaggcccccaagcacttccacgtgcctgaccagggcatcaacatctacaggaagccacccatctacaagcagcacgccgccctggccgcccagagcaagagcagcgaggacatcatcaagttcagcaagtttcctgctgcccaggccccagaccccagcgagacccccaagattgaaacagaccactggccaggcccccccagctttgctgtggtgggccctgacatgaagaggaggagcagcggccgggaggaggatgatgaggagctgctgcggcggcggcagctgcaggaggagcagctgatgaagctgaacagcggcctgggccagctgatcctgaaggaggagatggagaaggagagccgggagaggagcagcctgctggccagccgctatgacagccccatcaacagcgccagccacatccccagcagcaagacagccagcctgcccggctatggaagaaatggcctgcacaggcctgtgtccacagactttgcccagtacaacagctatggagatgtgtctgggggcgtgcgggactaccagaccctgcctgatggccacatgcctgccatgaggatggaccggggcgtgtccatgcccaacatgctggagcccaagatcttcccctatgagatgctgatggtgaccaacagaggaagaaacaagatcctgcgggaggtggacaggacccggctggagcggcacctggcccctgaggtgttccgggagatcttcggcatgagcatccaggagtttgaccggctgcccctgtggaggagaaatgacatgaagaagaaggccaagctgttctag

SEQ ID NO: 335674 - DNA, 2541 bp, Artificial Sequence
  derived and/or modified sequence
atgcctgccttcctgggcctgaagtgcctgggcaagctgtgcagcagcgagaagagcaaggtgaccagcagcgagaggaccagcgcccggggcagcaacaggaagaggctcatcgtggaggaccggcgggtgtctggcaccagcttcaccgcccacagaagagccaccatcacccacctgctgtacctgtgccccaaggactactgcccccggggccgggtgtgcaacagcgtggacccctttgtggcccacccccaggacccccaccaccccagcgagaagcctgtgatccactgccacaagtgtggggagccctgcaagggggaggtgctgcgggtgcagaccaagcacttccacatcaagtgcttcacctgcaaggtgtgtggctgtgacctggcccagggcggcttcttcatcaagaatggagagtacctgtgcaccctggactaccagaggatgtatggcacccgctgccacggctgtggggagtttgtggagggggaggtggtgacagccctgggcaagacctaccaccccaactgctttgcctgcaccatctgcaagaggcccttccccccaggggacagagtgaccttcaacggccgggactgcctgtgccagctgtgtgcccagcccatgagcagcagccccaaggagaccaccttcagcagcaactgtgccggctgcggccgggacatcaagaatggccaggccctgctggccctggacaagcagtggcacctgggctgcttcaagtgcaagagctgtgggaaggtgctgactggagagtacatcagcaaggatggagccccctactgtgagaaggactaccagggcctgtttggagtgaagtgtgaggcctgccaccagttcatcaccgggaaggtgctggaggccggggacaagcactaccaccccagctgtgcccgctgcagccgctgcaaccagatgttcacagaaggagaggagatgtacctgcagggcagcacagtgtggcacccagactgcaagcagagcaccaagacagaggagaagctgcggctgcccaacatccgccgcagcagcagtgacttcttctacagcaagagcctcatccggaggacaggccgcagccccagcctgcagcccaccaggaccagcagcgagagcatctacagccggcccggcagcagcatccctggcagccctggccacaccatctatgccaaggtggacaatgagatcctggactacaaggacctggccgccatccccaaggtgaaggccatctatgacatcgagaggccagacctgatcacctatgagcccttctacaccagcggctatgatgacaagcaggagcggcagagcctgggggagagccccaggaccctgagccccaccccatctgctgagggctaccaggatgtgcgggacaggatgatccacaggagcaccagccagggcagcatcaacagccctgtgtacagccgccacagctacacccccaccaccagccgcagcccccagcacttccacaggcctgagctgctgagccctggggtgcagaggctgagctacctgcggaccagcagcctgagccccacccacagcgacagccggcccaacccccccttccgccaccacttcatcccccacatcaagggaaatgagcccagcagcggcaggaacagccccctgccctacagaccagacagccggcccctgacccccacctacgcccaggcccccaagcacttccacgtgcctgaccagggcatcaacatctacaggaagccacccatctacaagcagcacgccgccctggccgcccagagcaagagcagcgaggacatcatcaagttcagcaagtttcctgctgcccaggccccagaccccagcgagacccccaagattgaaacagaccactggccaggcccccccagctttgctgtggtgggccctgacatgaagaggaggagcagcggccgggaggaggatgatgaggagctgctgcggcggcggcagctgcaggaggagcagctgatgaagctgaacagcggcctgggccagctgatcctgaaggaggagatggagaaggagagccgggagaggagcagcctgctggccagccgctatgacagccccatcaacagcgccagccacatccccagcagcaagacagccagcctgcccggctatggaagaaatggcctgcacaggcctgtgtccacagactttgcccagtacaacagctatggagatgtgtctgggggcgtgcgggagtaccagaccctgcctgatggccacatgcctgccatgaggatggaccggggcgtgtccatgcccaacatgctggagcccaagatcttcccctatgagatgctgatggtgaccaacagaggaagaaacaagatcctgcgggaggtggacaggacccggctggagcggcacctggcccctgaggtgttccgggagatcttcggcatgagcatccaggagtttgaccggctgcccctgtggaggagaaatgacatgaagaagaaggccaagctgttctag

SEQ ID NO: 335675 - DNA, 2541 bp, Artificial Sequence
  derived and/or modified sequence
atgcccgccttcctgggcctgaagtgcctgggcaagctgtgcagcagcgaaaaaagcaaagtcacctcatcagagcggacatccgctcggggaagcaacaggaaacggctcatcgttgaagatcgccgagtctctggcaccagctttaccgcacacagacgggctaccatcactcacctcctgtacctttgtccaaaagactattgcccgagaggaagggtgtgcaattcagtggacccatttgtcgcccatccacaggatccccaccacccatccgagaagccggtgatacactgccacaaatgtggggagccctgtaagggagaggtgctgcgcgtgcagacaaagcactttcacattaagtgctttacctgtaaggtctgcggctgtgaccttgcgcagggaggtttctttatcaagaacggggaatacctgtgtacactcgactatcagcgtatgtacgggactaggtgccacggatgcggagaattcgtggagggcgaggtcgtaaccgccctgggcaaaacctaccacccaaactgctttgcttgtacaatatgcaaacgtcccttcccgccaggagaccgggtcaccttcaacggccgcgattgcctatgccagctgtgcgctcagccgatgtcttctagcccaaaggagaccaccttcagctctaactgcgccggctgcggcagggacataaaaaacggacaggcactcctggctctcgataagcagtggcacctggggtgcttcaaatgcaaatcatgcgggaaggtgttgactggggaatatatttccaaagacggcgcaccttactgtgaaaaagactaccaaggactattcggcgtcaaatgcgaggcgtgccatcagtttataacgggcaaggtgttggaagctggcgacaagcactatcacccctcctgcgcaaggtgctcccgatgcaaccagatgtttacagaaggggaggagatgtatctgcagggctccactgtgtggcaccctgattgcaagcagtccacaaagaccgaggagaagttgaggctgcccaatatacgacggagctcatctgactttttctatagtaaaagcctaataaggagaaccggacggtcccctagcttgcaacctacaaggaccagttcagagagcatttattcacgccccgggtctagcatacccggatcaccaggccacacaatatacgcgaaagtggacaacgaaattctcgattataaggatctagccgccattcctaaggtaaaggccatctatgatatcgagaggccagatctaatcacatacgaacctttctacacatccggatatgacgacaaacaggaacggcagtcactgggagagagcccccggaccctgagccctactccttctgccgaggggtaccaggatgtccgcgataggatgattcatagatccacttcgcagggaagcatcaacagtcctgtttatagtcgtcactcctacacccccaccacaagtagatccccacagcacttccatcggcctgaacttctcagcccaggagtacagcgcctgtcatatctgcggacgtcatccctgtcccccacccacagtgactctcgtccaaacccccccttcaggcatcactttatcccccacatcaaaggcaacgaaccaagctcgggcagaaattcaccactgccctataggccagactcccggcccctcacacccacatacgcccaggccccaaagcatttccatgtaccggaccagggaataaatatatataggaagcctcctatctacaagcaacatgccgcactggccgctcaaagcaagagttctgaggatataatcaagttcagtaaatttcccgccgcgcaggcccccgacccaagtgaaactcccaagatcgagactgatcattggccaggtcctcccagttttgcagtggttgggccggatatgaagcggaggtcatctggacgcgaagaggacgatgaagagcttcttcgcaggaggcaactgcaggaagaacagctcatgaagctgaatagcggactgggccagctcattctcaaggaagaaatggagaaggaatcacgcgaaagaagctctctactggcttcccggtatgattcgccaatcaacagtgccagtcatatcccttcctctaagacagccagcttacccggctacggtcgcaatggccttcaccgaccggtaagtactgactttgcgcagtacaatagttatggcgacgtgtcaggaggagtgcgagattatcagacacttcctgatggtcatatgcccgccatgagaatggatcggggggtgtctatgccaaatatgctggaaccaaagatcttcccatatgagatgctgatggtcaccaataggggcaggaataaaatactgcgagaggtggacagaaccaggttggagcgacatttagctcccgaggtgtttagagaaatctttggcatgagtatccaagagtttgatcgattgcccctgtggaggaggaatgatatgaaaaaaaaagccaaactcttttag

SEQ ID NO: 335676 - DNA, 2541 bp, Artificial Sequence
  derived and/or modified sequence
atgcccgccttcctgggcctgaagtgcctgggcaagctgtgcagcagcgagaaatctaaggttacctcctccgagcgcacgagtgccaggggcagcaaccgaaagcgtctgatcgtggaagatcgacgagttagtggcactagttttacggcccatagaagggcaacgattacacatttactgtacctgtgtccaaaggattattgcccacgcggacgcgtgtgtaactccgtggacccatttgttgcgcatccccaggaccctcatcacccctccgagaaaccagtgatccattgtcataagtgtggggaaccatgtaaaggagaggtgctgcgggtgcagacaaagcatttccatattaagtgcttcacctgcaaagtgtgtggatgtgatctggcccagggtggattctttattaagaatggagagtacttatgtaccttggactaccaaaggatgtacggcacgagatgccacggatgtggcgagttcgtggaaggggaagtcgtgacagctttggggaagacgtaccacccaaattgctttgcctgcaccatctgtaaaagacctttcccgcccggcgatcgcgtcaccttcaatggaagggactgtctgtgccagctgtgcgctcagcctatgtctagctctcctaaggagactaccttctctagtaactgcgccggctgcgggcgggatattaaaaatggccaagcactgttggccctggacaagcagtggcaccttggatgtttcaaatgcaaaagttgcggaaaagtcctcactggtgaatatatctctaaggacggtgccccgtattgtgaaaaggactatcagggtttatttggcgtgaaatgtgaagcctgccaccagttcataactggtaaggtgctagaggccggcgacaagcactatcaccctagctgcgctcggtgctcccgttgtaatcagatgtttacggagggcgaggagatgtatctgcagggatccaccgtatggcatcccgattgcaagcagtccacaaagacagaggagaagcttcgcctgccaaatatccggcgctcttcatcagacttcttctacagtaaaagtctgattaggcggacaggcagatcccccagcctccagcccacaagaactagctcggaatccatttactcacgcccagggagtagtattccagggtcaccaggccatacaatctatgccaaggtcgataatgaaattttggattacaaggatctagccgccatcccaaaggtgaaagctatctatgacattgagcgcccagacctgatcacatacgagcccttctatacatctggatatgacgacaagcaagaaagacagtccctcggtgaatcaccgaggacacttagcccgaccccctccgctgaaggatatcaggacgtgcgcgatagaatgatacatcgctcaacgtcacagggctcaatcaactcacctgtgtattcaagacatagttacacaccaaccacttctagatccccccagcattttcatcggccagagctcttgtctccaggcgtgcaaagactgtcatatttaaggacctcttcgctttctcctactcattctgactcccggccaaacccgcccttccggcaccacttcatccctcacataaaagggaacgaaccttcctccggacgcaattcgcccctgccgtacagaccggactccagaccgcttacccctacatatgcgcaggcgcccaaacactttcacgttcccgatcaaggaataaatatctatagaaaacctcctatttataaacagcacgccgcgttggcagcccagagcaagagctcagaagatattattaagtttagtaaatttcccgctgcgcaggccccagatccatccgagacacctaaaatagaaactgaccactggcccgggccacctagctttgctgtggtggggccagatatgaaacgcaggtcatcaggacgggaagaagatgatgaagagctcttaagaaggcgccaacttcaggaagagcagttaatgaagctgaacagcgggctgggccagttaatcctgaaagaagagatggagaaggagtcccgcgagcggtcttccctgttggcgtcacgctatgattccccgatcaactccgcctcacacattccctcctcaaagaccgcttcactgcctggctatgggagaaatgggctgcatcgccccgtatccactgactttgcgcagtataactcatacggagacgtcagcggcggcgtgagagagtaccagacgctgcccgatggtcacatgcccgctatgagaatggaccgcggcgtttccatgccaaatatgctggagccaaagatttttccatatgagatgttgatggtgaccaatcggggcagaaacaagatactcagggaggttgacaggacccgcctcgaacgccatctagccccagaggtatttcgagagatcttcggcatgtccattcaagagtttgacagactgccactctggcgcaggaacgatatgaagaagaaggctaaactgttctag

SEQ ID NO: 335677 - DNA, 2541 bp, Artificial Sequence
  derived and/or modified sequence
atgccagctttcttgggacttaagtgcctgggaaagctttgtagctcggagaagtcaaaggtgacgtctagcgagaggactagcgcccgaggctcaaaccggaagaggctgatagtggaggacaggagagtctccggcacctcattcacagctcatcggcgtgctacaataactcacttgctctatctgtgccccaaagattattgtccccgagggagagtttgcaactccgtcgatccatttgtcgcgcacccccaagaccctcaccacccatctgaaaaacctgtgatccattgccacaaatgtggcgaaccttgcaaaggagaagtcctgcgggtgcaaacgaagcacttccatatcaagtgcttcacttgcaaagtgtgcggctgcgaccttgctcagggtgggttttttatcaagaatggggagtacctttgtacattggactaccaacgaatgtatgggactcgttgccacggatgcggggagttcgtggaaggagaagttgttaccgcactgggaaaaacataccatcctaattgctttgcctgcaccatttgtaaaaggcctttccctcctggagaccgagtgacctttaatggtcgggactgtctgtgtcagctgtgcgcacagcccatgagcagctccccaaaagaaaccaccttctcttctaactgtgcaggatgcggccgagacataaagaacggtcaggccctgctcgcgctagataagcagtggcatttgggatgctttaaatgcaaaagctgcggcaaagtgcttaccggtgagtatatctcaaaagacggagcgccttattgtgagaaggattaccagggcctctttggtgtgaagtgtgaggcgtgtcaccaattcatcactgggaaggttctcgaagccggtgacaaacattaccaccccagttgtgccagatgctctagatgcaaccagatgttcaccgaaggggaggaaatgtatctgcaaggctcaacagtgtggcatcccgattgcaagcagtctacaaagacagaagagaagctgcgtctcccaaacatcaggcgcagctcatcagactttttctactctaagagtttaattagaagaaccgggaggtctccatcccttcagcctactagaacatcctctgagtcaatttattcaagaccagggtctagcataccgggttctccaggccatacaatatacgccaaggttgataatgagatccttgattacaaggacctggccgctatacctaaggttaaagcaatctatgacattgagcggccagaccttattacttacgagcctttctacacctcgggctatgatgataaacaagaaaggcaatccttaggcgagagccctcgcaccctgtctccgaccccttctgccgagggataccaggacgtgcgggatcgcatgatccacaggtccacaagtcagggatcaattaactccccagtgtattcccggcacagctatactcccaccaccagcaggagtccacagcatttccatcgtcccgagttactgtctcccggagttcaacgccttagctacctacgcacctccagccttagccccactcactcagatagcagacccaacccgccttttcgccatcatttcatcccccacatcaaagggaacgaaccaagctccgggcgtaattctccattaccatatagacctgactctaggccactgacaccgacttatgcacaggcacccaagcacttccacgtacctgatcagggtattaatatctatagaaagccccctatatacaagcaacacgcagctctcgccgctcaatccaagagttctgaagacatcataaaattcagtaagtttcctgctgcgcaagcccctgacccaagtgaaacccctaaaatcgaaacggaccattggcctgggccaccctcctttgctgtagtgggcccagacatgaagagacgcagcagtgggcgagaagaggatgatgaagaactgctgagacgcaggcagttacaggaggaacagcttatgaaattgaattcaggtctgggccagctgatactgaaagaagagatggagaaggagagtagagaaaggtcaagcctcctcgccagccgatatgacagtcctataaacagtgcttcccacatcccaagtagcaagaccgcatccctccccggatacggaaggaacgggttgcacaggcctgtatcaacagatttcgctcagtacaattcttacggggacgtgtcaggtggagtccgggactaccaaaccctccccgatgggcacatgccggctatgcgcatggacagaggggttagcatgccaaatatgctggaacccaaaattttcccttatgaaatgctgatggtgaccaatcgtggcagaaacaagattctacgcgaggtagaccgaacccggctggaaaggcacttggcacccgaggtttttagggaaatcttcgggatgagtattcaggaatttgatcgcttgccactctggcgtcggaatgatatgaaaaaaaaagctaagctcttttag

SEQ ID NO: 335678 - DNA, 2541 bp, Artificial Sequence
  derived and/or modified sequence
atgcccgctttcctaggcctcaagtgtctgggtaaactttgttcttccgaaaagtctaaggtgacctcctctgagcgcacatccgctaggggcagcaaccggaaaaggttgatcgtggaggataggagggtgagtggaaccagcttcactgctcaccgacgcgcaactatcactcatctgctctatctctgtcctaaggattactgccccagagggcgagtgtgtaatagtgtggaccctttcgtcgcccaccctcaggatcctcaccatccctccgaaaaacctgtcattcattgccataagtgcggagagccatgtaaaggagaagtccttcgggtccaaacaaagcatttccatatcaagtgcttcacctgcaaagtgtgtggatgcgacctggcacagggcggattttttataaaaaacggagaatacttgtgtacgctggactaccagagaatgtacggcaccaggtgccacgggtgtggggagtttgtggaaggagaggtggtgactgcacttggaaaaacttaccatcctaattgtttcgcctgtacgatatgcaaaagacctttcccacctggcgaccgtgtaacatttaatgggagggactgtttgtgtcagctgtgtgcacagccaatgtcttcttcaccaaaggagaccaccttttcatccaattgcgctgggtgcggcagagacattaagaatggccaggcattacttgcactcgataagcaatggcacctgggttgcttcaagtgcaagtcctgcggcaaggtgctgaccggagaatacatcagcaaagacggcgcaccatattgtgagaaagactaccaaggcctattcggagtcaaatgtgaggcatgccatcagtttatcaccggaaaagtactagaagccggagacaaacattatcaccctagttgtgctcggtgctcccggtgcaatcagatgtttacggagggagaagagatgtaccttcagggcagtactgtgtggcacccagactgtaaacaatcaacaaagaccgaggagaagttacggctgccaaatattcgacggtctagctcggattttttttattcaaagagccttattagacgcactgggcgttctccgtcgcttcagcctacacgaaccagcagtgagagcatttattcgcgccctggcagcagtatcccgggaagccccggacacacaatctacgccaaggttgataacgagattctggattataaggacctggctgccatccccaaagtcaaggcaatttatgatatcgaacgacctgacctcatcacctacgagcccttctacacctccggttatgatgacaagcaggagcgccagagccttggagaaagcccgcgaactctttcccctaccccctcggcagaggggtaccaggacgtgcgcgacagaatgatccaccgctccacatcgcaggggagtataaactcgcctgtgtacagtcgtcacagttacacgccgacaacatcccgctcccctcaacactttcaccgccctgagctcctgtctcccggagttcagagattgtcttacctgagaaccagtagcctgagccctactcacagcgattcacgccctaacccacccttcaggcatcacttcatcccgcacatcaaaggtaacgaaccctcctccggcagaaattctcctctcccgtataggcctgactctaggccgctaacccctacctatgcccaggccccaaagcattttcacgtgcccgaccaaggaatcaacatttaccgaaagcctccaatatataagcagcatgcagcactagcggcacagagtaagagcagcgaggacataattaagttttccaagttccctgccgcacaggccccagacccttcagaaaccccaaagatcgagaccgaccactggcccggtcccccttccttcgccgtggtcgggcctgatatgaagcgcagatcctctggtcgggaagaagatgatgaggaactcctgagacgacgccagctgcaagaggaacagctgatgaagttaaatagcggtctggggcagctcatactcaaagaggagatggagaaagaatctcgggaacgcagctcgctacttgctagtcgctatgactcccccatcaacagcgcatcacatatcccttcctctaaaaccgcctccctccccggatacggccgtaatggactacataggcccgtgagcacagactttgcccagtacaacagctatggcgacgtgtcaggaggcgtgcgggagtatcagactttgccggacggacacatgccggctatgaggatggaccgcggagtgtcaatgcctaacatgctagagcccaagatctttccttatgagatgctgatggtgacaaatcgcggaagaaataagatactaagagaagtggaccgaacccgtctggaacggcacttggcacccgaggtttttagggaaatttttggcatgtcaatacaagagttcgaccgcctcccgctctggaggcgcaacgatatgaaaaaaaaagctaaactgttctag

SEQ ID NO: 335679 - DNA, 2623 bp, Artificial Sequence
  derived and/or modified sequence
atgccaagatgcctgccttccttggtctaaagtgtctggggaaattgtgcagctctgagaaaagcaaagtcacctcatctgagagaaccagtgccaggggctcgaacagaaagagactgattgttgaggaccggagggtctctgggacctccttcaccgctcataggcgtgccactatcactcatttgctgtatctctgtcccaaggactactgcccacgtgggcgtgtatgtaacagcgttgatccttttgtggcccaccctcaggaccctcaccacccatcagagaagcctgtcattcactgccataaatgtggggagccttgcaagggtgaagtgcttcgggtccagaccaaacatttccacatcaagtgtttcacctgcaaagtgtgtggctgtgacctggcacaagggggcttcttcataaagaacggagagtatctctgcaccctggactaccagcggatgtacgggacacgctgccatggctgtggggagttcgtggagggcgaagtggtgactgctctgggcaagacctaccatcccaattgctttgcttgtactatctgcaagcgcccgtttccacccggagaccgagtcacattcaatgggagagactgcctttgtcaactctgtgcacagccgatgtcgtccagtccgaaagaaaccaccttctccagcaattgtgccggctgcggaagagatatcaagaatgggcaggcgctgctggcgctggataagcagtggcacttggggtgctttaaatgcaagtcctgcgggaaggtcctcaccggggagtacatcagcaaggatggtgctccgtactgtgaaaaggactaccagggactctttggggtgaaatgtgaggcgtgtcaccagtttatcacagggaaagtcctggaggcaggtgacaaacattaccaccccagctgtgcacgatgcagcagatgcaaccagatgttcacagaaggagaggaaatgtatcttcaaggctccaccgtttggcatcccgactgtaagcaatctacgaagaccgaggaaaagctgcggctgccaaacattcggcgttcttcatccgatttcttttattccaaaagtctgattcgacgcacaggacggtctccgtctctgcagcctaccaggacatcctcggaaagtatttattctaggccaggctccagtattcctggctcaccaggtcatactatctatgcaaaagtagacaatgagatcctggattacaaggatttagcagccattccgaaggtcaaggcaatttatgacattgaacgtccagatcttattacctatgagcctttctacacttcgggctatgatgacaaacaggagagacagagccttggagagtctccgaggactttgtctcctactccatcagcagaagggtaccaggatgttcgggatcggatgatccatcggtccacgagccagggctccatcaactcccctgtgtacagccgccacagctacactccaaccacgtcccgctctccccagcatttccacagacctgagcttttgtctcctggtgtgcagaggttgtcgtacctgcgcaccagcagcctcagccccacccacagcgactcccgccccaacccccctttccgacaccacttcattccccatatcaaaggcaatgagccgtccagcggccggaactcccctctcccttaccggccagacagccgccctctaactccaacttacgctcaggcccctaaacatttccatgttccagatcaaggaatcaacatttaccgaaagccacccatctacaaacagcatgctgccttggcagcccagagcaagtcctcagaagatatcatcaagttttccaagttcccagcagcccaggcaccagaccccagcgagacaccaaagattgagacggaccactggcctggtcccccctcatttgctgtcgtaggacctgacatgaaacgcagatctagtggcagagaggaagatgatgaggaacttctgagacgtcggcagcttcaagaagagcaattaatgaagcttaactcaggcctgggacagttgatcttgaaagaagagatggagaaagagagccgggaaaggtcatctctgttagccagtcgctacgattctcccatcaactcagcttcacatattccatcatctaaaactgcatctctccctggctatggaagaaatgggcttcaccggcctgtttctaccgacttcgctcagtataacagctatggggatgtcagcgggggagtgcgagattaccagacactcccagatggccacatgcctgcaatgagaatggaccgaggagtgtctatgcccaacatgttggaaccaaagatatttccatatgaaatgctcatggtgaccaacagagggcgaaacaaaatcctcagagaggtggacagaaccaggctggagcgccacttagcccctgaagtgtttcgggaaatctttggaatgtccatacaggagtttgacaggttacctctttggagacgcaacgacatgaagaaaaaagcaaaactcttctaagtcccactcgtgaatggcaattagagaaaggactgacagtggcggtgccccataggatgtcatattgaggccca

SEQ ID NO: 335680 - DNA, 2541 bp, Artificial Sequence
  derived and/or modified sequence
atgcccgccttcctgggcctgaagtgcctgggcaagctgtgcagcagcgagaagagcaaggtgaccagcagcgagagaaccagcgccagaggcagcaacagaaagagactgatcgtggaggacagaagagtgagcggcaccagcttcaccgcccacagaagagccaccatcacccacctgctgtacctgtgccccaaggactactgccccagaggcagagtgtgcaacagcgtggaccccttcgtggcccacccccaggacccccaccaccccagcgagaagcccgtgatccactgccacaagtgcggcgagccctgcaagggcgaggtgctgagagtgcagaccaagcacttccacatcaagtgcttcacctgcaaggtgtgcggctgcgacctggcccagggcggcttcttcatcaagaacggcgagtacctgtgcaccctggactaccagagaatgtacggcaccagatgccacggctgcggcgagttcgtggagggcgaggtggtgaccgccctgggcaagacctaccaccccaactgcttcgcctgcaccatctgcaagagacccttcccccccggcgacagagtgaccttcaacggcagagactgcctgtgccagctgtgcgcccagcccatgagcagcagccccaaggagaccaccttcagcagcaactgcgccggctgcggcagagacatcaagaacggccaggccctgctggccctggacaagcagtggcacctgggctgcttcaagtgcaagagctgcggcaaggtgctgaccggcgagtacatcagcaaggacggcgccccctactgcgagaaggactaccagggcctgttcggcgtgaagtgcgaggcctgccaccagttcatcaccggcaaggtgctggaggccggcgacaagcactaccaccccagctgcgccagatgcagcagatgcaaccagatgttcaccgagggcgaggagatgtacctgcagggcagcaccgtgtggcaccccgactgcaagcagagcaccaagaccgaggagaagctgagactgcccaacatcagaagaagcagcagcgacttcttctacagcaagagcctgatcagaagaaccggcagaagccccagcctgcagcccaccagaaccagcagcgagagcatctacagcagacccggcagcagcatccccggcagccccggccacaccatctacgccaaggtggacaacgagatcctggactacaaggacctggccgccatccccaaggtgaaggccatctacgacatcgagagacccgacctgatcacctacgagcccttctacaccagcggctacgacgacaagcaggagagacagagcctgggcgagagccccagaaccctgagccccacccccagcgccgagggctaccaggacgtgagagacagaatgatccacagaagcaccagccagggcagcatcaacagccccgtgtacagcagacacagctacacccccaccaccagcagaagcccccagcacttccacagacccgagctgctgagccccggcgtgcagagactgagctacctgagaaccagcagcctgagccccacccacagcgacagcagacccaacccccccttcagacaccacttcatcccccacatcaagggcaacgagcccagcagcggcagaaacagccccctgccctacagacccgacagcagacccctgacccccacctacgcccaggcccccaagcacttccacgtgcccgaccagggcatcaacatctacagaaagccccccatctacaagcagcacgccgccctggccgcccagagcaagagcagcgaggacatcatcaagttcagcaagttccccgccgcccaggcccccgaccccagcgagacccccaagatcgagaccgaccactggcccggcccccccagcttcgccgtggtgggccccgacatgaagagaagaagcagcggcagagaggaggacgacgaggagctgctgagaagaagacagctgcaggaggagcagctgatgaagctgaacagcggcctgggccagctgatcctgaaggaggagatggagaaggagagcagagagagaagcagcctgctggccagcagatacgacagccccatcaacagcgccagccacatccccagcagcaagaccgccagcctgcccggctacggcagaaacggcctgcacagacccgtgagcaccgacttcgcccagtacaacagctacggcgacgtgagcggcggcgtgagagactaccagaccctgcccgacggccacatgcccgccatgagaatggacagaggcgtgagcatgcccaacatgctggagcccaagatcttcccctacgagatgctgatggtgaccaacagaggcagaaacaagatcctgagagaggtggacagaaccagactggagagacacctggcccccgaggtgttcagagagatcttcggcatgagcatccaggagttcgacagactgcccctgtggagaagaaacgacatgaagaagaaggccaagctgttctag

SEQ ID NO: 335681 - DNA, 2109 bp, Artificial Sequence
  derived and/or modified sequence
atggtgcccgaccccgtggcccacccccaggacccccaccaccccagcgagaagcccgtgatccactgccacaagtgcggcgagccctgcaagggcgaggtgctgagagtgcagaccaagcacttccacatcaagtgcttcacctgcaaggtgtgcggctgcgacctggcccagggcggcttcttcatcaagaacggcgagtacctgtgcaccctggactaccagagaatgtacggcaccagatgccacggctgcggcgagttcgtggagggcgaggtggtgaccgccctgggcaagacctaccaccccaactgcttcgcctgcaccatctgcaagagacccttcccccccggcgacagagtgaccttcaacggcagagactgcctgtgccagctgtgcgcccagcccatgagcagcagccccaaggagaccaccttcagcagcaactgcgccggctgcggcagagacatcaagaacggccaggccctgctggccctggacaagcagtggcacctgggctgcttcaagtgcaagagctgcggcaaggtgctgaccggcgagtacatcagcaaggacggcgccccctactgcgagaaggactaccagggcctgttcggcgtgaagtgcgaggcctgccaccagttcatcaccggcaaggtgctggaggccggcgacaagcactaccaccccagctgcgccagatgcagcagatgcaaccagatgttcaccgagggcgaggagatgtacctgcagggcagcaccgtgtggcaccccgactgcaagcagagcaccaagaccgaggagaagctgagacccaccagaaccagcagcgagagcatctacagcagacccggcagcagcatccccggcagccccggccacaccatctacgccaaggtggacaacgagatcctggactacaaggacctggccgccatccccaaggtgaaggccatctacgacatcgagagacccgacctgatcacctacgagcccttctacaccagcggctacgacgacaagcaggagagacagagcctgggcgagagccccagaaccctgagccccacccccagcgccgagggctaccaggacgtgagagacagaatgatccacagaagcaccagccagggcagcatcaacagccccgtgtacagcagacacagctacacccccaccaccagcagaagcccccagcacttccacagacccggcaacgagcccagcagcggcagaaacagccccctgccctacagacccgacagcagacccctgacccccacctacgcccaggcccccaagcacttccacgtgcccgaccagggcatcaacatctacagaaagccccccatctacaagcagcacgccgccctggccgcccagagcaagagcagcgaggacatcatcaagttcagcaagttccccgccgcccaggcccccgaccccagcgagacccccaagatcgagaccgaccactggcccggcccccccagcttcgccgtggtgggccccgacatgaagagaagaagcagcggcagagaggaggacgacgaggagctgctgagaagaagacagctgcaggaggagcagctgatgaagctgaacagcggcctgggccagctgatcctgaaggaggagatggagaaggagagcagagagagaagcagcctgctggccagcagatacgacagccccatcaacagcgccagccacatccccagcagcaagaccgccagcctgcccggctacggcagaaacggcctgcacagacccgtgagcaccgacttcgcccagtacaacagctacggcgacgtgagcggcggcgtgagagagtaccagaccctgcccgacggccacatgcccgccatgagaatggacagaggcgtgagcatgcccaacatgctggagcccaagatcttcccctacgagatgctgatggtgaccaacagaggcagaaacaagatcctgagagaggtggacagaaccagactggagagacacctggcccccgaggtgttcagagagatcttcggcatgagcatccaggagttcgacagactgcccctgtggagaagaaacgacatgaagaagaaggccaagctgttctag

SEQ ID NO: 335682 - DNA, 2109 bp, Artificial Sequence
  derived and/or modified sequence
atggtcccagatcccgtggcccatccacaagacccgcatcatccttctgagaagcccgttattcactgccacaagtgtggcgagccttgcaagggcgaagtactgagggtacagactaaacactttcatatcaagtgtttcacttgtaaagtttgtggctgcgatttggcccagggaggattctttatcaaaaacggagagtatctctgcacattagattatcagcgcatgtacggaaccaggtgccacggctgcggtgaattcgttgaaggggaggtcgtgactgctttgggcaaaacgtatcatcctaactgtttcgcatgcaccatctgcaaacggccttttcccccaggggacagagtcacattcaacgggagagactgtctttgtcagttatgtgcacagcccatgtctagcagtccaaaagagacaaccttcagctcaaactgtgccggatgcggccgcgatataaaaaatggccaggcactgctggcactggacaaacaatggcacttaggatgtttcaagtgtaagtcttgtggtaaagttcttacaggggaatatatctccaaggatggcgctccatactgtgagaaggattaccaaggtttgttcggagtgaagtgcgaggcttgccaccaattcatcacaggtaaggtgctagaggccggggacaaacactaccatccttcgtgcgcaaggtgctctagatgcaaccaaatgtttaccgaaggcgaggagatgtaccttcagggctccaccgtttggcatccagactgtaagcaaagcaccaaaactgaggagaagctgcgacctacccgtacttcatccgagagcatttacagcagacctggcagctcaatccccggtagtccaggacacaccatctatgctaaggtggacaacgagatactggactacaaggatttggccgccatcccaaaggtgaaagctatttatgatattgagcgccctgacctgatcacatacgaaccattttatacgagtggatacgatgataaacaggaaagacagagtctgggggagtcccccaggactctgagtcccacacctagtgctgagggctatcaggacgtgcgtgaccgaatgatccaccgctccacgtctcagggtagcattaattccccagtgtatagccgccacagttatacacccactacaagccgttctccacaacattttcaccgcccaggaaacgagcctagttccgggagaaattcccccctgccttataggcctgattcccgccctctgacaccaacatatgcgcaggctcctaaacatttccatgttccggaccaaggcataaacatctatcgtaagccacccatctataaacagcacgctgccctcgccgcccagtcgaagtcttccgaggatatcataaagttctccaaatttcccgctgctcaggcacctgatccatcagaaacccccaaaatagagactgaccactggcctggaccaccttcttttgcagtcgtgggacccgatatgaaacgccggtctagtggtagggaggaagacgatgaggagcttttgcggcggaggcaactacaggaagagcaactcatgaaattaaactccggcctcggacagttaattctgaaagaggagatggaaaaagagagtcgcgaaaggtcctcccttttggctagccgatatgattccccgataaattcagcttcacacataccaagttcaaaaactgcgagtctgccaggttacggacgaaacggactgcaccgcccggttagcactgactttgcacaatataattcttacggcgacgtgtctggtggtgtcagggagtaccagacacttcctgacggccacatgcccgctatgaggatggatcggggtgtgtccatgccaaatatgctcgaacccaaaatttttccttatgaaatgttaatggtgacaaacagagggcgcaacaagatcctgagggaggtcgatagaacccggctggaaagacatctcgcacctgaagtgttcagggaaattttcggcatgtcgatacaggaattcgatcgattaccactatggagacgtaacgacatgaagaaaaaggctaaactcttctag

SEQ ID NO: 335683 - DNA, 7256 bp, Artificial Sequence
  derived and/or modified sequence
atggtgccagaccctgtggcccaccctcaggaccctcaccacccatcagagaagcctgtcattcactgccataaatgtggggagccttgcaagggtgaagtgcttcgggtccagaccaaacatttccacatcaagtgtttcacctgcaaagtgtgtggctgtgacctggcacaagggggcttcttcataaagaacggagagtatctctgcaccctggactaccagcggatgtacgggacacgctgccatggctgtggggagttcgtggagggcgaagtggtgactgctctgggcaagacctaccatcccaattgctttgcttgtactatctgcaagcgcccgtttccacccggagaccgagtcacattcaatgggagagactgcctttgtcaactctgtgcacagccgatgtcgtccagtccgaaagaaaccaccttctccagcaattgtgccggctgcggaagagatatcaagaatgggcaggcgctgctggcgctggataagcagtggcacttggggtgctttaaatgcaagtcctgcgggaaggtcctcaccggggagtacatcagcaaggatggtgctccgtactgtgaaaaggactaccagggactctttggggtgaaatgtgaggcgtgtcaccagtttatcacagggaaagtcctggaggcaggtgacaaacattaccaccccagctgtgcacgatgcagcagatgcaaccagatgttcacagaaggagaggaaatgtatcttcaaggctccaccgtttggcatcccgactgtaagcaatctacgaagaccgaggaaaagctgcggcctaccaggacatcctcggaaagtatttattctaggccaggctccagtattcctggctcaccaggtcatactatctatgcaaaagtagacaatgagatcctggattacaaggatttagcagccattccgaaggtcaaggcaatttatgacattgaacgtccagatcttattacctatgagcctttctacacttcgggctatgatgacaaacaggagagacagagccttggagagtctccgaggactttgtctcctactccatcagcagaagggtaccaggatgttcgggatcggatgatccatcggtccacgagccagggctccatcaactcccctgtgtacagccgccacagctacactccaaccacgtcccgctctccccagcatttccacagacctggcaatgagccgtccagcggccggaactcccctctcccttaccggccagacagccgccctctaactccaacttacgctcaggcccctaaacatttccatgttccagatcaaggaatcaacatttaccgaaagccacccatctacaaacagcatgctgccttggcagcccagagcaagtcctcagaagatatcatcaagttttccaagttcccagcagcccaggcaccagaccccagcgagacaccaaagattgagacggaccactggcctggtcccccctcatttgctgtcgtaggacctgacatgaaacgcagatctagtggcagagaggaagatgatgaggaacttctgagacgtcggcagcttcaagaagagcaattaatgaagcttaactcaggcctgggacagttgatcttgaaagaagagatggagaaagagagccgggaaaggtcatctctgttagccagtcgctacgattctcccatcaactcagcttcacatattccatcatctaaaactgcatctctccctggctatggaagaaatgggcttcaccggcctgtttctaccgacttcgctcagtataacagctatggggatgtcagcgggggagtgcgagaatatcagacactcccagatggccacatgcctgcaatgagaatggaccgaggagtgtctatgcccaacatgttggaaccaaagatatttccatatgaaatgctcatggtgaccaacagagggcgaaacaaaatcctcagagaggtggacagaaccaggctggagcgccacttagcccctgaagtgtttcgggaaatctttggaatgtccatacaggagtttgacaggttacctctttggagacgcaacgacatgaagaaaaaagcaaaactcttctaagtcccactcgtgaatggcaattagagaaaggactgacagtggcggtgccccataggatgtcatattgaggcccaaacttgattggagaatttgcaaactaccgtcgctcagcaacaccaaaaagagaaagtctggttaaaacaccatgagtcaaatgtcgggccagccaacagtaacacttgccaagaagcatggcgtagaaatttctatgttccgaaacacagagtagtgtccacatgtgagcttttcacattaccttatgtatacaacaggagctgcgttgttttcttctttttcttttcctttatctgttgtccaacaacagtgctgactgtccggataagagctggcaagtgcccttaggatgccgcatgggaaaaatcggttatcataatttcaaagtataaatatatttattaagtagcgctgcggctaagaaggaagagtgaggggtctgtccatggggtggcagtgatttcacacccgcctttcttgaatggcttcgtgttactcagccgtgccctggcaggaatggaactccatcagggaacagggcagctctgtttgaatggggtgaaaaacagcaaaattaattcttagcaagctccttgttctctactgttcaccgggacctggctggcaaatgacttagctattagtatatttaaaaactgttcaaaagcaaaagagaaggaacaggaatgaaaggaaaccttcccttaactctttctgcttcccatagcaggtctggttcctgctccccgcctaggacaggagctgtctggagctccacctttgcaaagaaaggaaaaacacaaattgcccccagattggcccagtggcatgccattaggtgattttgcataggggccatatcattcatggccaaaaaaaaccaaaaagcaaaaaacaaaaacaagtcccatgtcctactgactctagttcttccagtcgttatcctctgctgtctctctggcatcctatgaatcagatcaagcccatgctgttgttggtttttaaggtttctttcaataataggctaaggaaagacatgtttttctcttttaaatctctgcaactccaaagtagactccttcgaacgtatttaatttggccttttcagctttcttcttgcccagctctgtcgaattcatgggtgtgtgtgcacatgttggtttcactcacccagagtaattttgtgagcatgcatgtgctttttaatttctgcttgaatgtttgtcctgctgtgttgcagcttctaaagacattgtcaccgagtgtgtgtgactcaaagatcaagagtgaggctaaactgcgaccccaacatcacttccttcatggaaaggtgttggcgctgatgtagctcatggaaggatcagactgggaaccacagaggaaggatgaggtgggatgtggaggtcagagcatctcacgagagtccctcaggctctgcaacactagattcgaatatgagcctagggtttccccaacacgtgcgtgcatatgaaaccacatcatgattcccgacgtgagttagatgagggagagtttgtgtaactccacacccaggagggtaagccactttattatcatgctttggggctgtgcttaagaatttaagctctgttttaaagccgaagaagaaaacatttgaatttaccttcatatgccactaagaacaaaagctctgaagttcttcctgctggcaccaaatattaggattacaagctgtctctctgacaccagtggtaaaaaagcaagtagaatagtttctgagtctgtgttgcagcctctgacacgtggctcaccgctgtcatttgggggatggaatgaacagtcactgttctatagcatcctcctgtgctcttacctaaggaatctaaattgtcctagccttccattgctatgcactgaatgaggactactctcgtgtgtgtgtgtgtgtgtgtgtgtgtgtgtgtgtgtgtgtgtgtgtgtgttggatctactaacatgtttagcaaatggctctgacagggtggccatgagcagatgagaccagctcttgcttggttggaagccacactgcagtttgcagtttagcctttggtgtctcagtggcttcttgcttattccatgctttttctatcccatcctctctctgtgccctcctgcaatggcagccttggcacaatgcctgggtgtcctcatccttgctttactctggaaagtgtggggatggagaggatggtgcatttccagtgcttccttacctgtcaataacaatggtggccacctgggtcccagcacttggctggtggagagatttttttcattatggagctaataaagggtccctacgttttacattgattaatgaattatcacccagacatgtgcagatgaaatgtcaatataagaaaaatcaaggtatttgggaaacatgggcataatcaggtagttttgctaaaattcctcttccttggtctacataaagaagacatgggtctgtcatagaatggggacattagactgaaaactgggacaacccccttccttattttatagagactaggagttaaggggcctgcctaagattgcagtgataaagaactgaaccctaaatcagctcccactaatgaaaccctgctttccttgtatcttttaaactcagttctgcatccaacttgagaagaaaaaaagcttctttccatatcaagtaccatatgagttcatttaaactgcaccttgcagaaatgcattgccagaaagcaccagtagcctcctatctgcaagcagagtagtgctctgctctggggaggggtcattggaaaccataatgcagagtgggccccctactccatttcccagcaaaaggctccagctggagggatgggttgtggggcaacctggttcctgctaactgccagattgaatgtgtgggctagaatgcctgcacatttagttaaactgggctcagcatgcttgtcctcaaaatgtccatcctggtcacagcacacaagatggctattggtctgcttttaccctaccctgtactatacatgaaaattccagttattaacacactcaaactggtggagcttgttcaccctaggaaggggattgtatatatggcaggcttccctggtgccgatgtaaagggctacatttgggaacatttgacttccttgggactcttaagtgcataatgatggcatgaagtaaaaggggcctcaatgatgataggaaaatcagttcttttaaaatttcttcaagaaaatccaggctatcacatagtctttctgtgtgacttattaggagataggaagagcattgggaaacttgcacagctagctatgcatctacattttggtttggggttagttatgaaatgttcttaatatgacgtgttcaataacttcacataaacttcctgttctccaaaacctcaaagagatagagttaatgagttgttgtttttttttaaatgggggtagttttctatctgtcatgggctctagcatctactccgctacccaattctgtcatctccaagctgagtttcctcttctgaggcagaggctggagcagttctttttcagttctcatcctctccatcccaatccagtatatcaatcaactctaactcggagacgtctagctggcaatgtttctaaaactttcactggatttctttagacattgaagcaaacatttttttctaagaattgcttctcagatgatgatatcaaatgtatatgcttttgcaagtttgaaaagttcaaattaaccacttttgactaggtaagtctttctaaaaaccatttaaagctaactgggtcttagcatcctcctgtgtatggaagagacaggtgaccgctccaggttgggtgctcacagaacccttttcctgactctcatggaagatggtggaaggaaaatagactgtctcatcaaccctcctgtgtcctctgaagcaatctcagtttttattaaccacctcttctgtgtttctggtagctatttaacctgtatttaatctgtacttcctatgccagcctcaattttatttgatttttacaattattctcttctaaccaatgaagtgtttgtcagtatgccccaaagcttgctcttttgtgctcccttttgaataactttctatccagaaaaagagattatttgggacttgagatttgcagtgataccaacttatagcaatgatgtactttaagggaactacccaactatgttgtgatagaagaaagagaaaccttcactttggcatttttttttaatcactgtttatttttctgtttgcggcccaggaagcagtgggaggtggtggcagatatgctttgcatatggattgttatgtttttatttgggcaagtttaatcatggaaaactcaaaaagaaggggggaaatggtcagtttaagccaaaagaaactttctaaacaatgtataggtacacagcaaaattaaacaaatccaacaatttctgaagcttagtgtaattgagtggtggttgttattcaataaaattattcccaaaagtgtttctcctaagagtgcagttcccatgagtcacttcctgaacccattgaccaaaggtggacagagacaatcctgtagaccttgacattcagaaagatgtgagctgcttactgatcatatatgcatacgtttctttacagcagaggaaaccattgtccacaaaactgatgttcttttggggttttatgtacagacttgtccaatcatgtgtgtggttcctgcgagttgctgatgactccgcattgaagctctctgagttctttgattttaagttgggtttatggaattttttcaaatgttggaaggtgtgtggttcttcctgccctccctccccttttggaaatatgaaagcaaatgtttagaagaattccttttgaaaagctgtgtcgtgttccctgtgaaactgagcaggtgtgtgttggcgcgctaagtgccacatgcttgtgtgtagaggaggaggtggccctgccggctccgcgctgctgtgcctgtgatccctacctgctccccgctcctgttgccagcagcactcactgcactcctttgtcatatactctgcatcactgtcatactcacaacttcgtgaataaagttgtgtgctttattcgt

SEQ ID NO: 335684 - DNA, 2109 bp, Artificial Sequence
  derived and/or modified sequence
atggtgcctgaccctgtggcccacccccaggacccccaccaccccagcgagaagcctgtgatccactgccacaagtgtggggagccctgcaagggggaggtgctgcgggtgcagaccaagcacttccacatcaagtgcttcacctgcaaggtgtgtggctgtgacctggcccagggcggcttcttcatcaagaatggagagtacctgtgcaccctggactaccagaggatgtatggcacccgctgccacggctgtggggagtttgtggagggggaggtggtgacagccctgggcaagacctaccaccccaactgctttgcctgcaccatctgcaagaggcccttccccccaggggacagagtgaccttcaacggccgggactgcctgtgccagctgtgtgcccagcccatgagcagcagccccaaggagaccaccttcagcagcaactgtgccggctgcggccgggacatcaagaatggccaggccctgctggccctggacaagcagtggcacctgggctgcttcaagtgcaagagctgtgggaaggtgctgactggagagtacatcagcaaggatggagccccctactgtgagaaggactaccagggcctgtttggagtgaagtgtgaggcctgccaccagttcatcaccgggaaggtgctggaggccggggacaagcactaccaccccagctgtgcccgctgcagccgctgcaaccagatgttcacagaaggagaggagatgtacctgcagggcagcacagtgtggcacccagactgcaagcagagcaccaagacagaggagaagctgcggcccaccaggaccagcagcgagagcatctacagccggcccggcagcagcatccctggcagccctggccacaccatctatgccaaggtggacaatgagatcctggactacaaggacctggccgccatccccaaggtgaaggccatctatgacatcgagaggccagacctgatcacctatgagcccttctacaccagcggctatgatgacaagcaggagcggcagagcctgggggagagccccaggaccctgagccccaccccatctgctgagggctaccaggatgtgcgggacaggatgatccacaggagcaccagccagggcagcatcaacagccctgtgtacagccgccacagctacacccccaccaccagccgcagcccccagcacttccacaggcctggaaatgagcccagcagcggcaggaacagccccctgccctacagaccagacagccggcccctgacccccacctacgcccaggcccccaagcacttccacgtgcctgaccagggcatcaacatctacaggaagccacccatctacaagcagcacgccgccctggccgcccagagcaagagcagcgaggacatcatcaagttcagcaagtttcctgctgcccaggccccagaccccagcgagacccccaagattgaaacagaccactggccaggcccccccagctttgctgtggtgggccctgacatgaagaggaggagcagcggccgggaggaggatgatgaggagctgctgcggcggcggcagctgcaggaggagcagctgatgaagctgaacagcggcctgggccagctgatcctgaaggaggagatggagaaggagagccgggagaggagcagcctgctggccagccgctatgacagccccatcaacagcgccagccacatccccagcagcaagacagccagcctgcccggctatggaagaaatggcctgcacaggcctgtgtccacagactttgcccagtacaacagctatggagatgtgtctgggggcgtgcgggagtaccagaccctgcctgatggccacatgcctgccatgaggatggaccggggcgtgtccatgcccaacatgctggagcccaagatcttcccctatgagatgctgatggtgaccaacagaggaagaaacaagatcctgcgggaggtggacaggacccggctggagcggcacctggcccctgaggtgttccgggagatcttcggcatgagcatccaggagtttgaccggctgcccctgtggaggagaaatgacatgaagaagaaggccaagctgttctag

SEQ ID NO: 335685 - DNA, 2109 bp, Artificial Sequence
  derived and/or modified sequence
atggtgcccgaccccgtggcccacccccaggacccccaccacccctcagagaagccagtgattcattgccacaagtgtggcgaaccctgtaaaggagaagtcctccgggttcagactaaacatttccatattaagtgctttacttgcaaggtgtgcgggtgtgatctggctcagggaggattcttcatcaaaaatggagagtatctgtgcaccctggattatcagcggatgtacgggaccaggtgccacggatgcggtgagttcgtggaaggcgaggtcgtgactgctctcgggaagacttatcatccgaactgctttgcttgcaccatttgtaaaagacccttccctcccggcgaccgcgtcacctttaatgggcgggactgtttatgccagctttgcgcccaacccatgagttcttcacccaaagagaccacgtttagctctaattgtgcagggtgtggacgcgacatcaagaacggacaagctttgttagctttagataagcaatggcatctggggtgtttcaaatgcaaaagctgtgggaaagtgttaaccggtgagtacatttccaaagacggcgccccttattgcgagaaagactatcaagggctgtttggcgtgaagtgcgaggcttgccatcaattcatcaccggaaaagtgctcgaagcaggggacaagcattaccatccaagctgtgcccgttgcagtaggtgcaaccagatgttcacagaaggcgaagaaatgtacctgcagggctcgaccgtttggcatcccgactgtaaacaatccactaaaacagaagagaaactcagaccgactcgcacgtccagtgagtcgatctatagcagacctggatcaagcatacccggctccccggggcacacaatttatgctaaagtcgataacgagatactcgattataaagatttggccgctatacctaaggtgaaagcaatctacgatatcgagcgccctgacctgatcacctacgagcccttctacacctcggggtacgacgacaagcaagagcggcagtctttgggagagtccccccgcaccttgagccccaccccgtccgcagagggttatcaagacgtgcgtgacagaatgattcaccggtctacaagtcagggtagcattaatagcccggtctactccagacattcctacactccgacaacatcacgctcaccacagcactttcatcgacccgggaacgagccaagtagtggacgcaactctccactcccatataggccggattccagacctttgacacctacatatgcacaagcacctaaacacttccatgtacccgatcagggcatcaatatttaccggaaaccaccgatctacaagcaacacgctgccctggccgcccagagtaagagtagtgaagacatcataaaattttctaagttccctgccgctcaggcacccgaccctagtgaaacccccaagattgagaccgaccattggcctggccctcctagttttgccgtcgtggggcctgacatgaaaagacggtctagcgggcgcgaggaagatgacgaggagctccttagacggagacagctccaggaagaacaattgatgaagcttaattccggcctgggccagctgattctaaaagaggaaatggaaaaagagtcacgtgagagaagcagtttgctcgcaagtcggtacgactctccgatcaacagtgcctcacatatcccaagcagcaagactgcctctctacctggttatggcagaaatgggcttcatagaccggtgtctactgatttcgcacaatacaactcatacggcgatgtgtctggaggagtgagagaataccagaccttgccagatggacatatgccagccatgcgtatggacagaggggtgtctatgcctaacatgttagagcccaaaatattcccatacgaaatgctgatggtgacaaatcgggggaggaacaaaatcctaagagaggtcgatagaacacgcctagaacgacaccttgcccccgaggtttttagagaaatcttcggtatgtccatccaggagttcgatcgactaccactgtggcgccgcaacgacatgaaaaaaaaagctaaactcttctag

SEQ ID NO: 335686 - DNA, 2109 bp, Artificial Sequence
  derived and/or modified sequence
atggtaccggacccagtggctcatcctcaggatccgcaccatcctagtgaaaaacccgtgattcactgccacaagtgtggtgaaccatgtaaaggcgaagtactccgggttcagaccaaacactttcacatcaaatgcttcacatgtaaggtgtgtggatgcgatctagctcagggcggattttttatcaaaaacggagaatacctgtgtaccctggactatcagagaatgtacggcacgcggtgtcacggctgtggcgagttcgtggaaggtgaagtcgtgaccgctctgggaaaaacttatcaccccaattgtttcgcctgcacaatttgcaaacgaccattcccccctggagaccgagtgaccttcaatggaagagattgtttgtgccagctctgtgctcagcccatgtcgtcgagtcccaaggagactacctttagttcgaattgcgccggatgcgggcgagacataaagaacggccaggccctgctggctttggacaagcaatggcatctcggctgctttaagtgcaagtcttgcggtaaagtcctgaccggagagtatattagcaaagatggggctccttattgtgagaaagattaccaggggttattcggggtgaaatgcgaagcctgccatcagttcattaccggcaaggtgctcgaggctggagataagcactaccacccctcctgcgcccgttgttcacgctgcaatcaaatgtttacagagggggaagaaatgtatcttcaaggtagtaccgtgtggcaccccgactgcaagcagtccaccaagaccgaggaaaagcttcgaccaacaagaacgagcagcgaaagtatttattctcggcctggaagcagtatcccaggttcacccggacacacaatatatgccaaagttgataacgagatcttagattacaaggacctggccgctattcctaaagtgaaggctatttacgatattgagcgtccagacctgatcacctatgaacccttctataccagtggatatgatgataagcaggagcgacagtcactgggcgaatcccctaggacactgagccccacccccagcgctgaggggtatcaggacgtacgggatcgaatgatccacagatccacatctcagggctccattaactcacccgtgtatagccggcatagttacacccctacgaccagtagatcacctcagcactttcaccgcccagggaatgagccatccagcggaaggaatagccctctgccatatagaccagattccagacccctaactcctacatacgctcaagcacctaaacacttccatgtccctgaccaaggcattaatatttacagaaagcccccaatatacaagcagcacgcagcccttgctgctcagtctaaatccagtgaagacataatcaagttttctaagttcccggctgctcaggctcccgatccaagtgaaacacccaaaatagaaacagaccattggcccggtcccccttctttcgccgttgtcggcccagatatgaaaaggcgctcttctgggagggaagaggacgacgaagaacttctgaggcgtcgacaactccaggaagagcagctcatgaagcttaattccggcctgggtcaattaatcctcaaggaggaaatggagaaggagagtagagaaaggagctccctgctcgcttcacggtacgactctcctatcaactcagcgtcccatattccttcaagcaagaccgcctcccttcccggatacggcaggaacggtctgcaccgccctgtctccactgattttgctcaatataattcttatggcgacgtgtctggcggagtccgggagtatcaaaccctgcccgacggacatatgcccgcaatgagaatggacagaggcgtgtccatgcctaacatgctggagccgaagatttttccatatgaaatgctcatggtcacaaaccgagggagaaacaagattctgagggaggttgaccgtacacgcctcgaaaggcatctagccccagaggtgttcagagaaatcttcggtatgagcatccaggaattcgatcgtttacccttatggagaaggaatgacatgaaaaaaaaggccaagctcttttag

SEQ ID NO: 335687 - protein, 401 aa, Artificial Sequence
  derived and/or modified sequence
MFTEGEEMYLQGSTVWHPDCKQSTKTEEKLRAKVDNEILDYKDLAAIPKVKAIYDIERPDLITYEPFYTSGYDDKQERQSLGESPRTLSPTPSAEGYQDVRDRMIHRSTSQGSINSPVYSRHSYTPTTSRSPQHFHRPDQGINIYRKPPIYKQHAALAAQSKSSEDIIKFSKFPAAQAPDPSETPKIETDHWPGPPSFAVVGPDMKRRSSGREEDDEELLRRRQLQEEQLMKLNSGLGQLILKEEMEKESRERSSLLASRYDSPINSASHIPSSKTASLPGYGRNGLHRPVSTDFAQYNSYGDVSGGVRDYQTLPDGHMPAMRMDRGVSMPNMLEPKIFPYEMLMVTNRGRNKILREVDRTRLERHLAPEVFREIFGMSIQEFDRLPLWRRNDMKKKAKLF

SEQ ID NO: 335688 - DNA, 6583 bp, Artificial Sequence
  derived and/or modified sequence
cgagcttcggagagaagcctgatatgtaacccaggcaggtgggagcctcagtctgtcgggctgaggtctggcatctacaaagcctcttggccgtgttctgaacttgaagcctggaggagttctctgctcagcacagccaaggaacagaattagaagaaaaggaaccctggcctgaggcaggtgacaaacattaccaccccagctgtgcacgatgcagcagatgcaaccagatgttcacagaaggagaggaaatgtatcttcaaggctccaccgtttggcatcccgactgtaagcaatctacgaagaccgaggaaaagctgcgggcaaaagtagacaatgagatcctggattacaaggatttagcagccattccgaaggtcaaggcaatttatgacattgaacgtccagatcttattacctatgagcctttctacacttcgggctatgatgacaaacaggagagacagagccttggagagtctccgaggactttgtctcctactccatcagcagaagggtaccaggatgttcgggatcggatgatccatcggtccacgagccagggctccatcaactcccctgtgtacagccgccacagctacactccaaccacgtcccgctctccccagcatttccacagacctgatcaaggaatcaacatttaccgaaagccacccatctacaaacagcatgctgccttggcagcccagagcaagtcctcagaagatatcatcaagttttccaagttcccagcagcccaggcaccagaccccagcgagacaccaaagattgagacggaccactggcctggtcccccctcatttgctgtcgtaggacctgacatgaaacgcagatctagtggcagagaggaagatgatgaggaacttctgagacgtcggcagcttcaagaagagcaattaatgaagcttaactcaggcctgggacagttgatcttgaaagaagagatggagaaagagagccgggaaaggtcatctctgttagccagtcgctacgattctcccatcaactcagcttcacatattccatcatctaaaactgcatctctccctggctatggaagaaatgggcttcaccggcctgtttctaccgacttcgctcagtataacagctatggggatgtcagcgggggagtgcgagattaccagacactcccagatggccacatgcctgcaatgagaatggaccgaggagtgtctatgcccaacatgttggaaccaaagatatttccatatgaaatgctcatggtgaccaacagagggcgaaacaaaatcctcagagaggtggacagaaccaggctggagcgccacttagcccctgaagtgtttcgggaaatctttggaatgtccatacaggagtttgacaggttacctctttggagacgcaacgacatgaagaaaaaagcaaaactcttctaagtcccactcgtgaatggcaattagagaaaggactgacagtggcggtgccccataggatgtcatattgaggcccaaacttgattggagaatttgcaaactaccgtcgctcagcaacaccaaaaagagaaagtctggttaaaacaccatgagtcaaatgtcgggccagccaacagtaacacttgccaagaagcatggcgtagaaatttctatgttccgaaacacagagtagtgtccacatgtgagcttttcacattaccttatgtatacaacaggagctgcgttgttttcttctttttcttttcctttatctgttgtccaacaacagtgctgactgtccggataagagctggcaagtgcccttaggatgccgcatgggaaaaatcggttatcataatttcaaagtataaatatatttattaagtagcgctgcggctaagaaggaagagtgaggggtctgtccatggggtggcagtgatttcacacccgcctttcttgaatggcttcgtgttactcagccgtgccctggcaggaatggaactccatcagggaacagggcagctctgtttgaatggggtgaaaaacagcaaaattaattcttagcaagctccttgttctctactgttcaccgggacctggctggcaaatgacttagctattagtatatttaaaaactgttcaaaagcaaaagagaaggaacaggaatgaaaggaaaccttcccttaactctttctgcttcccatagcaggtctggttcctgctccccgcctaggacaggagctgtctggagctccacctttgcaaagaaaggaaaaacacaaattgcccccagattggcccagtggcatgccattaggtgattttgcataggggccatatcattcatggccaaaaaaaaccaaaaagcaaaaaacaaaaacaagtcccatgtcctactgactctagttcttccagtcgttatcctctgctgtctctctggcatcctatgaatcagatcaagcccatgctgttgttggtttttaaggtttctttcaataataggctaaggaaagacatgtttttctcttttaaatctctgcaactccaaagtagactccttcgaacgtatttaatttggccttttcagctttcttcttgcccagctctgtcgaattcatgggtgtgtgtgcacatgttggtttcactcacccagagtaattttgtgagcatgcatgtgctttttaatttctgcttgaatgtttgtcctgctgtgttgcagcttctaaagacattgtcaccgagtgtgtgtgactcaaagatcaagagtgaggctaaactgcgaccccaacatcacttccttcatggaaaggtgttggcgctgatgtagctcatggaaggatcagactgggaaccacagaggaaggatgaggtgggatgtggaggtcagagcatctcacgagagtccctcaggctctgcaacactagattcgaatatgagcctagggtttccccaacacgtgcgtgcatatgaaaccacatcatgattcccgacgtgagttagatgagggagagtttgtgtaactccacacccaggagggtaagccactttattatcatgctttggggctgtgcttaagaatttaagctctgttttaaagccgaagaagaaaacatttgaatttaccttcatatgccactaagaacaaaagctctgaagttcttcctgctggcaccaaatattaggattacaagctgtctctctgacaccagtggtaaaaaagcaagtagaatagtttctgagtctgtgttgcagcctctgacacgtggctcaccgctgtcatttgggggatggaatgaacagtcactgttctatagcatcctcctgtgctcttacctaaggaatctaaattgtcctagccttccattgctatgcactgaatgaggactactctcgtgtgtgtgtgtgtgtgtgtgtgtgtgtgtgtgtgtgtgtgtgtgtgtgttggatctactaacatgtttagcaaatggctctgacagggtggccatgagcagatgagaccagctcttgcttggttggaagccacactgcagtttgcagtttagcctttggtgtctcagtggcttcttgcttattccatgctttttctatcccatcctctctctgtgccctcctgcaatggcagccttggcacaatgcctgggtgtcctcatccttgctttactctggaaagtgtggggatggagaggatggtgcatttccagtgcttccttacctgtcaataacaatggtggccacctgggtcccagcacttggctggtggagagatttttttcattatggagctaataaagggtccctacgttttacattgattaatgaattatcacccagacatgtgcagatgaaatgtcaatataagaaaaatcaaggtatttgggaaacatgggcataatcaggtagttttgctaaaattcctcttccttggtctacataaagaagacatgggtctgtcatagaatggggacattagactgaaaactgggacaacccccttccttattttatagagactaggagttaaggggcctgcctaagattgcagtgataaagaactgaaccctaaatcagctcccactaatgaaaccctgctttccttgtatcttttaaactcagttctgcatccaacttgagaagaaaaaaagcttctttccatatcaagtaccatatgagttcatttaaactgcaccttgcagaaatgcattgccagaaagcaccagtagcctcctatctgcaagcagagtagtgctctgctctggggaggggtcattggaaaccataatgcagagtgggccccctactccatttcccagcaaaaggctccagctggagggatgggttgtggggcaacctggttcctgctaactgccagattgaatgtgtgggctagaatgcctgcacatttagttaaactgggctcagcatgcttgtcctcaaaatgtccatcctggtcacagcacacaagatggctattggtctgcttttaccctaccctgtactatacatgaaaattccagttattaacacactcaaactggtggagcttgttcaccctaggaaggggattgtatatatggcaggcttccctggtgccgatgtaaagggctacatttgggaacatttgacttccttgggactcttaagtgcataatgatggcatgaagtaaaaggggcctcaatgatgataggaaaatcagttcttttaaaatttcttcaagaaaatccaggctatcacatagtctttctgtgtgacttattaggagataggaagagcattgggaaacttgcacagctagctatgcatctacattttggtttggggttagttatgaaatgttcttaatatgacgtgttcaataacttcacataaacttcctgttctccaaaacctcaaagagatagagttaatgagttgttgtttttttttaaatgggggtagttttctatctgtcatgggctctagcatctactccgctacccaattctgtcatctccaagctgagtttcctcttctgaggcagaggctggagcagttctttttcagttctcatcctctccatcccaatccagtatatcaatcaactctaactcggagacgtctagctggcaatgtttctaaaactttcactggatttctttagacattgaagcaaacatttttttctaagaattgcttctcagatgatgatatcaaatgtatatgcttttgcaagtttgaaaagttcaaattaaccacttttgactaggtaagtctttctaaaaaccatttaaagctaactgggtcttagcatcctcctgtgtatggaagagacaggtgaccgctccaggttgggtgctcacagaacccttttcctgactctcatggaagatggtggaaggaaaatagactgtctcatcaaccctcctgtgtcctctgaagcaatctcagtttttattaaccacctcttctgtgtttctggtagctatttaacctgtatttaatctgtacttcctatgccagcctcaattttatttgatttttacaattattctcttctaaccaatgaagtgtttgtcagtatgccccaaagcttgctcttttgtgctcccttttgaataactttctatccagaaaaagagattatttgggacttgagatttgcagtgataccaacttatagcaatgatgtactttaagggaactacccaactatgttgtgatagaagaaagagaaaccttcactttggcatttttttttaatcactgtttatttttctgtttgcggcccaggaagcagtgggaggtggtggcagatatgctttgcatatggattgttatgtttttatttgggcaagtttaatcatggaaaactcaaaaagaaggggggaaatggtcagtttaagccaaaagaaactttctaaacaatgtataggtacacagcaaaattaaacaaatccaacaatttctgaagcttagtgtaattgagtggtggttgttattcaataaaattattcccaaaagtgtttctcctaagagtgcagttcccatgagtcacttcctgaacccattgaccaaaggtggacagagacaatcctgtagaccttgacattcagaaagatgtgagctgcttactgatcatatatgcatacgtttctttacagcagaggaaaccattgtccacaaaactgatgttcttttggggttttatgtacagacttgtccaatcatgtgtgtggttcctgcgagttgctgatgactccgcattgaagctctctgagttctttgattttaagttgggtttatggaattttttcaaatgttggaaggtgtgtggttcttcctgccctccctccccttttggaaatatgaaagcaaatgtttagaagaattccttttgaaaagctgtgtcgtgttccctgtgaaactgagcaggtgtgtgttggcgcgctaagtgccacatgcttgtgtgtagaggaggaggtggccctgccggctccgcgctgctgtgcctgtgatccctacctgctccccgctcctgttgccagcagcactcactgcactcctttgtcatatactctgcatcactgtcatactcacaacttcgtgaataaagttgtgtgctttattcgt

SEQ ID NO: 335689 - DNA, 1747 bp, Artificial Sequence
  derived and/or modified sequence
gcacaaaccatcgcactttggccatagcaggtgacaaacattaccaccccagctgtgcacgatgcagcagatgcaaccagatgttcacagaaggagaggaaatgtatcttcaaggctccaccgtttggcatcccgactgtaagcaatctacgaagaccgaggaaaagctgcggctgccaaacattcggcgttcttcatccgatttcttttattccaaaagtctgattcgacgcacaggacggtctccgtctctgcagcctaccaggacatcctcggaaagtatttattctaggccaggctccagtattcctggctcaccaggtcatactatctatgcaaaagtagacaatgagatcctggattacaaggatttagcagccattccgaaggtcaaggcaatttatgacattgaacgtccagatcttattacctatgagcctttctacacttcgggctatgatgacaaacaggagagacagagccttggagagtctccgaggactttgtctcctactccatcagcagaagggtaccaggatgttcgggatcggatgatccatcggtccacgagccagggctccatcaactcccctgtgtacagccgccacagctacactccaaccacgtcccgctctccccagcatttccacagacctgagcttttgtctcctggtgtgcagaggttgtcgtacctgcgcaccagcagcctcagccccacccacagcgactcccgccccaacccccctttccgacaccacttcattccccatatcaaaggcaatgagccgtccagcggccggaactcccctctcccttaccggccagacagccgccctctaactccaacttacgctcaggcccctaaacatttccatgttccagatcaaggaatcaacatttaccgaaagccacccatctacaaacagcatgctgccttggcagcccagagcaagtcctcagaagatatcatcaagttttccaagttcccagcagcccaggcaccagaccccagcgagacaccaaagattgagacggaccactggcctggtcccccctcatttgctgtcgtaggacctgacatgaaacgcagatctagtggcagagaggaagatgatgaggaacttctgagacgtcggcagcttcaagaagagcaattaatgaagcttaactcaggcctgggacagttgatcttgaaagaagagatggagaaagagagccgggaaaggtcatctctgttagccagtcgctacgattctcccatcaactcagcttcacatattccatcatctaaaactgcatctctccctggctatggaagaaatgggcttcaccggcctgtttctaccgacttcgctcagtataacagctatggggatgtcagcgggggagtgcgagattaccagacactcccagatggccacatgcctgcaatgagaatggaccgaggagtgtctatgcccaacatgttggaaccaaagatatttccatatgaaatgctcatggtgaccaacagagggcgaaacaaaatcctcagagaggtggacagaaccaggctggagcgccacttagcccctgaagtgtttcgggaaatctttggaatgtccatacaggagtttgacaggttacctctttggagacgcaacgacatgaagaaaaaagcaaaactcttctaagtcccactcgtgaatggcaattagagaaaggactgacagtggcggtgccccataggatgtcatattgaggccca

SEQ ID NO: 335690 - protein, 173 aa, Artificial Sequence
  derived and/or modified sequence
MFTEGEEMYLQGSTVWHPDCKQSTKTEEKLRPTRTSSESIYSRPGSSIPGSPGHTIYAKVDNEILDYKDLAAIPKVKAIYDIERPDLITYEPFYTSGYDDKQERQSLGESPRTLSPTPSAEGYQDVRDRMIHRSTSQGSINSPVYSRHSYTPTTSRSPQHFHRPDQGINIYRK

SEQ ID NO: 335691 - DNA, 854 bp, Artificial Sequence
  derived and/or modified sequence
gaggcgtgagagagcgtgcctgcccgccgcacacggggctggtttccggagtgcgtctctagagggatgcacgttgccttagccgagcttcggagagaagcctgatatgtaacccaggcaggtgggagcctcagtctgtcgggctgaggtctggcatctacaaagcctcttggccgtgttctgaacttgaagcctggaggagttctctgctcagcacagccaaggaacagaattagaagaaaaggaaccctggcctgaggtaaagcggacattgcacaaggcaggtgacaaacattaccaccccagctgtgcacgatgcagcagatgcaaccagatgttcacagaaggagaggaaatgtatcttcaaggctccaccgtttggcatcccgactgtaagcaatctacgaagaccgaggaaaagctgcggcctaccaggacatcctcggaaagtatttattctaggccaggctccagtattcctggctcaccaggtcatactatctatgcaaaagtagacaatgagatcctggattacaaggatttagcagccattccgaaggtcaaggcaatttatgacattgaacgtccagatcttattacctatgagcctttctacacttcgggctatgatgacaaacaggagagacagagccttggagagtctccgaggactttgtctcctactccatcagcagaagggtaccaggatgttcgggatcggatgatccatcggtccacgagccagggctccatcaactcccctgtgtacagccgccacagctacactccaaccacgtcccgctctccccagcatttccacagacctgatcaaggaatcaacatttaccgaaagc

SEQ ID NO: 335692 - protein, 248 aa, Artificial Sequence
  derived and/or modified sequence
MSLFPSLPLLLLSMVAASYSETVTCEDAQKTCPAVIACSSPGINGFPGKDGRDGTKGEKGEPGQGLRGLQGPPGKLGPPGNPGPSGSPGPKGQKGDPGKSPDGDSSLAASERKALQTEMARIKKWLTFSLGKQVGNKFFLTNGEIMTFEKVKALCVKFQASVATPRNAAENGAIQNLIKEEAFLGITDEKTEGQFVDLTGNRLTYTNWNEGEPNNAGSDEDCVLLLKNGQWNDVPCSTSHLAVCEFPI

SEQ ID NO: 335693 - DNA, 747 bp, Artificial Sequence
  derived and/or modified sequence
atgtccctcttcccaagtttgcccctgctcctgctgtccatggttgctgcttcctattccgaaaccgtcacttgcgaagacgctcaaaagacttgtcctgcagtgatcgcatgcagtagtccaggcattaacggctttcctggtaaagatggccgggacggcaccaaaggggagaagggtgagcctggccaggggctgcggggactgcagggcccgcctggaaagctcggcccccccggtaaccctgggcctagtggctcccccgggcccaagggccaaaaaggcgaccctgggaaatcgcctgatggcgacagtagcctggctgcctcagaacgtaaggccctccagaccgagatggcccggattaaaaagtggctgacatttagcctaggaaagcaggtgggaaacaaattcttcctgactaatggagaaattatgaccttcgagaaggtcaaggccctttgtgttaagtttcaggcctccgtcgcaaccccgcggaacgcagcggaaaatggcgcaattcaaaaccttattaaggaggaggcctttctgggcattacggacgaaaaaactgagggccagttcgttgatttgacagggaaccggctgacttataccaattggaacgagggggaaccaaacaacgctggtagtgatgaagactgcgtgctgctcctcaaaaatggtcagtggaatgacgtaccatgctccacctcacacctggcagtctgtgagttccctatctag

SEQ ID NO: 335694 - DNA, 747 bp, Artificial Sequence
  derived and/or modified sequence
atgagcctcttccccagcctgcccctgctgctgctgtccatggtggccgccagctacagcgagaccgtgacctgtgaagatgcccagaagacctgcccagctgtgattgcctgcagcagccctggcatcaatggcttccctgggaaggatggaagagatggcaccaagggggagaagggggagcccggccagggcctgcggggcctgcagggccccccaggcaagctgggccccccaggcaaccctggccccagcggcagccctggccccaagggccagaagggggaccccgggaagagcccagatggagacagcagcctggccgccagcgagaggaaggccctgcagacagagatggcccgcatcaagaagtggctgaccttcagcctgggcaagcaggtgggcaacaagttcttcctgaccaacggggagatcatgacctttgagaaggtgaaggccctgtgtgtgaagttccaggcctctgtggccaccccaagaaatgctgctgaaaatggagccatccagaacctgatcaaggaggaggccttcctgggcatcacagatgagaagacagagggccagtttgtggacctgactggaaaccggctgacctacaccaactggaatgaaggagagcccaacaatgccggcagtgatgaggactgtgtgctgctgctgaagaatggccagtggaatgatgtgccctgcagcaccagccacctggccgtgtgtgagttccccatctag

SEQ ID NO: 335695 - DNA, 3569 bp, Artificial Sequence
  derived and/or modified sequence
ggtaaatatgtgttcattaactgagattaaccttccctgagttttctcacaccaaggtgaggaccatgtccctgtttccatcactccctctccttctcctgagtatggtggcagcgtcttactcagaaactgtgacctgtgaggatgcccaaaagacctgccctgcagtgattgcctgtagctctccaggcatcaacggcttcccaggcaaagatgggcgtgatggcaccaagggagaaaagggggaaccaggccaagggctcagaggcttacagggcccccctggaaagttggggcctccaggaaatccagggccttctgggtcaccaggaccaaagggccaaaaaggagaccctggaaaaagtccggatggtgatagtagcctggctgcctcagaaagaaaagctctgcaaacagaaatggcacgtatcaaaaagtggctcaccttctctctgggcaaacaagttgggaacaagttcttcctgaccaatggtgaaataatgacctttgaaaaagtgaaggccttgtgtgtcaagttccaggcctctgtggccacccccaggaatgctgcagagaatggagccattcagaatctcatcaaggaggaagccttcctgggcatcactgatgagaagacagaagggcagtttgtggatctgacaggaaatagactgacctacacaaactggaacgagggtgaacccaacaatgctggttctgatgaagattgtgtattgctactgaaaaatggccagtggaatgacgtcccctgctccacctcccatctggccgtctgtgagttccctatctgaagggtcatatcactcaggccctccttgtctttttactgcaacccacaggcccacagtatgcttgaaaagataaattatatcaatttcctcatatccagtattgttccttttgtgggcaatcactaaaaatgatcactaacagcaccaacaaagcaataatagtagtagtagtagttagcagcagcagtagtagtcatgctaattatataatatttttaatatatactatgaggccctatcttttgcatcctacattaattatctagtttaattaatctgtaatgctttcgatagtgttaacttgctgcagtatgaaaataagacggatttatttttccatttacaacaaacacctgtgctctgttgagccttcctttctgtttgggtagagggctcccctaatgacatcaccacagtttaataccacagctttttaccaagtttcaggtattaagaaaatctattttgtaactttctctatgaactctgttttctttctaatgagatattaaaccatgtaaagaacataaataacaaatctcaagcaaacagcttcacaaattctcacacacatacatacctatatactcactttctagattaagatatgggacatttttgactccctagaagccccgttataactcctcctagtactaactcctaggaaaatactattctgacctccatgactgcacagtaatttcgtctgtttataaacattgtatagttggaatcatattgtgtgtaatgttgtatgtcttgtttactcagaattaagtctgtgagattcattcatgtcatgtgtacaaaagtttcatccttttcattgccatgtagggttcccttatattaatattcctcagttcatccattctattgttaataggcacttaagtggcttccaatttttggccatgaggaagagaacccacgaacattcctggacttgtcttttggtggacatggtgcactaatttcactacctatccaggagtggaactggtagaggatgaggaaagcatgtattcagctttagtagatattaccagttttcctaagtgattgtatgaatttatgctcctaccggcaatgtgtggcagtcctagatgctctatgtgcttgtaaaaagtcaatgttttcagttctcttgattttcattattcctgtggatgtaaagtgatatttccccatggttttaatctgtatttccccaacatgtaataaggttgaacacttttttatatgcttattgggcacttgggtatcttcttttgtgaagtacccgttcacatttttgtattttgtttaaattagttagccaatatttttcttactgatttttaagttatttttacattctgaatatgtcctttttaatgtgtattacaaatattttgctagtttttgacttgctcctaatgttgaattttgatgaacaaaatttcctaattttgagaaagtcttatttattcatattttctttcaaaattagtgctttttgtgtcatgtttaagaaatttttgcccatcccaaaatcataagatatttttcatgattttgaaaccatgaagagatttttcatgattttgaaatcatgaagatatttttccatttttttctaatagttttattaataaacattctatctattcctggtagaatagatatccacttgagacagcactatgtaggaaagaccatttttcctccactgaactagggtggtgcatttttgtaagttaggtaactgtatgtgtgtgtgtctgtttctgggctgtctattctagtctatttgttgatgcttgtgtcaaacagtacactatcttaattattgtacatttatagttgtaactatagtccagctttgttcttcttaaagtcaagatttccatataaatattagaaacagcttctcaatttctacaaaatcctgatgaggtttctactgggaccacattgagtctatcaatcaacttatgcagaactggcaacttactactgaatctctaatcaatgttcatcatgtatcgcttcatgtaactagaatttctttaacttaattgctatgttttgacatttttagtttaaaaaccttgtatatcttgttttggtggttttagtgattttaataatatattttaaatattttttcttttctattgttgtacacagaaatacagttaagttttgtgtgtagtcttacgatgtttagtaaactcaataagtttatttcttaaatctagtaatttgtagattcctctggattttgtatatgcatagtcatgtaagctgaaaatatggcaatacttgcttcttcccaattgctttaccttttttcttaccttattgcactggttagcaaccccaatacagagaccaccagatcaggtatagactcctgaaagacaatataatgaagtgctccagtcaggcctatctaaactggattcacagctctgtcacttaattgctacatgatctagagccagttactttgtgtttcagccatgtatttgcagctgagagaaaataatcattcttatttcatgaaaattgtggggatgatgaaataagttaacacctttaaagtgtgtagtaaagtatcaggatactatattttaggtcttaatacacacagttatgccgctagatacatgctttttaatgagataatgtgatattatacataacacatatcgatttttaaaaattaaatcaaccttgctttgatggaataaactccatttagtcaca

SEQ ID NO: 335696 - DNA, 747 bp, Artificial Sequence
  derived and/or modified sequence
atgagcctgttccccagcctgcccctgctgctgctgagcatggtggccgcttcttactctgagactgtcacctgtgaggacgcacagaaaacatgtcccgcagtgattgcatgcagctccccgggaattaatgggtttcctggaaaggacgggcgcgacgggactaaaggcgagaaaggtgagcctggacagggattgcgcggactccagggaccacccggaaaattgggccctccaggtaacccagggccaagtggatctcctggccctaaaggccagaaaggggatcccggaaaatcccccgacggtgactcttccttggcagcatccgagcgcaaggccctccaaacagagatggcccgtatcaaaaagtggttgacattttccctgggcaagcaggtggggaacaaatttttcctgaccaatggggagataatgacatttgaaaaagtaaaggctctctgcgtcaagtttcaggctagcgtggcaactcctcggaacgctgcagagaacggagcgatacaaaacctcatcaaggaggaggcctttcttggcattacagacgagaaaacagagggtcagttcgtggacctaactggcaatagactgacatatactaactggaacgagggagaacctaacaatgccggctctgatgaggattgtgtcctgctgctgaagaatggacagtggaacgatgtcccttgtagcacttcgcatttagcggtatgtgagtttccaatttag

SEQ ID NO: 335697 - DNA, 747 bp, Artificial Sequence
  derived and/or modified sequence
atgtcactatttccttcccttccgttactgctactgagcatggttgctgcttcatattctgagaccgtgacgtgtgaggatgcccagaaaacatgtcctgcggttatcgcgtgtagtagtcctggcatcaacgggttccctgggaaagatggcagagacgggaccaagggggagaaaggcgagccgggtcaaggactccggggtttacaaggaccaccagggaagttgggccctccgggaaatccaggtccctccggaagtcccggaccaaaaggtcaaaagggtgatcccggaaagtcacctgacggagatagttccctcgccgcaagcgagcggaaagctctgcagactgaaatggcccgtatcaaaaagtggttaaccttctcgctcggcaaacaggtgggcaataagttcttcctgacaaatggagaaatcatgacatttgagaaagtaaaggctctctgtgttaaattccaagctagtgttgccacaccacggaacgcggcagaaaacggggctatacagaatctaatcaaagaagaggcctttctgggaattaccgacgagaaaactgagggacagttcgtggacctgacgggcaacaggctaacctacaccaactggaatgaaggagaacctaataatgctggatccgacgaagattgtgtgctgctccttaagaacggacagtggaacgacgtgccatgctctacgtcacatctggctgtgtgtgaattccccatttag

SEQ ID NO: 335698 - DNA, 747 bp, Artificial Sequence
  derived and/or modified sequence
atgagcctgttccccagcctgcccctgctgctgctgagcatggtggccgccagctacagcgagaccgtgacctgcgaggacgcccagaagacctgccccgccgtgatcgcctgcagcagccccggcatcaacggcttccccggcaaggacggcagagacggcaccaagggcgagaagggcgagcccggccagggcctgagaggcctgcagggcccccccggcaagctgggcccccccggcaaccccggccccagcggcagccccggccccaagggccagaagggcgaccccggcaagagccccgacggcgacagcagcctggccgccagcgagagaaaggccctgcagaccgagatggccagaatcaagaagtggctgaccttcagcctgggcaagcaggtgggcaacaagttcttcctgaccaacggcgagatcatgaccttcgagaaggtgaaggccctgtgcgtgaagttccaggccagcgtggccacccccagaaacgccgccgagaacggcgccatccagaacctgatcaaggaggaggccttcctgggcatcaccgacgagaagaccgagggccagttcgtggacctgaccggcaacagactgacctacaccaactggaacgagggcgagcccaacaacgccggcagcgacgaggactgcgtgctgctgctgaagaacggccagtggaacgacgtgccctgcagcaccagccacctggccgtgtgcgagttccccatctag

SEQ ID NO: 335699 - protein, 255 aa, Artificial Sequence
  derived and/or modified sequence
MVKGEKGPKGKKITLKVARNCIKITFDGKKRLDLSKMGITTFPKCILRLSDMDELDLSRNLIRKIPDSISKFQNLRWLDLHSNYIDKLPESIGQMTSLLYLNVSNNRLTSNGLPVELKQLKNIRAVNLGLNHLDSVPTTLGALKELHEVGLHDNLLNNIPVSISKLPKLKKLNIKRNPFPKPGESEIFIDSIRRLENLYVVEEKDLCAACLRKCQNARDNLNRIKNMATTTPRKTIFPNLISPNSMAKDSWEDWR

SEQ ID NO: 335700 - protein, 261 aa, Artificial Sequence
  derived and/or modified sequence
MVKGEKGPKGKKITLKVARNCIKITFDGKKRLDLSKMGITTFPKCILRLSDMDELDLSRNLIRKIPDSISKFQNLRWLDLHSNYIDKLPESIGQMTSLLYLNVSNNRLTSNGLPVELKQLKNIRAVNLGLNHLDSVPTTLGALKELHEVGLHDNLLNNIPVSISKLPKLKKLNIKRNPFPKPGESEIFIDSIRRLENLYVVEEKDLCAACLRKCQNARDNLNRIKNMATTTPRKTIFPNLISPNSMAKDSWEDWRIRLTSS

SEQ ID NO: 335701 - DNA, 786 bp, Artificial Sequence
  derived and/or modified sequence
atggtgaagggcgagaagggccccaagggcaagaagatcaccctgaaggtggccagaaactgcatcaagatcaccttcgacggcaagaagagactggacctgagcaagatgggcatcaccaccttccccaagtgcatcctgagactgagcgacatggacgagctggacctgagcagaaacctgatcagaaagatccccgacagcatcagcaagttccagaacctgagatggctggacctgcacagcaactacatcgacaagctgcccgagagcatcggccagatgaccagcctgctgtacctgaacgtgagcaacaacagactgaccagcaacggcctgcccgtggagctgaagcagctgaagaacatcagagccgtgaacctgggcctgaaccacctggacagcgtgcccaccaccctgggcgccctgaaggagctgcacgaggtgggcctgcacgacaacctgctgaacaacatccccgtgagcatcagcaagctgcccaagctgaagaagctgaacatcaagagaaaccccttccccaagcccggcgagagcgagatcttcatcgacagcatcagaagactggagaacctgtacgtggtggaggagaaggacctgtgcgccgcctgcctgagaaagtgccagaacgccagagacaacctgaacagaatcaagaacatggccaccaccacccccagaaagaccatcttccccaacctgatcagccccaacagcatggccaaggacagctgggaggactggagaatcagactgaccagcagctag

SEQ ID NO: 335702 - DNA, 768 bp, Artificial Sequence
  derived and/or modified sequence
atggttaagggggagaagggacccaaggggaaaaaaatcaccctgaaggtcgccagaaactgtatcaaaataaccttcgacggaaagaagagactggacctttccaagatgggcataacaacattccctaagtgcatactcaggctaagcgatatggatgagctggatctgtcccgcaacctaattagaaaaattccggactccatttctaagtttcagaacctgcgatggctcgacctgcattccaactacatcgacaagctccccgagtctataggacagatgacaagccttctctacctgaatgtatctaacaacagattaaccagcaacggtctgccagtagagctcaagcagttaaagaatattagagccgtgaatcttggcctcaaccatctcgactctgttcctaccacccttggtgcactcaaggaacttcatgaggtggggctgcatgacaatctgctgaataacatcccagttagtatctctaagttgcctaagcttaagaagctgaacattaagcggaatccattccctaaacctggcgagagcgagatctttatcgattccattaggcgcctcgaaaacctctacgtggtcgaagaaaaagatctctgcgccgcgtgtctgagaaaatgtcagaacgcccgggataatctaaaccggataaaaaatatggccaccacaacaccccggaagaccatcttcccgaaccttataagtcccaattcaatggctaaggactcctgggaggactggaggtag

SEQ ID NO: 335703 - DNA, 786 bp, Artificial Sequence
  derived and/or modified sequence
atggtgaagggcgagaagggaccgaaaggtaaaaagatcaccctcaaggtggcccggaattgcatcaaaatcactttcgatggaaagaaacggctggacttatcgaagatggggataacaacttttccaaagtgtattctgcgtctctctgatatggacgagctggacctgagccggaacctgatccgtaagattcccgatagcatttccaaatttcagaacttacgctggctggacctgcactccaattatattgataagctgccagagtctattggacagatgacctccttgctgtacctgaacgtgtccaacaatagactcaccagcaacggcctgccagttgagcttaagcagctaaagaatattagggcagtcaacctgggactgaatcatttggactcggttccgactacgctgggtgctctgaaagagctccacgaagtaggcctccacgacaacctgctgaataatatccccgttagcatctctaagctgcctaaattaaagaagctaaacatcaagagaaatccctttcctaagccaggagaatctgagatcttcattgactcaattcggcggctcgaaaacttgtacgtggtggaggagaaagacctttgcgcagcatgtttgcgcaagtgccagaatgcacgcgataacttgaaccgcatcaagaacatggctactacgactccaaggaagacaatcttccctaatctcatctcccctaattccatggctaaggacagctgggaagattggcgcatccgtctgacctccagttag

SEQ ID NO: 335704 - DNA, 768 bp, Artificial Sequence
  derived and/or modified sequence
atggtgaagggggagaagggccccaagggcaagaagatcaccctgaaggtggccaggaactgcatcaagatcacctttgatggcaagaagaggctggacctgagcaagatgggcatcaccaccttccccaagtgcatcctgcggctgagtgacatggatgagctggacctgagcaggaacctgatcaggaagatcccagacagcatcagcaagttccagaacctgcgctggctggacctgcacagcaactacatcgacaagctgcctgagagcatcggccagatgaccagcctgctgtacctgaatgtgagcaacaaccggctgaccagcaatggcctgcctgtggagctgaagcagctgaagaacatccgggctgtgaacctgggcctgaaccacctggacagcgtgcccaccaccctgggcgccctgaaggagctgcacgaggtgggcctgcatgacaacctgctgaacaacatccctgtgtccatcagcaagctgcccaagctgaagaagctgaacatcaagaggaaccccttccccaagccaggagagagcgagatcttcatcgacagcatccggcggctggagaacctgtatgtggtggaggagaaggacctgtgtgccgcctgcctgaggaagtgccagaatgcccgggacaacctgaaccgcatcaagaacatggccaccaccacccccaggaagaccatcttccccaacctgatcagccccaacagcatggccaaggacagctgggaggactggaggtag

SEQ ID NO: 335705 - DNA, 1617 bp, Artificial Sequence
  derived and/or modified sequence
tttttcatgatttttcctcacactgatcactatccaatcagaacaataaacttctaacactcccttactaaaagaacatggttaagggtgagaaaggccccaagggcaagaagatcaccctcaaggtggccaggaattgcatcaaaatcacttttgatgggaaaaagcgccttgacttgagcaagatgggaattaccaccttccccaagtgtattctgcgccttagtgacatggacgagctggaccttagccggaatcttatcaggaagatccctgactccatctccaagttccagaacctccggtggctggacctgcacagcaactacatagacaagctgcctgagtccattggccagatgaccagcctgctctacctcaacgtcagcaacaaccggctgaccagcaacgggctgcccgtggagctgaagcaactcaagaacatccgcgctgtgaacctaggcttgaaccacctggacagcgtgcccaccacactgggggccctgaaggagctccacgaggtagggctccatgacaacctactgaacaacatccccgtgagcatctccaagctccccaagctgaaaaagctcaacataaagcggaacccctttccaaagccaggtgagtcggaaatattcatagactccatcaggaggctggagaacttgtatgttgtggaggagaaggatctgtgtgcggcttgcctgagaaaatgccaaaacgcccgggacaacctgaatagaatcaagaacatggccacgacgacaccgagaaagaccatctttcccaatctgatctcacccaattccatggccaaggactcctgggaagactggagaatacgcttgacatcttcctagagtagctgtggcaaaatcttgaagactactcagctaacagaataaacgactctgaagaggagaagcccccagttaggagaagacagagtggcaagtgagatgttctggaaaccaggctcgccggagctggccaagccaccgacttgcttctcaaattcacttcacctcccttagctttagcccacctgtgtgtgaaaatgactttgggaaatatttgatgtggtttttaaaatgtatatagaaaaaaatttaagaaaattacagattatatattatagacaactaaatatttaagactttaagacttaaaaggcttactgcctctacatttcactcagactagtacatctcaatgccagtagtctgtgataaatttatgtaggtataatgagatactgatatggtttgggcatttgtctcctccaaacctcatgttgagatttgatccccagtgttggaggtggggcctaatggaaggtcatgggggtgggtccctcatgaatggcctggtgccatccttttggtaatgagtgagttctcactgtattagatcctgttgaaaattgattgttaaaaagaccttggcacctccctctcctctctctctcttcctctcactatgtgatgcctgctccccttcaccttccaccatgagtggaagcacctataccccaaagccctcaccagaaggaggtgccggcacctgtacagcttgtaagaaccatgactcaaataaacttcttttctttataaa

SEQ ID NO: 335706 - DNA, 786 bp, Artificial Sequence
  derived and/or modified sequence
atggtgaagggggagaagggccccaagggcaagaagatcaccctgaaggtggccaggaactgcatcaagatcacctttgatggcaagaagaggctggacctgagcaagatgggcatcaccaccttccccaagtgcatcctgcggctgagtgacatggatgagctggacctgagcaggaacctgatcaggaagatcccagacagcatcagcaagttccagaacctgcgctggctggacctgcacagcaactacatcgacaagctgcctgagagcatcggccagatgaccagcctgctgtacctgaatgtgagcaacaaccggctgaccagcaatggcctgcctgtggagctgaagcagctgaagaacatccgggctgtgaacctgggcctgaaccacctggacagcgtgcccaccaccctgggcgccctgaaggagctgcacgaggtgggcctgcatgacaacctgctgaacaacatccctgtgtccatcagcaagctgcccaagctgaagaagctgaacatcaagaggaaccccttccccaagccaggagagagcgagatcttcatcgacagcatccggcggctggagaacctgtatgtggtggaggagaaggacctgtgtgccgcctgcctgaggaagtgccagaatgcccgggacaacctgaaccgcatcaagaacatggccaccaccacccccaggaagaccatcttccccaacctgatcagccccaacagcatggccaaggacagctgggaggactggaggatccggctgaccagcagctag

SEQ ID NO: 335707 - DNA, 768 bp, Artificial Sequence
  derived and/or modified sequence
atggtgaagggcgagaagggccccaagggcaagaagatcaccctgaaggttgcaagaaattgtattaagatcactttcgacggcaaaaagcgcctggatctatctaaaatggggataaccacatttcctaaatgtatactcagactgtctgacatggacgagctcgacctgagcaggaacttgattcggaaaatcccggattctatttcaaagtttcagaatctcaggtggctggacctgcactccaattacattgataaactgcccgaatctatcggtcaaatgacatctctgctttatttaaacgtctccaataaccgcttgaccagtaatgggctgccagtggaactgaaacagttgaagaatatcagagccgtgaaccttggtctgaaccacctggactccgtgcctaccaccctcggcgctttaaaagaactccacgaagtgggtctgcacgataatttactgaataatatcccagtctccattagcaagcttccgaaactcaagaagctgaacattaaacgcaatcctttccccaagcccggcgaatctgaaattttcatcgactccatacgacgattggaaaacctttacgtcgtggaagagaaagatttatgcgccgcctgtctgagaaaatgtcagaatgctcgcgacaatctgaatagaataaagaacatggccaccacgacacctcgaaaaaccattttcccaaacctgattagccccaactctatggcgaaagatagttgggaggactggcggtag

SEQ ID NO: 335708 - DNA, 786 bp, Artificial Sequence
  derived and/or modified sequence
atggtgaagggcgagaagggccccaagggcaagaagatcaccctgaaagtggcccgaaattgtatcaaaatcaccttcgatggaaaaaagcgattggacctttctaaaatgggaatcaccacattccctaaatgcatactgaggctatccgacatggacgagttggatctgagtcgcaacttaatccggaagattccggatagcatcagtaagtttcagaacctccggtggctggacctgcatagtaattatatcgacaagctccccgagtccattggacagatgacgtctcttctgtaccttaatgtctccaataatcgccttacctctaacggactaccagttgagttgaaacagctcaagaacatcagagcggtgaacctcggactcaaccatctggacagtgtgcctaccaccctaggggccttgaaagagctgcacgaagtgggactgcacgacaatttgctgaataacattcctgtaagtattagcaaactccctaaactgaaaaagttgaatataaaaagaaacccattcccaaagcccggcgagtctgagatctttatcgacagcattcggaggctggaaaatctgtatgtggtggaagagaaggacttatgtgctgcctgcttgaggaagtgccagaacgcacgggacaatctgaaccgaataaaaaacatggctaccaccacaccacgtaaaactatattcccaaatctcatttcaccaaactcgatggcaaaagattcttgggaagactggagaataagactgacctcttcctag

SEQ ID NO: 335709 - DNA, 768 bp, Artificial Sequence
  derived and/or modified sequence
atggtcaagggagaaaagggtcctaaaggcaagaaaatcacgctgaaggtagcgcgtaactgtatcaaaatcacgtttgatggaaagaagaggctagatctgagcaagatgggcattacaaccttcccaaagtgtatcttgagattgtcagacatggatgaactggaccttagtagaaatttaattcgcaaaattccagacagtatctctaaatttcagaacttgcgctggcttgacctgcatagcaactatatcgacaagctccccgagagtatcggccagatgacctctctcctttatcttaatgtatcaaataaccgcctcacgtcaaacggattgcccgtggaactgaagcagctaaaaaacattcgcgctgtgaaccttggactcaatcatctggactccgtgccgactactctcggagctttgaaagaacttcacgaagttggactccatgacaatctgctgaataacattcctgtttctatcagcaaactccccaagctgaagaagctgaacattaagcgcaacccgttccccaagcccggagagtctgaaattttcattgactctatcaggcggctcgagaatctctatgtagtggaggaaaaggacctctgtgccgcatgtctgcggaagtgtcaaaacgctcgcgataacttaaaccggattaagaatatggcaactaccacacctagaaagactattttccccaatctcatcagtcctaactctatggccaaagattcttgggaggattggaggtag

SEQ ID NO: 335710 - DNA, 786 bp, Artificial Sequence
  derived and/or modified sequence
atggtgaagggggaaaaaggcccaaagggcaaaaagatcacgctgaaggtggcgcgtaattgtataaaaattacattcgacggcaaaaagcgcctggacctatcgaagatgggcataaccacctttcccaaatgcatcctgagactttctgatatggacgagctggatctctcccgtaatcttatcagaaagataccagattctatatccaaatttcaaaacttgaggtggctggacttacatagtaattacatcgacaagctgccagaatccattgggcagatgactagcttgctgtacctcaatgtctcgaacaaccggcttacttccaacggattgcccgtcgaactaaagcagctcaaaaacatcagagctgtgaatctgggcctcaatcacctggatagtgtccctacgacactcggagctcttaaggaactacatgaagtcgggttacatgacaacctgctgaataacattccagtttccattagcaagctgccaaaattgaagaaactaaatattaagagaaatccttttccgaagccaggcgagtctgaaattttcattgacagcatcagacggctcgagaatctgtacgtggtcgaagagaaggacttgtgcgctgcctgtctgaggaaatgtcagaatgcaagagacaacctgaaccggataaagaacatggcaactaccactccgcgaaaaacaatcttccctaaccttatctcacctaattcaatggcaaaggattcttgggaggattggaggataaggctcacgagcagttag

SEQ ID NO: 335711 - DNA, 1008 bp, Artificial Sequence
  derived and/or modified sequence
ggagaagctgggactagcaggcagtttttcatgatttttcctcacactgatcactatccaatcagaacaataaacttctaacactcccttactaaaagaacatggttaagggtgagaaaggccccaagggcaagaagatcaccctcaaggtggccaggaattgcatcaaaatcacttttgatgggaaaaagcgccttgacttgagcaagatgggaattaccaccttccccaagtgtattctgcgccttagtgacatggacgagctggaccttagccggaatcttatcaggaagatccctgactccatctccaagttccagaacctccggtggctggacctgcacagcaactacatagacaagctgcctgagtccattggccagatgaccagcctgctctacctcaacgtcagcaacaaccggctgaccagcaacgggctgcccgtggagctgaagcaactcaagaacatccgcgctgtgaacctaggcttgaaccacctggacagcgtgcccaccacactgggggccctgaaggagctccacgaggtagggctccatgacaacctactgaacaacatccccgtgagcatctccaagctccccaagctgaaaaagctcaacataaagcggaacccctttccaaagccaggtgagtcggaaatattcatagactccatcaggaggctggagaacttgtatgttgtggaggagaaggatctgtgtgcggcttgcctgagaaaatgccaaaacgcccgggacaacctgaatagaatcaagaacatggccacgacgacaccgagaaagaccatctttcccaatctgatctcacccaattccatggccaaggactcctgggaagactggaggtgacttggaacctgaccctgaggcagaagggaaagagagagggagggaagagggcagtgggctacctccacaggaaaccaagggctcccctgtggctgcagcagctctttcagccaagcccataaaactcctttccttactt

SEQ ID NO: 335712 - DNA, 768 bp, Artificial Sequence
  derived and/or modified sequence
atggtgaagggcgagaagggccccaagggcaagaagatcaccctgaaggtggccagaaactgcatcaagatcaccttcgacggcaagaagagactggacctgagcaagatgggcatcaccaccttccccaagtgcatcctgagactgagcgacatggacgagctggacctgagcagaaacctgatcagaaagatccccgacagcatcagcaagttccagaacctgagatggctggacctgcacagcaactacatcgacaagctgcccgagagcatcggccagatgaccagcctgctgtacctgaacgtgagcaacaacagactgaccagcaacggcctgcccgtggagctgaagcagctgaagaacatcagagccgtgaacctgggcctgaaccacctggacagcgtgcccaccaccctgggcgccctgaaggagctgcacgaggtgggcctgcacgacaacctgctgaacaacatccccgtgagcatcagcaagctgcccaagctgaagaagctgaacatcaagagaaaccccttccccaagcccggcgagagcgagatcttcatcgacagcatcagaagactggagaacctgtacgtggtggaggagaaggacctgtgcgccgcctgcctgagaaagtgccagaacgccagagacaacctgaacagaatcaagaacatggccaccaccacccccagaaagaccatcttccccaacctgatcagccccaacagcatggccaaggacagctgggaggactggagatag

SEQ ID NO: 335713 - DNA, 2559 bp, Artificial Sequence
  derived and/or modified sequence
atgcgcggcatggccggtcctgctatcggcgccgaggggatcctgacacgggagtgtgcggatcagtacggacaaggttatccagaggagtacgaggagcaccggggaaagggtagcttcccggctatgattaccccagcctaccagaatgctaaaaaagctcatgagcttgcatcagacataaagtaccgccaggattttaacaaaatgaagggggccgcacactatcactcgctgcctgcgcaggacaaccttgtccttaaacaggcacagagcgtcaacaagctcgttagcgaagtcgagtacaagaaagacttggagtcctcccgcggccactctattaactattgcgagacaccccagttccgcaatgtctccaaaattagtaaattcaccagtgataacaagtacaaagaaaactaccagaatcacatgcgggggaggtatgaaggcgtgggaatggaccggcgcaccttacatgcaatgaaggtgggtagtctggctagtaacgtggcttataaggccgattacaagcatgacatagtcgattataattatccagcaaccctgacaccgtcataccaaactgccatgaagcttgtccctcttaaagatgccaactatagacagagtattgacaagctcaagtattcaagcgtcacagacaccccacaaatcgtgcaggctaaaatcaacgctcaacaactgtctcacgttaactaccgcgcagattacgaaaaaaacaaactgaactacaccttaccgcaggacgtcccccagctcgtgaaagcaaagacaaacgccaagctgttcagtgaagttaagtacaaggaaggctgggagaaaacgaaaggcaaggggtttgaaatgaaactcgatgctatgtcgctcttggccgccaaggcatctggagaattggccagcaacgtgcatctcctgttgagcttaaagattaagtacaaagaagagtacgagaagaccaagggaaaggcaatgggtaccgccgactccaggttgctgcattcccttcaaattgccaagatgtcctcagaggtcgagtacaagaagggatttgaagaatccaagaccaggttccacctccccatggatatgggagtgggatggctcactgaaggctccctgaatctggaacaggctaagaaagcgggtcaactcgtctcagaaaaaaactatagacagcgcgttgatgagctcaaatttacatctgtgacggatagcagtcagatggagcacgccaagaagtcccaggaactgcagtctggagtggcttacaaggctggtaatgagcagtctgtacaccagtacaccatatccaaggatgaacctctcttcctgcaagcacgggcaaacgccgccaacctctcagagttcctgtacaggcacgatttcgttaaggagcgggggaagcttatcggtccgcaaagtgtcagggacgatccccgtatccagcactgcagacggatgggtcaactccaaagtgaacttcagtatcgacgcggcgcgacaagctcccaggctcaatttcatcttcctatggacatggtgcacctggtacacgctaagaacgctcaggcacttgcgtctgatcatgattacaggactcagtaccacaaattcacggcactaccggaggacctgaaaatggcatgggctaaaaaagctcacgcccttcagtccgagctcaggtacaagtccgatctgataggcatgaaaggaatcggctggcttgccctgagatcaccccagatggagagcgctaagaaagcaggcgaactgatttccgagactaaatacaggaaaaaacccgactcaatcaaattcacaacagttgttgactctcccgatttggtgcatgccaagaactcctacatgcactgcaatgagcggatgtaccggtccggtgacgcggagagccttcacagatataccttgatccccgaccatcccgatttcacaagggctcgcctaaatgctcttcatctctccgatttccggtataaggaagcttttcttagagatcgagggttacagattggataccgatccgtggatgatgacccaagaatgaaacatttcctcaatgttggacgacttcagtcagataatgaatacaagaaagattttgccaagagtcgctctcagtttcattcctctaccgaccagccaggactgctgcaggctaaacgctctcagcaactcgcgtccgacgttcactatcgacagcccctgcctcagcctacatgcgacccggaacagctggggttaaggcacgcacagaaggcccatcagcttcaatctgacgtgaagtacaagtccgacctgaacctgactagaggggttgggtggacgccccccggctcatacaaggtggagatggcgaggcgggcagctgagctggccaatgctaggggactcggacttcagggagcttatagaggcgcagaagctgtcgaggcaggagatcaccagagtggagaggtcaatcctgacgcaaccgagatcctgcatgtcaaaaaaaaaaaagccctcctcctgtag

SEQ ID NO: 335714 - DNA, 2559 bp, Artificial Sequence
  derived and/or modified sequence
atgaggggcatggccggccctgccatcggggctgagggcatcctgacccgggagtgtgccgaccagtatggccagggctacccagaggagtatgaggagcaccggggcaagggcagcttccctgccatgatcaccccagcctaccagaatgccaagaaggcccacgagctggccagtgacatcaagtaccggcaggacttcaacaagatgaagggagctgcccactaccacagcctgcctgcccaggacaacctggtgctgaagcaggcccagagcgtgaacaagctggtgtctgaggtggagtacaagaaggacctggagagcagccggggccacagcatcaactactgtgagaccccccagttcagaaatgtgtccaagatcagcaagttcaccagtgacaacaagtacaaggagaactaccagaaccacatgaggggccgctatgaaggagtgggcatggacaggaggaccctgcacgccatgaaggtgggcagcctggccagcaatgtggcctacaaggctgactacaagcatgacatcgtggactacaactacccagccaccctgacccccagctaccagacagccatgaagctggtgcccctgaaggatgccaactaccggcagagcattgacaagctgaagtacagctctgtgacagacaccccccagatcgtgcaggccaagatcaatgcccagcagctgagccacgtgaactacagagctgactatgagaagaacaagctgaactacaccctgccccaggatgtgccccagctggtgaaggccaagaccaatgccaagctgttcagcgaggtgaagtacaaggagggctgggagaagaccaagggcaagggctttgagatgaagctggatgccatgagcctgctggccgccaaggccagcggggagctggccagcaatgtgcacctgctgctgagcctgaagatcaagtacaaggaggagtatgagaagaccaagggcaaggccatgggcacagctgacagccggctgctgcacagcctgcagatcgccaagatgagcagcgaggtggagtacaagaagggctttgaggagagcaagacccgcttccacctgcccatggacatgggcgtgggctggctgacagagggcagcctgaacctggagcaggccaagaaggccggccagctggtgtctgagaagaactaccggcagagggtggatgagctgaagttcacctctgtgacagacagcagccagatggagcacgccaagaagagccaggagctgcagagcggcgtggcctacaaggctggaaatgagcagagcgtgcaccagtacaccatcagcaaggatgagcccctcttcctgcaggcccgggccaatgctgccaacctgtctgagttcctgtacagacatgactttgtgaaggagcggggcaagctgattggcccccagagcgtgagagatgacccccgcatccagcactgcaggaggatgggccagctgcagagcgagctgcagtacagaagaggagccaccagcagccaggcccagttccacctgcccatggacatggtgcacctggtgcacgccaagaatgcccaggccctggccagtgaccatgactaccgcacccagtaccacaagttcaccgccctgcctgaggacctgaagatggcctgggccaagaaggcccacgccctgcagagcgagctgcgctacaagagtgacctgattggcatgaagggcatcggctggctggccctgcggagcccccagatggagagcgccaagaaggccggggagctgatcagcgagaccaagtacaggaagaagccagacagcatcaagttcaccaccgtggtggacagcccagacctggtgcacgccaagaacagctacatgcactgcaatgaaagaatgtacagaagtggagatgctgagagcctgcaccgctacaccctcatcccagaccacccagacttcacccgggcccggctgaatgccctgcacctgagtgacttccgctacaaggaggccttcctgcgggaccggggcctgcagatcggctacagatctgtggatgatgaccccaggatgaagcacttcctgaatgtgggccgcctgcagagcgacaatgagtacaagaaggactttgccaagagccgcagccagttccacagcagcacagaccagcccggcctgctgcaggccaagaggagccagcagctggccagtgatgtgcactaccggcagcccctgccccagcccacctgtgaccctgagcagctgggcctgcggcatgcccagaaggcccaccagctgcagagtgatgtgaagtacaagagtgacctgaacctgacccggggcgtgggctggaccccacctggcagctacaaggtggagatggccaggagagctgctgagctggccaatgcccggggcctgggcctgcagggcgcctacagaggagctgaggccgtggaggccggggaccaccagagcggggaggtgaacccagatgccacagagatcctgcacgtgaagaagaagaaggccctgctgctgtag

SEQ ID NO: 335715 - DNA, 2559 bp, Artificial Sequence
  derived and/or modified sequence
atgcggggcatggccggccccgccatcggcgccgagggcatcctgacaagggaatgcgctgaccaatacggccagggttatcccgaagagtacgaggagcaccgtggaaaaggatcctttcccgccatgattacccctgcttaccagaatgccaagaaggcacatgagttggcctctgacatcaagtacaggcaggattttaataagatgaagggggccgcacattatcatagcctccccgcccaggacaaccttgtcctgaaacaggcgcaaagcgtcaataaactggtttctgaagttgaatacaagaaggaccttgagtcttcacggggccactccatcaattactgcgaaactcctcaatttaggaatgtgtctaagatctccaagttcacctctgacaacaagtacaaggaaaactatcagaaccacatgagagggaggtacgagggcgtcggtatggataggcgaactctgcatgcgatgaaggtgggctcgttagcaagcaatgtggcatataaggcagattacaaacacgatatcgtggactataactaccccgccacccttactcccagctaccagacagcgatgaagcttgtgcccctgaaggacgctaactaccggcagtctatcgataagttgaagtactctagcgtgactgatacgccccagattgtgcaggccaagataaatgcccaacagctcagccacgtaaactatagggctgactatgagaaaaacaagctgaattacactctcccccaggacgtgcctcagctggttaaagcgaagaccaatgctaagctctttagtgaagtgaagtataaagaggggtgggagaagaccaagggaaaaggtttcgagatgaaattggacgcaatgagtctgctggccgcaaaagcgagtggtgaactcgctagtaacgttcatttgctgctctccctgaaaatcaaatacaaagaagagtacgaaaagaccaagggcaaggctatgggaactgccgactccaggttgctccattctctgcagatcgcaaaaatgtcctccgaagtcgagtataagaaaggatttgaagagagcaaaacacgcttccatctgcctatggatatgggcgtgggatggctaactgaaggcagcctgaacttggaacaggctaaaaaagcaggccagctggtttccgaaaagaattaccggcagagggtcgatgaactgaaattcacttccgtgaccgactcaagtcagatggaacatgcaaagaaaagccaggaacttcagtcgggcgtggcttacaaagcaggcaatgaacaatcggttcaccagtataccatatccaaagatgagccgcttttcctacaggctagagctaacgccgctaacttgtcagaattcctgtatcgccacgactttgtgaaggagcgcggaaagctgataggcccacagtcggtcagggatgaccctcgcatacagcactgtagacggatgggacaacttcaatccgagctccaatatcgtcggggggccacatcatctcaggcccagtttcacctgccaatggacatggtgcacctggtccacgccaagaatgcacaggcccttgccagcgatcacgactacaggacgcagtaccataagtttacagccctgccagaggacttgaagatggcatgggcaaaaaaagctcacgcattacagtctgaactgaggtacaagagtgatctgattggcatgaaggggattgggtggctcgccttgagatcgcctcaaatggagtcagctaaaaaagccggggagctgatcagcgaaaccaaatatcggaaaaaacccgatagcattaagttcactactgtggttgactcacccgatctggtgcacgccaagaattcgtacatgcactgtaatgagcgaatgtatcggtccggcgacgccgagtccctgcatcgctacacactcatcccagaccaccccgacttcactcgcgcacggctcaacgctttgcatctctccgacttccgctataaagaggcattcctgcgcgatagaggcctgcagattgggtataggtccgtcgatgatgaccctaggatgaaacattttttgaacgtggggagactccagagcgacaacgagtacaaaaaggactttgcgaagtcaagatcgcagttccattcctccacagaccagccaggcttgctgcaggcaaagcgaagtcagcagctcgccagcgatgtgcactatcggcagcctctgcctcagccaacatgtgaccctgagcaactcggactgaggcatgcccagaaggcccaccagttacagtccgatgtgaagtataagagcgacctgaaccttacgcggggcgtgggatggacaccccctggatcttacaaggtggaaatggcacgcagagccgccgagctcgcaaacgccagagggctggggctccagggcgcctatagaggagctgaagctgtcgaggcaggggaccaccagtccggcgaggttaatccggacgcaaccgagatcctacatgtcaagaagaagaaagctctgctgttgtag

SEQ ID NO: 335716 - DNA, 2714 bp, Artificial Sequence
  derived and/or modified sequence
atcaaaaagaaatgaggggaatggctggtccagccattggagctgagggcatcttgacaagggaatgtgcagaccaatatggccagggttacccggaggagtatgaggagcacaggggaaagggcagcttcccagctatgatcactccagcatatcagaacgccaagaaagctcacgaactcgctagtgacataaaatacaggcaggacttcaataagatgaaaggcgctgcacattatcactcgcttccagctcaagacaacttggttctcaaacaggctcagagcgtaaacaaactcgtgagtgaggtggagtataagaaggatctggaaagtagtagaggtcacagtatcaactactgtgaaacacctcaattcaggaacgtgagcaagatctcaaaatttaccagtgataataaatataaagaaaactaccagaaccacatgagaggccgctatgaaggagttggtatggacagacgcactctgcatgctatgaaagttggcagcctggcaagcaacgttgcctacaaagctgattataaacatgatattgtcgactacaactacccagccactctcacgccttcctatcaaacagctatgaaactggtgcccttgaaagatgccaattataggcagagcatcgacaagttgaagtacagctcggtgactgacaccccacagattgttcaagccaaaatcaatgcccagcagctgagtcatgtgaattaccgtgctgactatgagaaaaataagttgaattacacattgccccaggatgttcctcagctggtgaaggccaaaaccaatgccaaactcttcagtgaggttaagtataaagaaggctgggagaagacaaaggggaaaggatttgagatgaagctggatgccatgtctctgctggccgccaaagcctctggggagcttgctagcaatgtacaccttcttctttctctcaagattaaatataaagaagaatatgaaaagacaaaaggcaaagccatgggaacagccgactctaggcttctgcactccctgcagattgctaagatgagcagtgaggttgaatataagaaaggctttgaagagagtaagacccggtttcacctgcccatggatatgggagttgggtggctgacagaggggagtctcaacttggaacaagccaagaaggctggacagctggtcagcgagaaaaactaccggcagagggtcgatgagctgaagttcaccagcgtgaccgacagctcccagatggagcacgccaagaagagccaggagctacagagcggggtggcctacaaggcaggaaatgagcagtctgtccatcagtataccatcagcaaagacgagcctctcttcctgcaggcccgagccaatgctgcaaatctcagcgagtttctctacagacatgactttgtgaaggagcgagggaaactcatagggccccagagtgtaagagacgacccccggatccagcactgccggcgcatgggccagctgcagagcgagcttcagtacaggaggggggcgaccagcagccaagcccagttccatctgcccatggacatggtgcacctggtccatgccaagaatgcccaggctctggccagcgaccacgactacaggacacagtatcacaagttcacagcactgcccgaggacctgaagatggcctgggccaagaaagcccatgccctgcagagtgagttgcgctacaagtcagacctgatcggcatgaagggcataggatggctggcgctgagatccccacagatggagagtgcaaagaaggctggagaactcatcagcgagaccaagtaccgtaaaaaaccagacagtatcaagttcaccacagtggttgactccccagacctggttcatgccaagaacagctatatgcactgcaatgagcgcatgtatagatctggagatgcagaatccctgcacagatacaccctgatccccgaccatcccgatttcacccgagctcgcctcaatgcgctgcatctgagtgacttccggtacaaagaggctttcctgcgggaccgaggcctgcagatcgggtaccgcagtgtcgacgatgacccaaggatgaagcatttcctcaacgttggcaggctccagagtgacaatgagtacaagaaggactttgccaagagtcggtcccagtttcacagcagcacagaccagcccggcctccttcaggccaagaggagccagcagctggccagtgatgtgcactacaggcagcccctgccccagcccacctgcgacccggagcagctgggcctcaggcatgctcagaaggcccaccagctgcagagtgatgtcaagtataaatcagacttgaacctgaccagaggtgttggctggacccctcctggctcctacaaagtggaaatggctcggcgggctgcggaactggccaacgcaaggggcctgggtctccagggagcttaccggggggcagaagcagtggaggctggagatcatcagagtggggaggtgaacccagatgccactgagattctgcacgtcaaaaagaagaaggccctgctgttgtgagccatgtccaccctgattcctgagaggccagagaggaagtttgttcaccagagacaggcttcagatggctttgatttcggcaagctggaatggcccaccagcccatcccagatcttcctttattaaaataataactctgaaagc

SEQ ID NO: 335717 - DNA, 2559 bp, Artificial Sequence
  derived and/or modified sequence
atgagagggatggccggtccggcaatcggagcggaaggcatccttaccagagagtgtgccgatcagtatggacagggataccccgaagagtacgaggagcatagggggaagggcagtttccccgctatgatcacacctgcctaccagaacgccaaaaaagcccacgaattggctagtgacataaagtatcgccaggacttcaataaaatgaaaggtgccgctcactatcacagtttgccagctcaagataatctagttctcaaacaggcccaaagtgttaataaacttgtgagtgaagtagagtataaaaaagacctggagtcctcccgcggacacagcatcaattactgcgaaaccccacagtttagaaatgtctctaagatcagtaagtttactagtgacaataaatataaggagaactatcagaatcacatgagagggaggtacgagggcgtcggaatggacagacgcaccctccacgctatgaaggtggggagtcttgctagcaacgtcgcctacaaggcagactataaacacgacattgtggactacaactatcctgccacactgactccaagttaccagactgcaatgaaactggtcccacttaaggacgccaactataggcagtccattgataagctgaagtattcaagcgtgaccgacaccccacagatcgtccaggccaaaataaatgcccagcagttgtcccacgtgaactaccgcgcagattacgaaaaaaataagttaaattacactttgccacaggacgtaccccagcttgttaaagccaagaccaacgcaaagctgtttagtgaggttaagtacaaggagggctgggagaaaacaaagggtaaaggctttgaaatgaaactcgacgctatgtctcttctagcagccaaggcctcaggcgaactggcttccaacgtacatctgctcctgtctctgaagatcaagtataaggaggagtacgaaaagactaaggggaaggctatgggcacggccgactctagacttctacactctctccaaatcgccaagatgagttcagaagtggaatataaaaagggctttgaggaatccaagaccagattccacttacccatggatatgggtgtggggtggctgacggagggctctctcaacctagaacaggcgaagaaggctggccagcttgtgagtgagaaaaactacagacagagagttgatgagcttaagttcaccagtgtgaccgacagcagccagatggagcacgcgaagaaatcccaggagcttcaatccggtgtagcctacaaggccggaaacgaacagagcgtacatcaatatacaatttccaaggacgaacccttattcctgcaggctagagctaacgcagcgaatctgtcagagttcctgtatcgccacgattttgtgaaggaacgagggaagctcatcgggcctcagtccgtgagggatgacccacggattcagcactgtcgtagaatgggacaactgcaatccgagttgcagtatcgacggggagccacatcttcacaggcccagttccatcttcctatggatatggtgcacctggtacatgcaaagaatgcccaggcactcgcaagtgaccacgactataggacccagtatcataaatttacggcgttacccgaggacctcaagatggcatgggctaaaaaagcacatgcgctgcagtctgagctgagatataagtccgacctcatcggcatgaagggaatcggctggctcgctcttaggagcccacagatggagagtgccaagaaagcgggagaactgatctctgagactaagtatcgcaagaagcctgactctattaagtttactaccgtggtggactctcccgatctcgtgcacgccaagaatagttacatgcattgtaacgagaggatgtacagatccggcgacgcagaaagcctgcatagatatactctcattcctgatcatccagatttcactcgggcacggctgaacgctctccatctgtctgacttcaggtataaagaggccttcctgagagacagaggactgcagattggctacagatccgttgacgatgatcctagaatgaagcactttctcaatgtcggccgtttacaatctgacaatgagtacaaaaaggacttcgctaagagtcgctcccaatttcactcctccactgatcaacctggtttgctgcaggctaaaaggagtcagcaattagcctccgacgtccattacagacaaccactgccacagcctacgtgcgaccctgagcagctgggccttcggcacgctcagaaagctcaccagctacaatcagacgtgaaatataagagtgacctcaaccttacccgtggggtggggtggaccccgccaggatcttataaggtcgaaatggcaagacgagccgcagagttggcgaacgccaggggtttaggtcttcagggcgcttacagaggtgctgaggcagtagaggctggggaccatcagtctggagaggtcaatccagacgctacggagatactacacgtcaagaagaaaaaggccctactcctgtag

SEQ ID NO: 335718 - DNA, 2559 bp, Artificial Sequence
  derived and/or modified sequence
atgagaggcatggccggccccgccatcggcgccgagggcatcctgaccagagagtgcgccgaccagtacggccagggctaccccgaggagtacgaggagcacagaggcaagggcagcttccccgccatgatcacccccgcctaccagaacgccaagaaggcccacgagctggccagcgacatcaagtacagacaggacttcaacaagatgaagggcgccgcccactaccacagcctgcccgcccaggacaacctggtgctgaagcaggcccagagcgtgaacaagctggtgagcgaggtggagtacaagaaggacctggagagcagcagaggccacagcatcaactactgcgagaccccccagttcagaaacgtgagcaagatcagcaagttcaccagcgacaacaagtacaaggagaactaccagaaccacatgagaggcagatacgagggcgtgggcatggacagaagaaccctgcacgccatgaaggtgggcagcctggccagcaacgtggcctacaaggccgactacaagcacgacatcgtggactacaactaccccgccaccctgacccccagctaccagaccgccatgaagctggtgcccctgaaggacgccaactacagacagagcatcgacaagctgaagtacagcagcgtgaccgacaccccccagatcgtgcaggccaagatcaacgcccagcagctgagccacgtgaactacagagccgactacgagaagaacaagctgaactacaccctgccccaggacgtgccccagctggtgaaggccaagaccaacgccaagctgttcagcgaggtgaagtacaaggagggctgggagaagaccaagggcaagggcttcgagatgaagctggacgccatgagcctgctggccgccaaggccagcggcgagctggccagcaacgtgcacctgctgctgagcctgaagatcaagtacaaggaggagtacgagaagaccaagggcaaggccatgggcaccgccgacagcagactgctgcacagcctgcagatcgccaagatgagcagcgaggtggagtacaagaagggcttcgaggagagcaagaccagattccacctgcccatggacatgggcgtgggctggctgaccgagggcagcctgaacctggagcaggccaagaaggccggccagctggtgagcgagaagaactacagacagagagtggacgagctgaagttcaccagcgtgaccgacagcagccagatggagcacgccaagaagagccaggagctgcagagcggcgtggcctacaaggccggcaacgagcagagcgtgcaccagtacaccatcagcaaggacgagcccctgttcctgcaggccagagccaacgccgccaacctgagcgagttcctgtacagacacgacttcgtgaaggagagaggcaagctgatcggcccccagagcgtgagagacgaccccagaatccagcactgcagaagaatgggccagctgcagagcgagctgcagtacagaagaggcgccaccagcagccaggcccagttccacctgcccatggacatggtgcacctggtgcacgccaagaacgcccaggccctggccagcgaccacgactacagaacccagtaccacaagttcaccgccctgcccgaggacctgaagatggcctgggccaagaaggcccacgccctgcagagcgagctgagatacaagagcgacctgatcggcatgaagggcatcggctggctggccctgagaagcccccagatggagagcgccaagaaggccggcgagctgatcagcgagaccaagtacagaaagaagcccgacagcatcaagttcaccaccgtggtggacagccccgacctggtgcacgccaagaacagctacatgcactgcaacgagagaatgtacagaagcggcgacgccgagagcctgcacagatacaccctgatccccgaccaccccgacttcaccagagccagactgaacgccctgcacctgagcgacttcagatacaaggaggccttcctgagagacagaggcctgcagatcggctacagaagcgtggacgacgaccccagaatgaagcacttcctgaacgtgggcagactgcagagcgacaacgagtacaagaaggacttcgccaagagcagaagccagttccacagcagcaccgaccagcccggcctgctgcaggccaagagaagccagcagctggccagcgacgtgcactacagacagcccctgccccagcccacctgcgaccccgagcagctgggcctgagacacgcccagaaggcccaccagctgcagagcgacgtgaagtacaagagcgacctgaacctgaccagaggcgtgggctggaccccccccggcagctacaaggtggagatggccagaagagccgccgagctggccaacgccagaggcctgggcctgcagggcgcctacagaggcgccgaggccgtggaggccggcgaccaccagagcggcgaggtgaaccccgacgccaccgagatcctgcacgtgaagaagaagaaggccctgctgctgtag

SEQ ID NO: 335719 - protein, 439 aa, Artificial Sequence
  derived and/or modified sequence
MFSKLAHLQRFAVLSRGVHSSVASATSVATKKTVQGPPTSDDIFEREYKYGAHNYHPLPVALERGKGIYLWDVEGRKYFDFLSSYSAVNQGHCHPKIVNALKSQVDKLTLTSRAFYNNVLGEYEEYITKLFNYHKVLPMNTGVEAGETACKLARKWGYTVKGIQKYKAKIVFAAGNFWGRTLSAISSSTDPTSYDGFGPFMPGFDIIPYNDLPALERALQDPNVAAFMVEPIQGEAGVVVPDPGYLMGVRELCTRHQVLFIADEIQTGLARTGRWLAVDYENVRPDIVLLGKALSGGLYPVSAVLCDDDIMLTIKPGEHGSTYGGNPLGCRVAIAALEVLEEENLAENADKLGIILRNELMKLPSDVVTAVRGKGLLNAIVIKETKDWDAWKVCLRLRDNGLLAKPTHGDIIRFAPPLVIKEDELRESIEIINKTILSF

SEQ ID NO: 335720 - protein, 301 aa, Artificial Sequence
  derived and/or modified sequence
MNTGVEAGETACKLARKWGYTVKGIQKYKAKIVFAAGNFWGRTLSAISSSTDPTSYDGFGPFMPGFDIIPYNDLPALERALQDPNVAAFMVEPIQGEAGVVVPDPGYLMGVRELCTRHQVLFIADEIQTGLARTGRWLAVDYENVRPDIVLLGKALSGGLYPVSAVLCDDDIMLTIKPGEHGSTYGGNPLGCRVAIAALEVLEEENLAENADKLGIILRNELMKLPSDVVTAVRGKGLLNAIVIKETKDWDAWKVCLRLRDNGLLAKPTHGDIIRFAPPLVIKEDELRESIEIINKTILSF

SEQ ID NO: 335721 - DNA, 1320 bp, Artificial Sequence
  derived and/or modified sequence
atgttctcaaaactcgctcacctgcagagattcgccgtgttaagccggggagtccattcgtcagttgcctccgccacgtccgtagcgacgaaaaagacagtgcagggaccccctacctctgatgatatctttgagcgcgagtacaaatacggcgctcataattaccatcctttgccagtggcactcgaaaggggtaaaggaatctacctttgggacgtcgagggccggaaatattttgatttcctgtcaagttactctgccgtcaatcagggacactgtcatccaaagatcgtgaatgcactcaaatctcaagttgacaagcttacactcacttcacgagccttctataataatgtcttaggagagtacgaagaatacataacaaagctgttcaactaccacaaagttctgccgatgaacacgggcgtggaggcaggtgaaacggcctgcaaacttgcccgcaagtgggggtatacggtaaaggggatccagaagtacaaagccaagattgtcttcgccgctggcaatttctggggacggaccctgtccgccatctcttccagtacagatcccacatcctatgatggcttcggcccatttatgccaggcttcgatatcatcccctataacgacctgcccgcgctcgagagagctcttcaggacccgaatgtggccgcctttatggtcgagccaatacagggcgaagccggggtggtggtgccagatcccggatacttaatgggcgtgagggaattgtgcactcggcaccaagtcctttttattgcggacgagatccagactgggttggctcgcactggccgctggctggctgtagactatgaaaacgttcggccggatattgtgctgctgggaaaagccctcagcggtggtctctaccccgtgtctgctgtgctttgtgacgatgatatcatgcttactatcaaacctggagaacacggatcgacatacgggggtaacccactggggtgtagggtggccatagccgcactggaggttttggaggaagaaaacctcgctgagaatgctgacaaattgggcatcattctgcgcaacgagcttatgaagctgccatcagatgtggtgacagccgtgcgcggaaagggcctcctgaatgccatagtgattaaggagactaaagactgggatgcttggaaggtttgtctgagattacgagataatggcctgcttgcaaagcccactcacggcgacatcatccggttcgcccccccactggtgattaaagaagacgagcttagagagagcatcgagataattaataagacgatactgtctttctag

SEQ ID NO: 335722 - DNA, 1320 bp, Artificial Sequence
  derived and/or modified sequence
atgttcagcaagctggcccacctgcagagatttgctgtgctgagcagaggagtgcacagctctgtggccagcgccacctctgtggccaccaagaagacagtgcagggcccccccaccagtgatgacatctttgagcgggagtacaagtacggggcccacaactaccaccccctgcctgtggccctggagcggggcaagggcatctacctgtgggatgtggagggcaggaagtactttgacttcctgagcagctacagcgctgtgaaccagggccactgccaccccaagatcgtgaatgccctgaagagccaggtggacaagctgaccctgaccagccgggccttctacaacaacgtgctgggggagtatgaggagtacatcaccaagctgttcaactaccacaaggtgctgcccatgaacacaggagtggaggccggggagacagcctgcaagctggccaggaagtggggctacacagtgaagggcatccagaagtacaaggccaagatcgtgtttgctgctggcaacttctggggccgcaccctgagcgccatcagcagcagcacagaccccaccagctatgatggcttcggccccttcatgcctggctttgacatcatcccctacaatgacctgcctgccctggagcgggccctgcaggaccccaacgtggccgccttcatggtggagcccatccagggcgaggccggcgtggtggtgcctgaccccggctacctgatgggcgtgcgggagctgtgcaccaggcaccaggtgctcttcatcgcagatgagatccagacaggcctggccaggacaggccgctggctggccgtggactatgaaaatgtgcggccagacatcgtgctgctgggcaaggccctgagcggcggcctgtaccctgtgtctgctgtgctgtgtgatgatgacatcatgctgaccatcaagccaggagaacatggcagcacctatggaggcaaccccctgggctgccgggtggccatcgccgccctggaggtgctggaggaggagaacctggctgaaaatgctgacaagctgggcatcatcctgagaaatgagctgatgaagctgcccagtgatgtggtgacagctgtgcggggcaagggcctgctgaatgccatcgtcatcaaggagaccaaggactgggatgcctggaaggtgtgcctgcggctgcgggacaatggcctgctggccaagcccacccacggggacatcatccgctttgccccacccctggtgatcaaggaggatgagctgcgggagagcattgagatcatcaacaagaccatcctgtccttctag

SEQ ID NO: 335723 - DNA, 1320 bp, Artificial Sequence
  derived and/or modified sequence
atgttcagcaagctggcccacctgcagcggttcgccgtgctgagccgcggggtgcattcttccgtggcttcagcgacgagcgttgccaccaagaaaacagtgcaaggaccaccgacatctgacgatatttttgagagagaatataaatacggcgcccacaattatcaccccctacccgtcgcactagagcgcggcaaaggcatctatctatgggacgtcgagggacggaagtacttcgactttctgtccagttactcagccgtcaaccagggacattgtcaccccaaaatcgtaaatgcgctgaaaagtcaggtggacaagctcacactgactagccgtgctttctacaacaatgtgcttggcgagtatgaagaatatattacaaaattgtttaactaccacaaggtcctgcccatgaacaccggtgtggaagccggggagacagcctgtaagctggcgaggaagtggggatacacagtcaaggggattcagaagtacaaagcaaagatcgtatttgcagctggtaacttctggggacgaacactgagcgccatcagcagctctaccgatcccacctcttatgacggatttggtcccttcatgccgggcttcgacattattccatataacgacttaccagctctggaacgcgcactgcaggacccaaacgtggcagcgtttatggtggagccgatacaaggcgaagccggtgtggtagtccccgatcccggataccttatgggcgtaagagagctatgtacgaggcaccaagtgttgttcatcgcagacgaaattcagaccgggctggcccgtaccggccgctggttggccgtcgattatgaaaacgttcggcccgacattgtccttctgggaaaagccttaagcggcgggttatatcccgtctctgcagtactgtgcgacgacgatattatgcttacaatcaagcctggggagcacggctctacatacggcggcaacccactgggatgtcgggtcgctattgcagctctggaagttctggaagaggagaacctggccgaaaatgccgataaattgggtattatccttcgcaatgaattgatgaagctacccagcgatgttgtgactgcagtgcgcgggaaaggtcttttgaacgcgatagtgataaaggaaacaaaggattgggacgcctggaaagtgtgccttaggctaagggacaatggcctgctggccaaacccacccatggcgatatcatacgcttcgcaccacccctggtcattaaggaggacgaactccgggagtccatcgagatcatcaacaaaacaattctctcattctag

SEQ ID NO: 335724 - DNA, 2048 bp, Artificial Sequence
  derived and/or modified sequence
ctccggcgtcactgttgcgcttcatagacgccgcgtgtacccggttgtcctcaggcgctgtcagatctgtggtttttctacttgaaggacacaatgttttccaaactagcacatttgcagaggtttgctgtacttagtcgcggagttcattcttcagtggcttctgctacatctgttgcaactaaaaaaacagtccaaggccctccaacctctgatgacatttttgaaagggaatataagtatggtgcacacaactaccatcctttacctgtagccctggagagaggaaaaggtatttacttatgggatgtagaaggcagaaaatattttgacttcctgagttcttacagtgctgtcaaccaagggcattgtcaccccaagattgtgaatgctctgaagagtcaagtggacaaattgaccttaacatctagagctttctataataacgtacttggtgaatatgaggagtatattactaaacttttcaactaccacaaagttcttcctatgaatacaggagtggaggctggagagactgcctgtaaactagctcgtaagtggggctataccgtgaagggcattcagaaatacaaagcaaagattgtttttgcagctgggaacttctggggtaggacgttgtctgctatctccagttccacagacccaaccagttacgatggttttggaccatttatgccgggattcgacatcattccctataatgatctgcccgcactggagcgtgctcttcaggatccaaatgtggctgcgttcatggtagaaccaattcagggtgaagcaggcgttgttgttccggatccaggttacctaatgggagtgcgagagctctgcaccaggcaccaggttctctttattgctgatgaaatacagacaggattggccagaactggtagatggctggctgttgattatgaaaatgtcagacctgatatagtcctccttggaaaggccctttctgggggcttataccctgtgtctgcagtgctgtgtgatgatgacatcatgctgaccattaagccaggggagcatgggtccacatacggtggcaatccactaggctgccgagtggccatcgcagcccttgaggttttagaagaagaaaaccttgctgaaaatgcagacaaattgggcattatcttgagaaatgaactcatgaagctaccttctgatgttgtaactgccgtaagaggaaaaggattattaaacgctattgtcattaaagaaaccaaagattgggatgcttggaaggtgtgtctacgacttcgagataatggacttctggccaagccaacccatggcgacattatcaggtttgcgcctccgctggtgatcaaggaggatgagcttcgagagtccattgaaattattaacaagaccatcttgtctttctgagggtagccagctgttttcagtggtccctgggagccagctggagacaggtggtcctgtaaaagctttattcctaatgtgggcacattccactcccatgagtcttcaaaaactttttttttgaatatatttttttcagttgatacataatagaacaacgtttatgaacctgccgtttgctttgtaacgtaactaaataatgtaatggcatctatattcagttgaagtgttttgatgtgcatgtgtacttcctaaggtgaaatgcatctatatacagacagcctctaaatcaagtccttcagtataattgatatatgtttttataatttcctcactggtataagtgtttcatatttgaaaaagttatctctgggtattgcataaaaggcttcatcttataaagtgaaatcattgttattgaattttaggaaggattaatggttaagtgtatataaaatactaatattaagtaaacttcatattggccaacaccagggttgtattctatggatgtcattattttgaattaagaattagtgtttaacattcctaaattgttttgagtgcttgattataatttgtaaaaaatgtttattttcaatacttctttaaatttaaaataaagcttatatttcaaa

SEQ ID NO: 335725 - DNA, 1864 bp, Artificial Sequence
  derived and/or modified sequence
ttgggggcggggcagaatcagcctttaagttgcagtgactctccggcgtcactgttgcgcttcatagacgccgcgtgtacccggttgtcctcaggcgctgtcaggtatttacttatgggatgtagaaggcagaaaatattttgacttcctgagttcttacagtgctgtcaaccaagggcattgtcaccccaagattgtgaatgctctgaagagtcaagtggacaaattgaccttaacatctagagctttctataataacgtacttggtgaatatgaggagtatattactaaacttttcaactaccacaaagttcttcctatgaatacaggagtggaggctggagagactgcctgtaaactagctcgtaagtggggctataccgtgaagggcattcagaaatacaaagcaaagattgtttttgcagctgggaacttctggggtaggacgttgtctgctatctccagttccacagacccaaccagttacgatggttttggaccatttatgccgggattcgacatcattccctataatgatctgcccgcactggagcgtgctcttcaggatccaaatgtggctgcgttcatggtagaaccaattcagggtgaagcaggcgttgttgttccggatccaggttacctaatgggagtgcgagagctctgcaccaggcaccaggttctctttattgctgatgaaatacagacaggattggccagaactggtagatggctggctgttgattatgaaaatgtcagacctgatatagtcctccttggaaaggccctttctgggggcttataccctgtgtctgcagtgctgtgtgatgatgacatcatgctgaccattaagccaggggagcatgggtccacatacggtggcaatccactaggctgccgagtggccatcgcagcccttgaggttttagaagaagaaaaccttgctgaaaatgcagacaaattgggcattatcttgagaaatgaactcatgaagctaccttctgatgttgtaactgccgtaagaggaaaaggattattaaacgctattgtcattaaagaaaccaaagattgggatgcttggaaggtgtgtctacgacttcgagataatggacttctggccaagccaacccatggcgacattatcaggtttgcgcctccgctggtgatcaaggaggatgagcttcgagagtccattgaaattattaacaagaccatcttgtctttctgagggtagccagctgttttcagtggtccctgggagccagctggagacaggtggtcctgtaaaagctttattcctaatgtgggcacattccactcccatgagtcttcaaaaactttttttttgaatatatttttttcagttgatacataatagaacaacgtttatgaacctgccgtttgctttgtaacgtaactaaataatgtaatggcatctatattcagttgaagtgttttgatgtgcatgtgtacttcctaaggtgaaatgcatctatatacagacagcctctaaatcaagtccttcagtataattgatatatgtttttataatttcctcactggtataagtgtttcatatttgaaaaagttatctctgggtattgcataaaaggcttcatcttataaagtgaaatcattgttattgaattttaggaaggattaatggttaagtgtatataaaatactaatattaagtaaacttcatattggccaacaccagggttgtattctatggatgtcattattttgaattaagaattagtgtttaacattcctaaattgttttgagtgcttgattataatttgtaaaaaatgtttattttcaatacttctttaaatttaaaataaagcttatatttcaaatgtc

SEQ ID NO: 335726 - DNA, 1320 bp, Artificial Sequence
  derived and/or modified sequence
atgttttcaaagctggcccatctgcagcgcttcgcagtgctaagccgcggagtccattcctcggtggctagcgcaacttctgtggctacgaagaagaccgttcaggggccaccaacttctgacgatatctttgagagagagtacaaatatggagctcataattaccaccctctgcctgtcgcactagaacgcggaaagggaatttatctttgggacgtggagggaagaaagtacttcgatttcctttcttcgtatagtgcagtgaatcagggacattgccacccaaagatagtgaatgctctgaaatcccaggttgataagctcacattaacctcccgtgcattctacaacaacgttcttggcgagtatgaggagtacatcacaaagctttttaactatcataaggtgctgccgatgaatactggcgtcgaggctggtgagacggcttgcaagctggccagaaaatggggctacaccgtgaagggaattcaaaaatataaagccaagatagtctttgctgctggcaatttctggggtaggactttgtctgccatatctagtagcacagacccaacatcttatgacggattcggcccttttatgccagggtttgacatcatcccgtataacgaccttccagcacttgagagagccctgcaagaccccaacgttgccgcattcatggtcgaaccaattcagggagaagcgggtgtagtcgtgccagacccaggttacctaatgggcgtgagagagctctgcacacggcaccaggtgttgttcatcgcagatgagatccagactggactggccagaacaggccgttggctggccgtagattacgagaacgtgcgacccgacatcgtgctgctcggcaaggcactaagtggagggctgtatcccgtctctgccgtcctgtgtgatgatgacatcatgctcactattaaacctggtgaacacgggtctacctacggcggaaaccctcttggatgccgggttgctatcgctgcccttgaggtgcttgaagaggaaaacctggctgagaatgctgataagcttggaatcatccttcggaatgagttgatgaagctgcctagcgatgtggtcacagccgtccggggaaagggactcctgaatgccattgtgatcaaagagacaaaggactgggacgcctggaaagtgtgtctccgtctcagagataacggactcctggccaaaccgactcatggtgacatcatccgctttgcccctccgctggttatcaaggaggacgagcttcgcgaaagcatcgaaatcatcaataagacgattctgagcttctag

SEQ ID NO: 335727 - DNA, 1320 bp, Artificial Sequence
  derived and/or modified sequence
atgttcagcaagctggcccacctgcagagattcgccgtgctgagcagaggcgtgcacagcagcgtggccagcgccaccagcgtggccaccaagaagaccgtgcagggcccccccaccagcgacgacatcttcgagagagagtacaagtacggcgcccacaactaccaccccctgcccgtggccctggagagaggcaagggcatctacctgtgggacgtggagggcagaaagtacttcgacttcctgagcagctacagcgccgtgaaccagggccactgccaccccaagatcgtgaacgccctgaagagccaggtggacaagctgaccctgaccagcagagccttctacaacaacgtgctgggcgagtacgaggagtacatcaccaagctgttcaactaccacaaggtgctgcccatgaacaccggcgtggaggccggcgagaccgcctgcaagctggccagaaagtggggctacaccgtgaagggcatccagaagtacaaggccaagatcgtgttcgccgccggcaacttctggggcagaaccctgagcgccatcagcagcagcaccgaccccaccagctacgacggcttcggccccttcatgcccggcttcgacatcatcccctacaacgacctgcccgccctggagagagccctgcaggaccccaacgtggccgccttcatggtggagcccatccagggcgaggccggcgtggtggtgcccgaccccggctacctgatgggcgtgagagagctgtgcaccagacaccaggtgctgttcatcgccgacgagatccagaccggcctggccagaaccggcagatggctggccgtggactacgagaacgtgagacccgacatcgtgctgctgggcaaggccctgagcggcggcctgtaccccgtgagcgccgtgctgtgcgacgacgacatcatgctgaccatcaagcccggcgagcacggcagcacctacggcggcaaccccctgggctgcagagtggccatcgccgccctggaggtgctggaggaggagaacctggccgagaacgccgacaagctgggcatcatcctgagaaacgagctgatgaagctgcccagcgacgtggtgaccgccgtgagaggcaagggcctgctgaacgccatcgtgatcaaggagaccaaggactgggacgcctggaaggtgtgcctgagactgagagacaacggcctgctggccaagcccacccacggcgacatcatcagattcgccccccccctggtgatcaaggaggacgagctgagagagagcatcgagatcatcaacaagaccatcctgagcttctag

SEQ ID NO: 335728 - protein, 124 aa, Artificial Sequence
  derived and/or modified sequence
MVKLGCSFSGKPGKDPGDQDGAAMDSVPLISPLDISQLQPPLPDQVVIKTQTEYQLSSPDQQNFPDLEGQRLNCSHPEEGRRLPTARMIAFAMALLGCVLIMYKAIWYDQFTCPDGFLLRGPEF

SEQ ID NO: 335729 - DNA, 477 bp, Artificial Sequence
  derived and/or modified sequence
atggtgaagctgggctgcagcttcagcggcaagcccggcaaggaccccggcgaccaggacggcgccgccatggacagcgtgcccctgatcagccccctggacatcagccagctgcagccccccctgcccgaccaggtggtgatcaagacccagaccgagtaccagctgagcagccccgaccagcagaacttccccgacctggagggccagagactgaactgcagccaccccgaggagggcagaagagtgaccacccccaccccccccaccgtgggcacccaggacagaagaagaagatggaaggccgccggcggcgcctgggtgcccagcagacccgtgtggggccccctggccctgagagaggagagagtggccgtgagccaccccgcccagagctggccccacagactgccctgcacccaccaggcccccagcagaggctgcagatgcagactgaccaagcagtggagaagctag

SEQ ID NO: 335730 - DNA, 375 bp, Artificial Sequence
  derived and/or modified sequence
atggtgaagctgggctgcagcttcagcggcaagcccggcaaggaccccggcgaccaggacggcgccgccatggacagcgtgcccctgatcagccccctggacatcagccagctgcagccccccctgcccgaccaggtggtgatcaagacccagaccgagtaccagctgagcagccccgaccagcagaacttccccgacctggagggccagagactgaactgcagccaccccgaggagggcagaagactgcccaccgccagaatgatcgccttcgccatggccctgctgggctgcgtgctgatcatgtacaaggccatctggtacgaccagttcacctgccccgacggcttcctgctgagaggccccgagttctag

SEQ ID NO: 335731 - DNA, 477 bp, Artificial Sequence
  derived and/or modified sequence
atggtcaagctcggttgttcctttagcggaaagcccggcaaagatccgggagatcaagatggcgccgctatggattccgtacccctgatttctccgctggatatctctcaactgcagccaccactgccggaccaggtggtgatcaagactcaaacagagtatcagttatcaagccctgaccagcagaacttccccgacctggaaggccagcgcctgaattgtagtcaccctgaagaaggcaggagggtgactacacctacaccgccaactgtggggacacaggaccggcgccgtcgctggaaagccgctgggggcgcttgggttccctctcgtcctgtgtggggcccattggcacttcgggaggaaagggtggctgtgagtcatcccgcccagagctggcctcatcgccttccctgcacgcatcaggccccctcccgcggctgtagatgtaggctgactaagcagtggcggtcatag

SEQ ID NO: 335732 - DNA, 375 bp, Artificial Sequence
  derived and/or modified sequence
atggttaagctaggctgcagtttttctgggaagcctggaaaggatcctggtgatcaggacggggccgctatggactccgtcccactgattagccccttggatatctcacaactgcagcccccactgcccgaccaagtggttattaaaactcaaacagagtatcagttgtcgagtccggatcagcagaattttccagacctcgaaggccagaggctgaattgcagccacccagaggagggtcgacgcctgcctaccgcccggatgatcgcatttgcaatggctttgctaggatgcgtgctcattatgtacaaggccatctggtacgatcagtttacatgccctgatggtttcctcctgcgaggccccgagttctag

SEQ ID NO: 335733 - DNA, 375 bp, Artificial Sequence
  derived and/or modified sequence
atggtcaagcttggatgcagcttttctggaaaaccaggcaaggatcctggcgatcaagatggagccgcaatggattcggttcctctgatctctcctctggacatcagtcagcttcaaccacccctgcctgatcaagtcgtgattaagacacaaacagaataccaattatccagtcccgatcaacaaaattttcctgatctggaggggcaacggctcaactgttcccatcctgaggaaggcagacggctgcctacagcacggatgattgcgtttgccatggcccttttaggatgcgtcttaattatgtacaaagccatctggtatgaccagttcacgtgcccggatggctttctgcttcggggcccagaattctag

SEQ ID NO: 335734 - DNA, 477 bp, Artificial Sequence
  derived and/or modified sequence
atggtgaagctgggctgcagcttcagcggcaagccaggcaaggaccccggggaccaggatggagctgccatggacagcgtgcccctcatcagccccctggacatcagccagctgcagccccccctgcctgaccaggtggtgatcaagacccagacagagtaccagctgagcagcccagaccagcagaacttcccagacctggagggccagaggctgaactgcagccaccctgaggagggcagaagagtgaccacccccaccccacccaccgtgggcacccaggacagaagaagacgctggaaggctgctggaggagcctgggtgcccagcaggcctgtgtggggccccctggccctgcgggaggagcgggtggccgtgagccacccagcccagagctggccccaccggctgccctgcacccaccaggcccccagccggggctgccgctgccgcctgaccaagcagtggaggagctag

SEQ ID NO: 335735 - DNA, 375 bp, Artificial Sequence
  derived and/or modified sequence
atggtgaagctgggctgcagcttcagcggcaagccaggcaaggaccccggggaccaggatggagctgccatggacagcgtgcccctcatcagccccctggacatcagccagctgcagccccccctgcctgaccaggtggtgatcaagacccagacagagtaccagctgagcagcccagaccagcagaacttcccagacctggagggccagaggctgaactgcagccaccctgaggagggccgccgcctgcccacagccaggatgattgcctttgccatggccctgctgggctgtgtgctgatcatgtacaaggccatctggtatgaccagttcacctgcccagatggcttcctgctgcggggccctgagttctag

SEQ ID NO: 335736 - DNA, 477 bp, Artificial Sequence
  derived and/or modified sequence
atggtgaagctgggctgcagcttcagcggcaagcccggcaaggaccccggcgatcaggatggggcagcaatggactccgtgcccctgattagtcctctggatatctctcagttacagccacctctgccagatcaagtggtgattaaaacacagaccgaataccaactctcttcacccgatcagcagaattttcctgacctggaagggcagaggttgaattgttcacaccccgaagagggaaggcgcgtgacaacacccactccccccaccgtggggactcaagaccgccgccgtcgctggaaggcagccggtggcgcatgggtgccaagtagaccagtctggggcccgttggcgctgcgagaagaacgtgtggccgtgagccaccctgcccaatcatggcctcaccggctgccttgtacccaccaggctccaagccggggctgcagatgccgattgactaagcaatggaggtcgtag

SEQ ID NO: 335737 - DNA, 375 bp, Artificial Sequence
  derived and/or modified sequence
atggtgaagctgggctgcagcttcagcggcaagcccggcaaggacccaggtgatcaagatggtgccgccatggattctgtgcccctcattagccccttggacatcagtcagttacagccgcctttgcccgaccaggtagtcatcaagacacagactgagtatcaattgagcagcccagatcagcagaacttccccgacctggaaggacagcgccttaactgctcccatcctgaagaaggacgccggctccccaccgcgcgcatgatcgccttcgcaatggctttgctggggtgtgtgctcatcatgtataaggccatctggtatgatcagttcacatgccccgacgggttcctcctaaggggtccggagttttag

SEQ ID NO: 335738 - DNA, 375 bp, Artificial Sequence
  derived and/or modified sequence
atggtgaagctgggctgcagcttcagcggcaagcccggcaaggaccctggagaccaggacggcgccgctatggattcagtcccgttgatatccccgctggacatctctcaactgcaaccccccttgcccgatcaggtcgtgataaaaactcagaccgaataccagctgtcatcccctgatcagcaaaatttcccagatttagaaggacagagacttaactgttcacatcctgaggaagggaggcggctgcccactgctaggatgattgccttcgctatggcccttctgggctgcgtgctgatcatgtataaggcgatctggtatgatcagtttacctgtcccgacggctttctgctgcggggcccagaattctag

SEQ ID NO: 335739 - DNA, 477 bp, Artificial Sequence
  derived and/or modified sequence
atggtgaagctggggtgttccttcagtggtaagcctggaaaagatccaggcgaccaggacggggcagccatggatagtgtcccgctaatctccccgctggatattagtcagttacagccacctctgcctgatcaggttgttattaaaacccagacagaatatcagctttcaagtccggaccaacagaatttccccgatctggaaggccaacgactcaactgcagccacccagaggagggacgacgcgtgacaacacccaccccacccaccgtgggaacgcaggaccgcaggcggaggtggaaggcagccggtggcgcttgggtccccagcaggcccgtgtggggacccctggcactgagagaggagagagtagcagtctcacaccctgctcagtcctggccccatagactgccatgcacccaccaggcccctagccgaggatgcaggtgcaggcttaccaagcagtggagaagctag

SEQ ID NO: 335740 - DNA, 375 bp, Artificial Sequence
  derived and/or modified sequence
atggtcaaactaggatgctctttctcaggcaaacccggaaaggaccctggagatcaagatggagcagctatggacagcgtccctctcatatcaccattagacatatctcagctccaacccccactgccagaccaagtggtgattaaaacacagacggaataccaactgtcctctcctgaccagcaaaacttcccagacctcgagggccagaggcttaattgctcccatcccgaagagggtagaagactgccgaccgcgaggatgatcgcctttgctatggcattgctagggtgcgtgctgatcatgtacaaagcgatttggtacgaccagttcacatgccctgacggattcctgttgagaggacccgaattctag

SEQ ID NO: 335741 - DNA, 375 bp, Artificial Sequence
  derived and/or modified sequence
atggttaagctggggtgcagctttagcggaaaacctggtaaagatcctggggatcaggacggagccgctatggactccgtgcccctgatatcaccattagacattagccagcttcaacctcctcttcccgaccaagtcgtcatcaagacccaaactgagtaccagctttcaagtccggatcagcagaactttcctgacctcgaaggccagagactgaactgctcacatcctgaagagggccgaagattgcctacagctagaatgatcgcatttgccatggccctgctaggatgtgttctgatcatgtacaaggccatctggtacgatcagtttacttgcccggacggatttttgttgcggggacccgagttctag

SEQ ID NO: 335742 - DNA, 783 bp, Artificial Sequence
  derived and/or modified sequence
cccgaccgcgtcctgcagcagctgccagtggagccgcctgacaaggactgccatccaccatggtgaagctgggctgcagcttctctgggaagccaggtaaagaccctggggaccaggatggggctgccatggacagtgtgcctctgatcagccccttggacatcagccagctccagccgccactccctgaccaggtggtcatcaagacacagacagaataccagctgtcctccccagaccagcagaatttccctgacctggagggccagaggctgaactgcagccacccagaggaagggcgcagggtaaccacacccaccccacccactgtggggactcaggacaggaggagaaggtggaaggcagctgggggtgcctgggttccgtccaggccagtctggggtccccttgctctcagggaggagagggtggcagtgagtcatcccgcccagagctggccccaccggctgccctgcacccaccaggccccctcccgaggctgcaggtgcagactgaccaaacagtggcgctcctgagatgtttttctttctgggaagtgcccgcgagtgctgcttgcttgtttgcccagtgggtcattgtctcatcttcagtgacttacgggctttctatgtaatacttcctttctgcagtatatctggcaaatatcttctctcatcctcttgtttaaatctgtcaatgttactaatgatagctttagtcatttttagtggactgtttccaaagccttccattctccagtagacagatctgctagggctcccc

SEQ ID NO: 335743 - DNA, 533 bp, Artificial Sequence
  derived and/or modified sequence
cgaccacagcctcggtctcgcagctgcagcccccgccccgcccggccgcgaagcgtctggaaccgcatcctccgcatccacatccgcatcgtcgtcctccccgaccgcgtcctgcagcagctgccagtggagccgcctgacaaggactgccatccaccatggtgaagctgggctgcagcttctctgggaagccaggtaaagaccctggggaccaggatggggctgccatggacagtgtgcctctgatcagccccttggacatcagccagctccagccgccactccctgaccaggtggtcatcaagacacagacagaataccagctgtcctccccagaccagcagaatttccctgacctggagggccagaggctgaactgcagccacccagaggaagggcgcaggctgcccaccgcacggatgatcgccttcgccatggcgctactgggctgcgtgctgatcatgtacaaggccatctggtacgaccagttcacctgccccgacggcttcctgctgcggggccctgagttctga

SEQ ID NO: 335744 - DNA, 825 bp, Artificial Sequence
  derived and/or modified sequence
cccgcccggccgcgaagcgtctggaaccgcatcctccgcatccacatccgcatcgtcgtcctccccgaccgcgtcctgcagcagctgccagtggagccgcctgactgccatccaccatggtgaagctgggctgcagcttctctgggaagccaggtaaagaccctggggaccaggatggggctgccatggacagtgtgcctctgatcagccccttggacatcagccagctccagccgccactccctgaccaggtggtcatcaagacacagacagaataccagctgtcctccccagaccagcagaatttccctgacctggagggccagaggctgaactgcagccacccagaggaagggcgcaggctgcccaccgcacggatgatcgccttcgccatggcgctactgggctgcgtgctgatcatgtacaaggccatctggtacgaccagttcacctgccccgacggcttcctgctgcggggccctgagttctgaactggaggctgatcttcggtgtcctgaagccatggctccattacaaactgtccgcagtgtccccaaccgcagaagcgggagggcctgggcccggggcgcacaggagggctcagccccaccgaccctgacccggcccctcccgcagcacaagatctgcacgccgctgaccctggagatgtactacacggagatggaccccgagcgccaccgcagcatcctggcggccatcggggcctacccgctgagccgcaagcacggcacggagacgccggcggcctggggggacggctaccgcgcagccaaggaggagcgcaaggggcccacccaggctggg

SEQ ID NO: 335745 - protein, 292 aa, Artificial Sequence
  derived and/or modified sequence
  misc_feature (1)..(1): Xaa can be any naturally occurring amino acid
XYKHIVGKRGDTRKKIEMETKTSISIPKPGQDGEIVITGQHRNGVISARTRIDVLLDTFRRKQPFTHFLAFFLNEVEVQEGFLRFQEEVLAKCSMDHGVDSSIFQNPKKLHLTIGMLVLLSEEEIQQTCEMLQQCKEEFINDISGGKPLEVEMAGIEYMNDDPGMVDVLYAKVHMKDGSNRLQELVDRVLERFQASGLIVKEWNSVKLHATVMNTLFRKDPNAEGRYNLYTAEGKYIFKERESFDGRNILKSFALLPRLEYNDAISAHCNLCLPGSSDSPASASQVAGITVV

SEQ ID NO: 335746 - protein, 275 aa, Artificial Sequence
  derived and/or modified sequence
METKTSISIPKPGQDGEIVITGQHRNGVISARTRIDVLLDTFRRKQPFTHFLAFFLNEVEVQEGFLRFQEEVLAKCSMDHGVDSSIFQNPKKLHLTIGMLVLLSEEEIQQTCEMLQQCKEEFINDISGGKPLEVEMAGIEYMNDDPGMVDVLYAKVHMKDGSNRLQELVDRVLERFQASGLIVKEWNSVKLHATVMNTLFRKDPNAEGRYNLYTAEGKYIFKERESFDGRNILKSFALLPRLEYNDAISAHCNLCLPGSSDSPASASQVAGITVV

SEQ ID NO: 335747 - DNA, 879 bp, Artificial Sequence
  derived and/or modified sequence
tgatacaaacacattgtgggaaaaaggggagatacccgcaagaaaattgaaatggagaccaagacaagtattagtatacctaagcccggccaggacggggaaattgtcataacaggacagcatcgcaacggcgtgattagtgcgcgcacccgcatcgacgtcctgctggataccttcaggcgcaaacaaccattcacccactttctcgcttttttcctgaatgaggtggaagtgcaggaaggttttctccggtttcaagaggaggtgctagccaaatgttccatggaccacggggttgattcatcgatcttccagaatcccaagaagctgcaccttaccattggtatgctggtgctcctgagcgaagaggagattcaacagacttgcgagatgctgcaacagtgcaaggaggagttcataaatgacataagcggaggaaagcccctggaagttgaaatggctgggattgagtatatgaacgacgatccaggcatggttgatgtgttgtacgccaaagttcatatgaaggatggttctaatagactacaggaactagtcgatcgcgttcttgaacgttttcaggcgagcgggctgattgtcaaagaatggaatagtgtcaaactccatgctaccgtaatgaacacgctgttcagaaaggaccctaatgcagaaggaagatataacctctatacagctgaaggaaagtatatattcaaagagcgtgagtcattcgacggcaggaacattctgaagtcatttgcgctgctgcctaggctggaatacaacgacgccatttcagcccactgtaatctgtgtctgccgggaagctcagactcacctgctagtgcatcccaggttgctggtataacagttgtgtag

SEQ ID NO: 335748 - DNA, 828 bp, Artificial Sequence
  derived and/or modified sequence
atggaaacaaaaacgtccatatctattccaaaaccaggccaggacggggagattgtgataactggccagcaccggaacggagtgattagcgctcgtacacggatcgatgtcttattggacacttttagacgcaagcagccttttacccactttttggccttctttctcaacgaggttgaagttcaggaaggattcctgcgtttccaagaggaggtgctggctaagtgtagtatggatcacggggtggactcctctatatttcagaatcctaaaaaattacatctgacaattggcatgttggttttactctcagaagaggagatacagcagacgtgtgagatgttacagcagtgcaaggaggagtttattaacgacatctcaggcggaaagcccctcgaggtggagatggccggtatcgaatacatgaacgacgatcccggcatggtggatgtgctgtacgccaaggtccacatgaaagatggatccaacagactacaggagttggtcgatcgcgtgctcgagcggttccaggcctcagggctgattgttaaagagtggaatagcgtgaagctgcacgccaccgttatgaacaccctgtttcgcaaagaccctaatgctgagggaaggtataacctgtacactgcggaggggaagtatatctttaaagagagagagtcatttgatggccgcaatatactcaaatcatttgcgttattgcctcgactcgaatacaatgacgccattagcgcccattgcaacctctgtttgcctggatcatctgatagccccgccagcgcatcacaagtagctggcatcaccgtggtatag

SEQ ID NO: 335749 - DNA, 879 bp, Artificial Sequence
  derived and/or modified sequence
tgatacaagcacatcgtgggcaagagaggagacaccaggaagaagattgagatggagaccaagaccagcatcagcatccccaagccaggccaggatggagaaattgtcatcaccggccagcacagaaatggagtcatcagcgcccggaccagaattgatgtgctgctggacaccttccggaggaagcagcccttcacccacttcctggccttcttcctgaatgaggtggaggtgcaggagggcttcctgcgcttccaggaggaggtgctggccaagtgcagcatggaccatggagtggacagcagcatcttccagaaccccaagaagctgcacctgaccatcggcatgctggtgctgctgtctgaggaggagatccagcagacctgtgagatgctgcagcagtgcaaggaggagttcatcaatgacatcagcggcggcaagcccctggaggtggagatggccggcatcgagtacatgaatgatgatcctggcatggtggatgtgctgtatgccaaggtgcacatgaaggatggcagcaaccggctgcaggagctggtggacagagtgctggagcgcttccaggccagcggcctgattgtgaaggagtggaacagcgtgaagctgcacgccaccgtgatgaacaccctcttcaggaaggaccccaatgctgagggccgctacaacctgtacacagctgagggcaagtacatcttcaaggagcgggagagctttgatggaagaaacatcctgaagagctttgccctgctgccccggctggagtacaatgatgccatcagcgcccactgcaacctgtgcctgcccggcagcagtgacagccctgccagcgccagccaggtggccggcatcaccgtggtgtag

SEQ ID NO: 335750 - DNA, 828 bp, Artificial Sequence
  derived and/or modified sequence
atggagaccaagaccagcatcagcatccccaagccaggccaggatggagagatcgtcatcaccggccagcacagaaatggagtcatcagcgcccggaccagaattgatgtgctgctggacaccttccggaggaagcagcccttcacccacttcctggccttcttcctgaatgaggtggaggtgcaggagggcttcctgcgcttccaggaggaggtgctggccaagtgcagcatggaccacggcgtggacagcagcatcttccagaaccccaagaagctgcacctgaccatcggcatgctggtgctgctgtctgaggaggagatccagcagacctgtgagatgctgcagcagtgcaaggaggagttcatcaatgacatcagcggcggcaagcccctggaggtggagatggccggcatcgagtacatgaatgatgaccccggcatggtggatgtgctgtatgccaaggtgcacatgaaggatggcagcaaccggctgcaggagctggtggacagagtgctggagcgcttccaggccagcggcctcatcgtgaaggagtggaacagcgtgaagctgcacgccaccgtgatgaacaccctcttcaggaaggaccccaatgctgagggccgctacaacctgtacacagctgagggcaagtacatcttcaaggagcgggagagctttgatggcaggaacatcctgaagagctttgccctgctgccccggctggagtacaatgatgccatcagcgcccactgcaacctgtgcctgcccggcagcagtgacagccctgccagcgccagccaggtggccggcatcaccgtggtgtag

SEQ ID NO: 335751 - DNA, 879 bp, Artificial Sequence
  derived and/or modified sequence
tgatacaagcacatcgtgggcaagcggggcgacacccggaagaagatcgaaatggagaccaagacaagcatcagcatccccaaacctggtcaagatggtgagattgtgatcactggtcagcacagaaacggtgtgatttccgccaggacaagaatcgatgtgttgcttgacaccttccgccgtaaacagccatttacccacttcttggcgttctttttgaatgaagtggaggtgcaggaagggtttttgcggtttcaggaagaagtgcttgcgaagtgctctatggaccacggcgtggactcatctattttccaaaatccaaaaaagctgcacctaaccataggtatgctggtgctcctcagtgaggaagaaatccaacaaacttgcgagatgttacagcagtgtaaagaggagttcatcaatgatataagtgggggaaagcccctggaggtggagatggcggggatcgagtatatgaacgatgacccgggcatggtggatgtgttgtatgcaaaggtgcacatgaaggatggttctaatcgtttacaggaactcgtggacagagttctggaaaggtttcaggcaagcggccttattgttaaggaatggaattctgtaaagctacatgctacagttatgaatacgctctttcgtaaggatccaaacgccgagggccgatacaatttatacacggcagaaggcaaatatatcttcaaggaaagagaaagttttgacggcaggaatatcttaaaatcttttgccctgttaccccgcctcgagtacaatgatgcaatcagtgcgcattgtaacctatgcttacctgggtcttcagactcccccgcctcagcctcgcaggtagccgggattaccgtagtgtag

SEQ ID NO: 335752 - DNA, 828 bp, Artificial Sequence
  derived and/or modified sequence
atggagaccaagaccagcatcagcatccccaagcccggccaggacggtgagatcgtaataaccgggcagcatcgcaacggagtgatcagtgcgcgcactaggatagacgttctgttagacactttccgcagaaagcagcctttcactcacttcctcgcattcttccttaacgaagtggaggtgcaggagggttttctccgattccaagaagaagtgctggcgaaatgttcaatggatcacggtgtggattcttcaatcttccagaatcctaagaaactgcacttgactatcggaatgcttgtcctgctcagtgaggaagaaatacagcagacctgcgagatgctgcaacagtgtaaggaagagtttataaacgacatatcgggcggcaagcccctggaagtggagatggccggtattgagtacatgaatgacgacccagggatggtggacgtgctgtacgccaaagtgcatatgaaggatggaagcaacaggctgcaggaactggtcgaccgggtgcttgagcgctttcaggccagcggcctgattgtcaaggagtggaatagtgtgaagctgcacgcaacagtcatgaacaccttattcagaaaggacccgaatgccgagggaagatacaatctttacacagccgagggcaagtatatcttcaaggagagggaatcatttgatgggagaaacattttaaaatcttttgccctcctgccaaggctcgaatataatgacgcaatctcagcccattgcaatttatgtctcccgggtagcagcgacagtcccgcttccgcgtctcaagtcgccggcataacagtggtgtag

SEQ ID NO: 335753 - DNA, 879 bp, Artificial Sequence
  derived and/or modified sequence
tgatacaaacacattgtcggcaaacggggtgacaccagaaaaaaaattgagatggaaacaaaaaccagtatttccatccctaagcccggtcaggatggggaaatcgtgattaccgggcagcaccgcaacggtgtgatatccgcccgaactcgaatcgatgtgctgttggatactttccgccgaaaacagccgttcacccactttctcgcattctttctcaatgaggtcgaggtccaggagggcttcctccggtttcaggaagaagtcctggctaagtgttcgatggaccatggagtggactcctctatctttcagaaccctaagaagctccatctcaccatagggatgctggtgctcctgagtgaagaggaaatccaacagacctgcgaaatgctgcagcagtgcaaggaggagttcataaacgacatcagcggaggcaaaccactagaggtagagatggcagggattgaatacatgaatgatgaccctggcatggtcgacgtgctgtatgcaaaggttcacatgaaggatggaagcaatcggttgcaggagctggtggatcgggtgctcgagagatttcaggcctctggacttatagttaaggaatggaactcagttaagctgcacgccacagtcatgaataccctatttaggaaggaccccaatgccgagggtcggtacaacctatatacagccgaaggcaagtatattttcaaggagagagagagcttcgatgggagaaatatattaaaaagtttcgcactgctgcctcgactggaatacaatgacgccatatctgctcactgtaacctgtgcttgcctggatctagtgacagtccagcttcagcatcccaggttgccggtatcacggtggtgtag

SEQ ID NO: 335754 - DNA, 828 bp, Artificial Sequence
  derived and/or modified sequence
atggaaaccaaaacttccatctccatcccaaagccaggccaggacggagagattgtaattacgggccagcatcgaaatggagttatttctgccagaacacgaatcgacgtgctgctggacaccttccgacgtaaacagccgtttacacacttccttgccttttttctgaacgaagtggaggttcaagagggctttcttaggtttcaagaggaggtgctggccaaatgtagcatggaccatggagtggattcatccatttttcaaaacccaaaaaagctccatctcaccatcgggatgctggtgcttctctccgaagaagagatccagcagacttgcgagatgttgcagcaatgtaaggaggagttcatcaacgacatcagtggaggcaaaccactagaagtcgagatggccggaattgagtacatgaacgatgatcctggtatggtcgacgtgttatacgccaaagtgcacatgaaagacggcagtaacagacttcaggaactcgttgaccgggtcttagagcgtttccaggcctccggtctgatcgtaaaggaatggaacagtgtgaaactgcatgccactgtaatgaacaccctcttccggaaagaccccaatgccgagggcagatataacctgtacacggccgagggcaaatatatctttaaagagcgggagagcttcgacggcaggaacatacttaaatctttcgccctgttacctaggctggagtataacgatgccattagcgctcattgcaacctctgcctgcccggatcctccgattcaccggcatctgccagccaggtcgcaggaattacagttgtgtag

SEQ ID NO: 335755 - DNA, 1798 bp, Artificial Sequence
  derived and/or modified sequence
ctataagcatatagttggaaagagaggggacactaggaagaaaatagaaatggagaccaaaacttctattagcattcctaaacctggacaagacggggaaattgtaatcactggccagcatcgaaatggtgtaatttcagcccgaacacggattgatgttcttttggacacttttcgaagaaagcagcccttcactcacttccttgcctttttcctcaatgaagttgaggttcaggaaggattcctgagattccaggaggaagtactggcgaagtgctccatggatcatggggttgacagcagcattttccagaatcctaaaaagcttcatctaactattgggatgttggtgcttttgagtgaggaagagatccagcagacatgtgagatgctacagcagtgtaaagaggaattcattaatgatatttctgggggtaaacccctagaagtggagatggcagggatagaatacatgaatgatgatcctggcatggtggatgttctttacgccaaagtccatatgaaagatggctccaacaggctacaagaattagttgatcgagtgctggaacgttttcaggcatctggactaatagtgaaagagtggaatagtgtgaaactgcatgctacagttatgaatacactattcaggaaagaccccaatgctgaaggcaggtacaatctctacacagcggaaggcaaatatatcttcaaggaaagagaatcatttgatggccgaaatattttaaagagctttgccttgttgcccaggctggagtacaatgatgcaatctccgctcactgcaacctgtgcctcccgggttcaagtgattctcctgcctcagcctcccaagtagctgggattacagttgtttgagaacttctactttggctccctaaagctgaattcaattcacatctctcagaggttcaccgtagacagctttggaaactacgcttcctgtggacaaattgacttctcctgaggtggatcttggaaagcactagaaactaaacatcttcaccaggtgctgaagaaaagtgtcttcgttttaattgccaagcagggatgtggacatttggatggtgactttcctgggtggttccccatagattcaccattgcctctaatggtgtctacacccgtcatactaccagctgagatggtggtgggcataaggagaatttgtgcctataacccttagtgtgttctggttttttttcttttaatttttaaattgtcgtaaaatactcataaaacatactgtcttcaccatttttaagtgcacagttcagtaacgttaactgttaatacattcataatgctgtgtggccgtcaccgccgtccatctccataggcttctcagcttgtaaaatggaaactgtacccattaaacagtaattcccactcctcccagcccccgcagccaccattctgctttctgtctctctggttttgactattctcagtatctcatataagtggaatcatacagtgacttgtctttttgtgactggcttatttcacttagcataatgtcctcaaggttcatccatgttgtgtcaggtgacaggatttccttcctgtattatacatataatggaatgttccgttacatgtgcgtaccacactctgttcctccatcagtgaacacttggcttgcttcctcttgactattgggagtagtgctaatacagacacgggggtgcaaatatctctttgagactctgcctttaattcctttaccacccagagttttatctttagcaaaataaccattaaagttgtttgcctttt

SEQ ID NO: 335756 - DNA, 2823 bp, Artificial Sequence
  derived and/or modified sequence
agatgctgcatttgctgtctccgcgacaactgcctgttcttccggagctcgtggtctgagggcccgactttcatcttagtctgtttttgtggggaacattttttttttaagcttttcctttgaaagtcttttttcgttgagaactttagaggcctcggggaataggccactgggttgtgatgtcatcgagtattgctaatgatgtgcccttttcctccatccatgtcggtttaccttctgtgttgttatttctcacgaaacctcttcttggttctgtaagcgcacaactcatcaattattattttatttatttttttgagacgaagtctcgctctgtcgcccaggctggagtgcagtggcgcgatctcagctcactgcaacctccgcctctcaggcttaagccattctcgtgcctcagctttcccagtagttgggactacaggcgcccgccaccacacccggctactttctgtattttcagtagagacggggtttcatcatgttggcctggctggtctcgaactcctggcctcagatgatccgcctcggcctcctaaagtgctgggattacagacgtgagccaccgcgcccacgttggcttgaacattagtgtatttagtaaggatcaacttgttttctttggaacttttaagtattttgggcttcaagactatctaagctgtacgtggtaggaatattggttgaatttaacctcagctagcctgtaaggaacctttgtttcctaaattattgattcattaagtgatgtgaccagaagcttggcttcgcagtgagcgatgtgcattttgttgggcagtggcctgtggaaattggattccccccttcagcagtatgttggtctgagaaccatattggttaagttgttattttaactgtgctttaacagacaactggaactgattgtttggtatgaatttctagcacctctaaaagtacttaggggcttttttttttctggatggttaagtgtattaaatatccctcattgtcttaattatcttgctagataggcatatagttggaaagagaggggacactaggaagaaaatagaaatggagaccaaaacttctattagcattcctaaacctggacaagacggggaaattgtaatcactggccagcatcgaaatggtgtaatttcagcccgaacacggattgatgttcttttggacacttttcgaagaaagcagcccttcactcacttccttgcctttttcctcaatgaagttgaggttcaggaaggattcctgagattccaggaggaagtactggcgaagtgctccatggatcatggggttgacagcagcattttccagaatcctaaaaagcttcatctaactattgggatgttggtgcttttgagtgaggaagagatccagcagacatgtgagatgctacagcagtgtaaagaggaattcattaatgatatttctgggggtaaacccctagaagtggagatggcagggatagaatacatgaatgatgatcctggcatggtggatgttctttacgccaaagtccatatgaaagatggctccaacaggctacaagaattagttgatcgagtgctggaacgttttcaggcatctggactaatagtgaaagagtggaatagtgtgaaactgcatgctacagttatgaatacactattcaggaaagaccccaatgctgaaggcaggtacaatctctacacagcggaaggcaaatatatcttcaaggaaagagaatcatttgatggccgaaatattttaaagagctttgccttgttgcccaggctggagtacaatgatgcaatctccgctcactgcaacctgtgcctcccgggttcaagtgattctcctgcctcagcctcccaagtagctgggattacagttgtttgagaacttctactttggctccctaaagctgaattcaattcacatctctcagaggttcaccgtagacagctttggaaactacgcttcctgtggacaaattgacttctcctgaggtggatcttggaaagcactagaaactaaacatcttcaccaggtgctgaagaaaagtgtcttcgttttaattgccaagcagggatgtggacatttggatggtgactttcctgggtggttccccatagattcaccattgcctctaatggtgtctacacccgtcatactaccagctgagatggtggtgggcataaggagaatttgtgcctataacccttagtgtgttctggttttttttcttttaatttttaaattgtcgtaaaatactcataaaacatactgtcttcaccatttttaagtgcacagttcagtaacgttaactgttaatacattcataatgctgtgtggccgtcaccgccgtccatctccataggcttctcagcttgtaaaatggaaactgtacccattaaacagtaattcccactcctcccagcccccgcagccaccattctgctttctgtctctctggttttgactattctcagtatctcatataagtggaatcatacagtgacttgtctttttgtgactggcttatttcacttagcataatgtcctcaaggttcatccatgttgtgtcaggtgacaggatttccttcctgtattatacatataatggaatgttccgttacatgtgcgtaccacactctgttcctccatcagtgaacacttggcttgcttcctcttgactattgggagtagtgctaatacagacacgggggtgcaaatatctctttgagactctgcctttaattcctttaccacccagagttttatctttagcaaaataaccattaaagttgtttgcctttt

SEQ ID NO: 335757 - DNA, 879 bp, Artificial Sequence
  derived and/or modified sequence
tgatacaagcacatcgtgggcaagagaggcgacaccagaaagaagatcgagatggagaccaagaccagcatcagcatccccaagcccggccaggacggcgagatcgtgatcaccggccagcacagaaacggcgtgatcagcgccagaaccagaatcgacgtgctgctggacaccttcagaagaaagcagcccttcacccacttcctggccttcttcctgaacgaggtggaggtgcaggagggcttcctgagattccaggaggaggtgctggccaagtgcagcatggaccacggcgtggacagcagcatcttccagaaccccaagaagctgcacctgaccatcggcatgctggtgctgctgagcgaggaggagatccagcagacctgcgagatgctgcagcagtgcaaggaggagttcatcaacgacatcagcggcggcaagcccctggaggtggagatggccggcatcgagtacatgaacgacgaccccggcatggtggacgtgctgtacgccaaggtgcacatgaaggacggcagcaacagactgcaggagctggtggacagagtgctggagagattccaggccagcggcctgatcgtgaaggagtggaacagcgtgaagctgcacgccaccgtgatgaacaccctgttcagaaaggaccccaacgccgagggcagatacaacctgtacaccgccgagggcaagtacatcttcaaggagagagagagcttcgacggcagaaacatcctgaagagcttcgccctgctgcccagactggagtacaacgacgccatcagcgcccactgcaacctgtgcctgcccggcagcagcgacagccccgccagcgccagccaggtggccggcatcaccgtggtgtag

SEQ ID NO: 335758 - DNA, 828 bp, Artificial Sequence
  derived and/or modified sequence
atggagaccaagaccagcatcagcatccccaagcccggccaggacggcgagatcgtgatcaccggccagcacagaaacggcgtgatcagcgccagaaccagaatcgacgtgctgctggacaccttcagaagaaagcagcccttcacccacttcctggccttcttcctgaacgaggtggaggtgcaggagggcttcctgagattccaggaggaggtgctggccaagtgcagcatggaccacggcgtggacagcagcatcttccagaaccccaagaagctgcacctgaccatcggcatgctggtgctgctgagcgaggaggagatccagcagacctgcgagatgctgcagcagtgcaaggaggagttcatcaacgacatcagcggcggcaagcccctggaggtggagatggccggcatcgagtacatgaacgacgaccccggcatggtggacgtgctgtacgccaaggtgcacatgaaggacggcagcaacagactgcaggagctggtggacagagtgctggagagattccaggccagcggcctgatcgtgaaggagtggaacagcgtgaagctgcacgccaccgtgatgaacaccctgttcagaaaggaccccaacgccgagggcagatacaacctgtacaccgccgagggcaagtacatcttcaaggagagagagagcttcgacggcagaaacatcctgaagagcttcgccctgctgcccagactggagtacaacgacgccatcagcgcccactgcaacctgtgcctgcccggcagcagcgacagccccgccagcgccagccaggtggccggcatcaccgtggtgtag

SEQ ID NO: 335759 - protein, 152 aa, Artificial Sequence
  derived and/or modified sequence
MEVLRPQLIRIDGRNYRKNPVQEQTYQHEEDEEDFYQGSMECADEPCDAYEVEQTPQGFRSTLRAPSLLYKHIVGKRGDTRKKIEMETKTSISIPKPGQDGEIVITGQHRNGVISARTRIDVLLDTFRRKQPFTHFLAFFLNEVEVQEGFLR

SEQ ID NO: 335760 - protein, 56 aa, Artificial Sequence
  derived and/or modified sequence
MEVLRPQLIRIDGRNYRKNPVQEQTYQHEEDEEDFYQGSMECADEPCDAYEVEQTP

SEQ ID NO: 335761 - DNA, 348 bp, Artificial Sequence
  derived and/or modified sequence
agagccggttcggcgcgtcgactgcccagagtccgcggccggggcgcgggaggctggagtgtggtgacactaccttgactcactgcagcatctgcctcccgggttccagtgattctcctgcctcagcctctcaggtagctgggattacaggtccctgtgatgctgggaaactgagtcacggaggcggggagagatgtgtttgaggaattgggctgagaccgtgatctcacccccgtcaggcctggtgggctcctttgacactcagcggcaggagccaagccgccatggcctaccacagcttcctggtggagcccatcagctgccacgcctggaacaaggaccgcaccc

SEQ ID NO: 335762 - DNA, 372 bp, Artificial Sequence
  derived and/or modified sequence
atggaggttctccggccccagctgatccgcattgatggccggaattatcggaagaatccagtgcaggagcagacgtaccagcacgaagaagatgaggaagatttctaccagggctcaatggagtgcgccgacgagccctgtgatgcttatgaggtggaacaaactccacagggattccgaagtaccttaagagcgccctccctcctttacaagcacatagtgggtaagcgtggggacacaaggaaaaagatcgagatggaaaccaaaacttctatttctattccaaagcctggtcaagatggtgaaatcgttatcacgggccagcacaggaacggagttatctccgctcggactcggattgatgtgctttag

SEQ ID NO: 335763 - DNA, 312 bp, Artificial Sequence
  derived and/or modified sequence
atggaagtgctgaggcctcagttgatacggatcgacggtcgcaattaccggaaaaatcctgtgcaggagcaaacctatcagcatgaggaggacgaggaagacttctaccagggatccatggagtgtgcagatgagccttgtgacgcctatgaggtagagcagacccctcaaggattccggagtacactaagagctcccagcctcctgtacaaacatatcgtagggaagcggggagacaccagaaaaaagattgagatggagacaaagacttcaatctcaatcccaaagcccggacaggacggcgagatttag

SEQ ID NO: 335764 - DNA, 459 bp, Artificial Sequence
  derived and/or modified sequence
atggaggtgctccggccccagctgatcaggattgacgggcgtaattaccgcaagaaccctgtccaggaacagacgtaccagcacgaggaggatgaagaggacttttatcaagggagtatggaatgtgccgatgagccgtgtgatgcgtatgaagtggagcagactccacaaggcttccggagcaccttacgagctccaagcctcctgtacaaacatatcgtcggtaagcgcggtgacacacggaagaaaatcgaaatggagactaagacgtcaatcagcatccctaagcccgggcaagacggcgagatagtaatcaccgggcagcaccggaacggcgtgatctcagcccgaactcgcattgatgtcctgctcgatacctttcgccgaaaacagcccttcacacactttctagctttcttcctgaatgaggttgaggttcaggagggattcttgcgctag

SEQ ID NO: 335765 - DNA, 171 bp, Artificial Sequence
  derived and/or modified sequence
atggaggtgctccgcccgcagctcatccgtatcgatgggagaaattaccgaaaaaaccccgtacaggagcagacttaccagcacgaagaggacgaggaggatttttaccaaggcagcatggagtgtgcagacgagccttgtgatgcctatgaagtagaacagacaccgtag

SEQ ID NO: 335766 - DNA, 372 bp, Artificial Sequence
  derived and/or modified sequence
atggaggtgctgcggccccagctgatcagaattgatggcaggaactacaggaagaaccctgtgcaggagcagacctaccagcacgaggaggatgaggaggacttctaccagggctccatggagtgtgctgatgagccctgtgatgcctatgaggtggagcagaccccccagggcttccgcagcaccctgcgggcccccagcctgctgtacaagcacatcgtgggcaagagaggagacaccaggaagaagattgagatggagaccaagaccagcatcagcatccccaagccaggccaggatggagaaattgtcatcaccggccagcacagaaatggagtcatcagcgcccggaccagaattgatgtgctgtag

SEQ ID NO: 335767 - DNA, 312 bp, Artificial Sequence
  derived and/or modified sequence
atggaggtgctgcggccccagctgatcagaattgatggcaggaactacaggaagaaccctgtgcaggagcagacctaccagcacgaggaggatgaggaggacttctaccagggctccatggagtgtgctgatgagccctgtgatgcctatgaggtggagcagaccccccagggcttccgcagcaccctgcgggcccccagcctgctgtacaagcacatcgtgggcaagagaggagacaccaggaagaagattgagatggagaccaagaccagcatcagcatccccaagccaggccaggatggagagatctag

SEQ ID NO: 335768 - DNA, 459 bp, Artificial Sequence
  derived and/or modified sequence
atggaggtgctgcggccccagctgatcagaattgatggcaggaactacaggaagaaccctgtgcaggagcagacctaccagcacgaggaggatgaggaggacttctaccagggctccatggagtgtgctgatgagccctgtgatgcctatgaggtggagcagaccccccagggcttccgcagcaccctgcgggcccccagcctgctgtacaagcacatcgtgggcaagagaggagacaccaggaagaagattgagatggagaccaagaccagcatcagcatccccaagccaggccaggatggagaaattgtcatcaccggccagcacagaaatggagtcatcagcgcccggaccagaattgatgtgctgctggacaccttccggaggaagcagcccttcacccacttcctggccttcttcctgaatgaggtggaggtgcaggagggcttcctgaggtag

SEQ ID NO: 335769 - DNA, 171 bp, Artificial Sequence
  derived and/or modified sequence
atggaggtgctgcggccccagctgatcagaattgatggcaggaactacaggaagaaccctgtgcaggagcagacctaccagcacgaggaggatgaggaggacttctaccagggctccatggagtgtgctgatgagccctgtgatgcctatgaggtggagcagaccccctag

SEQ ID NO: 335770 - DNA, 372 bp, Artificial Sequence
  derived and/or modified sequence
atggaggtgctgcggccccagctgatccggatcgacggccggaactacagaaagaacccagtacaggagcaaacctatcagcacgaggaggatgaagaagatttctatcagggatcaatggagtgcgcagacgagccctgcgatgcctacgaggtagaacagaccccacaagggtttcggtcaactcttagggccccaagcctgctctacaagcacattgtaggcaagcgcggggatactagaaaaaaaatcgagatggagacaaagactagcatttcaatccccaagccgggacaagacggcgagatcgtgatcaccgggcagcatcggaacggggttatatcagctcggacaagaatcgatgtgctctag

SEQ ID NO: 335771 - DNA, 312 bp, Artificial Sequence
  derived and/or modified sequence
atggaggtgctgcggccccagctgatccggatcgacggccggaactaccgcaagaacccagtgcaggagcagacataccagcatgaggaggacgaggaggacttttatcagggttctatggagtgtgcagatgagccgtgtgatgcctacgaggtggaacagacaccacagggattccggagtacactgcgggctccttccctgctttacaagcacatagtgggcaaaaggggagacaccagaaagaagatcgagatggagacaaagacatctatctcaatacccaaacccggtcaggatggcgagatctag

SEQ ID NO: 335772 - DNA, 459 bp, Artificial Sequence
  derived and/or modified sequence
atggaggtgctgcggccccagctgatccggatcgacggccggaactaccgcaagaatccagtgcaggagcaaacctatcaacacgaagaggatgaggaggatttttaccagggatctatggaatgcgctgatgagccgtgtgatgcgtacgaagttgagcaaacacctcagggcttccggtctacactcagggcgcccagtcttctttataagcacatcgtgggcaagaggggtgatacgcgaaaaaaaatcgaaatggaaaccaagacctctatcagtattcccaagccaggacaggacggtgagattgttattactgggcagcacagaaatggggttatctccgcccggacaaggatcgacgtcctactagacactttccgtcgaaagcagccttttacccacttcctggcctttttccttaacgaagttgaagtgcaggaggggtttctgcgctag

SEQ ID NO: 335773 - DNA, 171 bp, Artificial Sequence
  derived and/or modified sequence
atggaggtgctgcggccccagctgatccggatcgacggccggaactacaggaaaaaccccgtccaggagcagacgtaccagcacgaagaggacgaagaggatttctaccagggaagcatggaatgcgctgatgaaccatgtgatgcttacgaagtcgaacagactccatag

SEQ ID NO: 335774 - DNA, 372 bp, Artificial Sequence
  derived and/or modified sequence
atggaggtgctacgacctcagcttattcgcatagacgggagaaattatagaaagaaccccgtccaggagcagacttatcagcacgaagaggatgaggaagacttctaccagggctctatggagtgtgcagatgagccttgtgacgcctatgaggtggagcagacccctcaggggttccgatctaccctaagggctccatccctgctctataagcacatagttggcaagaggggagatactcgcaaaaaaattgagatggagacaaagacatctatctccattcctaaacccggacaggatggtgaaatcgtgattacgggtcagcaccggaacggagtgattagcgctcggacgagaattgacgtactgtag

SEQ ID NO: 335775 - DNA, 312 bp, Artificial Sequence
  derived and/or modified sequence
atggaggtcctgagaccacagctgattcggattgacggaaggaattatcgtaagaaccctgttcaggaacagacctatcaacatgaggaagacgaagaagacttctaccagggatctatggagtgcgcagatgagccctgcgacgcttacgaggtcgaacagactccacagggcttccggagcacgttgcgtgcacccagtctgctgtacaagcatatcgtgggaaagcggggagatactcgcaaaaaaattgagatggaaacaaaaacctccatttccatcccaaagccagggcaggacggcgaaatctag

SEQ ID NO: 335776 - DNA, 459 bp, Artificial Sequence
  derived and/or modified sequence
atggaggtgcttcgccctcagctcatccggattgatggccgaaattacagaaaaaaccccgtgcaggaacagacctaccagcacgaggaggacgaggaagatttctaccaagggagcatggaatgcgctgatgaaccctgtgacgcatacgaagtcgaacagacaccgcaggggttcaggagcacattgagggcgccttccctgctgtacaaacacatcgtaggtaaaagaggtgacactcgaaagaagatagagatggaaaccaagaccagtattagcatcccgaaacctggtcaggacggggagattgttattactggccagcacagaaacggcgtgatttccgctaggactcggattgacgtactactcgacaccttcaggcgaaagcagccattcactcacttcctcgcattctttctcaatgaagtggaagttcaggaggggtttctgcggtag

SEQ ID NO: 335777 - DNA, 171 bp, Artificial Sequence
  derived and/or modified sequence
atggaagtgctacgccctcaactgattcggatagatgggaggaattatcgcaaaaaccccgtgcaggaacagacgtaccagcacgaggaggatgaggaagatttctatcagggttctatggaatgtgctgacgaaccatgcgacgcctatgaggtcgaacagaccccttag

SEQ ID NO: 335778 - DNA, 581 bp, Artificial Sequence
  derived and/or modified sequence
atgcgcactcggtcaaacccggcctggggaaatttcctatcgcacgtctgctgcagcagtctcctgtttctcctcctaccttctccatttttctagtccctgcagggcctcggcttccctcacgatattgcagaaagacacagctttcctcttcctctccaaaccacctcgaagcaggggcataattggaatatcatttggagaaagtgtcatggaagttctgcgtccacagcttataagaattgatggccggaattacaggaagaatccagtccaagaacagacctatcaacatgaagaagatgaagaggacttctatcaaggctccatggagtgtgctgatgagccctgtgatgcctacgaggtggagcagaccccacaaggattccggtctactttgagggcccccagcttgctctataagcatatagttggaaagagaggggacactaggaagaaaatagaaatggagaccaaaacttctattagcattcctaaacctggacaagacggggaaattgtaatcactggccagcatcgaaatggtgtaatttcagcccgaacacggattgatgttcttt

SEQ ID NO: 335779 - DNA, 540 bp, Artificial Sequence
  derived and/or modified sequence
gacgcgaggaggggagcagagaacgcgctcgcgtagaggaattccgggtcctcctcctcgccctaccttggtttacctgcagccgcctagtcctcttctccttctctttgatgattcagggcctcggcttccctcacgatattgcagaaagacacagctttcctcttcctctccaaaccacctcgaagcagggttaaggcataattggaatatcatttggagaaagtgtcatggaagttctgcgtccacagcttataagaattgatggccggaattacaggaagaatccagtccaagaacagacctatcaacatgaagaagatgaagaggacttctatcaaggctccatggagtgtgctgatgagccctgtgatgcctacgaggtggagcagaccccacaaggattccggtctactttgagggcccccagcttgctctataagcatatagttggaaagagaggggacactaggaagaaaatagaaatggagaccaaaacttctattagcattcctaaacctggacaagacggggaaattg

SEQ ID NO: 335780 - DNA, 580 bp, Artificial Sequence
  derived and/or modified sequence
cctatcgcacgtctgctgcagcagtctcctgtttctcctcctaccttctccatttttctagtccctgcagatggtaattatatttttcagggcataattggaatatcatttggagaaagtgtcatggaagttctgcgtccacagcttataagaattgatggccggaattacaggaagaatccagtccaagaacagacctatcaacatgaagaagatgaagaggacttctatcaaggctccatggagtgtgctgatgagccctgtgatgcctacgaggtggagcagaccccacaaggattccggtctactttgagggcccccagcttgctctataagcatatagttggaaagagaggggacactaggaagaaaatagaaatggagaccaaaacttctattagcattcctaaacctggacaagacggggaaattgtaatcactggccagcatcgaaatggtgtaatttcagcccgaacacggattgatgttcttttggacacttttcgaagaaagcagcccttcactcacttccttgcctttttcctcaatgaagttgaggttcaggaaggattcctgagat

SEQ ID NO: 335781 - DNA, 599 bp, Artificial Sequence
  derived and/or modified sequence
ctatcgcacgtctgctgcagcagtctcctgtttctcctcctaccttctccatttttctagtccctgcagccccacccccaggaccagcctgagtggctgcgctcaccacgacgaggaccgcggcgtgttcgccccccaacagacggagccagcggcgaaggcggcgtgcgcgcgcccgtgccgtggtgggcgtggccggggcggagacgcgaggaggggagcagagaacgcgctcgcgtagaggaattccgggtcctcctcctcgccctaccttggtttacctgcagccgcctagtcctcttctccttctctttgatgattcagggcctcggcttccctcacgatattgcagaaagacacagctttcctcttcctctccaaaccacctcgaagcaggggcataattggaatatcatttggagaaagtgtcatggaagttctgcgtccacagcttataagaattgatggccggaattacaggaagaatccagtccaagaacagacctatcaacatgaagaagatgaagaggacttctatcaaggctccatggagtgtgctgatgagccctgtgatgcctacgaggtggagcagaccccac

SEQ ID NO: 335782 - DNA, 372 bp, Artificial Sequence
  derived and/or modified sequence
atggaggtgctgagaccccagctgatcagaatcgacggcagaaactacagaaagaaccccgtgcaggagcagacctaccagcacgaggaggacgaggaggacttctaccagggcagcatggagtgcgccgacgagccctgcgacgcctacgaggtggagcagaccccccagggcttcagaagcaccctgagagcccccagcctgctgtacaagcacatcgtgggcaagagaggcgacaccagaaagaagatcgagatggagaccaagaccagcatcagcatccccaagcccggccaggacggcgagatcgtgatcaccggccagcacagaaacggcgtgatcagcgccagaaccagaatcgacgtgctgtag

SEQ ID NO: 335783 - DNA, 312 bp, Artificial Sequence
  derived and/or modified sequence
atggaggtgctgagaccccagctgatcagaatcgacggcagaaactacagaaagaaccccgtgcaggagcagacctaccagcacgaggaggacgaggaggacttctaccagggcagcatggagtgcgccgacgagccctgcgacgcctacgaggtggagcagaccccccagggcttcagaagcaccctgagagcccccagcctgctgtacaagcacatcgtgggcaagagaggcgacaccagaaagaagatcgagatggagaccaagaccagcatcagcatccccaagcccggccaggacggcgagatctag

SEQ ID NO: 335784 - DNA, 459 bp, Artificial Sequence
  derived and/or modified sequence
atggaggtgctgagaccccagctgatcagaatcgacggcagaaactacagaaagaaccccgtgcaggagcagacctaccagcacgaggaggacgaggaggacttctaccagggcagcatggagtgcgccgacgagccctgcgacgcctacgaggtggagcagaccccccagggcttcagaagcaccctgagagcccccagcctgctgtacaagcacatcgtgggcaagagaggcgacaccagaaagaagatcgagatggagaccaagaccagcatcagcatccccaagcccggccaggacggcgagatcgtgatcaccggccagcacagaaacggcgtgatcagcgccagaaccagaatcgacgtgctgctggacaccttcagaagaaagcagcccttcacccacttcctggccttcttcctgaacgaggtggaggtgcaggagggcttcctgagatag

SEQ ID NO: 335785 - DNA, 171 bp, Artificial Sequence
  derived and/or modified sequence
atggaggtgctgagaccccagctgatcagaatcgacggcagaaactacagaaagaaccccgtgcaggagcagacctaccagcacgaggaggacgaggaggacttctaccagggcagcatggagtgcgccgacgagccctgcgacgcctacgaggtggagcagaccccctag

SEQ ID NO: 335786 - protein, 327 aa, Artificial Sequence
  derived and/or modified sequence
MGLPQPRLPAPALQAGPATAGCRPELRGQSWSLLPAMGLCHFATLALILLVLLEALAQADTQKMVEAQRGVGPRACYSIWLLLAPTPPLSHCLQSPQKQHQVCGDRRLKASSTNCPSEKCTAWARYSHRMDSLQKQDLRRPKIHGAVQASPYQPPTLASLQRLLWVRQAATLNHIDEVWPSLFLGDAYAARDKSKLIQLGITHVVNAAAGKFQVDTGAKFYRGMSLEYYGIEADDNPFFDLSVYFLPVARYIRAALSVPQGRVLVHCAMGVSRSATLVLAFLMICENMTLVEAIQTVQAHRNICPNSGFLRQLQVLDNRLGRETGRF

SEQ ID NO: 335787 - DNA, 984 bp, Artificial Sequence
  derived and/or modified sequence
atgggattgcctcaacccaggcttcctgcccccgccttacaagcgggtcctgccacagccggatgcagaccagagctgcgggggcagtcctggtcactgctcccagccatgggcctgtgccacttcgctaccctggctttaatactcctcgtactgctggaggcattggctcaagcagacacccagaagatggtggaggcccagcgcggggtgggtcccagggcatgctacagtatctggttactactggcgccaactccaccgctatctcattgcctgcagtctcctcagaaacagcatcaggtctgcggcgacaggcgccttaaagcatccagcaccaattgtccgagcgaaaagtgcacagcctgggctcggtattcccatcgcatggatagtctgcagaagcaagacttacggcgcccaaagattcacggcgccgtacaggcgagtccgtaccagcccccgaccctggcatctctccagcgacttctgtgggtacgacaggccgccacactgaaccacattgatgaagtctggcctagcttgtttttaggtgacgcttacgctgcccgggacaagtctaagctaattcagctcgggattacacacgtggtcaatgccgcggcgggaaaattccaggtcgacaccggagcgaagttctaccgggggatgtcactggagtactacggcattgaggccgacgacaacccctttttcgacctatctgtttattttttgcccgtagcaaggtacatcagagcagccctgagcgtgccgcagggtcgggttctcgtgcactgtgccatgggagtgagccgatccgccactctcgtcttggccttcctgatgatctgtgaaaacatgaccttggtggaggctatacagaccgtgcaagcccatcggaatatttgtccaaattccggattcctgagacagctgcaagtcttagataatcggctggggagagagaccggacgcttttag

SEQ ID NO: 335788 - DNA, 984 bp, Artificial Sequence
  derived and/or modified sequence
atgggcctgccccagccccggctgcctgccccagccctgcaggccggccctgccacagctggctgcaggcctgagctgcggggccagagctggagcctgctgcctgccatgggcctgtgccactttgccaccctggccctgatcctgctggtgctgctggaggccctggcccaggccgacacccagaagatggtggaggcccagaggggcgtgggcccccgggcctgctacagcatctggctgctgctggcccccaccccacccctgagccactgcctgcagagcccccagaagcagcaccaggtgtgtggggaccggcggctgaaggccagcagcaccaactgccccagcgagaagtgcacagcctgggcccgctacagccacaggatggacagcctgcagaagcaggacctgcggcggcccaagatccacggggctgtgcaggccagcccctaccagccccccaccctggccagcctgcagaggctgctgtgggtgcggcaggccgccaccctgaaccacattgatgaggtgtggcccagcctcttcctgggagatgcctatgctgcccgggacaagagcaagctgatccagctgggcatcacccacgtggtgaatgctgctgctgggaagttccaggtggacaccggggccaagttctaccggggcatgagcctggagtactatggaattgaagcagatgacaaccccttctttgacctgtctgtgtacttcctgcctgtggcccgctacatccgggccgccctgtctgtgccccagggccgggtgctggtgcactgtgccatgggcgtgagccgcagcgccaccctggtgctggccttcctgatgatctgtgagaacatgaccctggtggaggccatccagacagtgcaggcccacaggaacatctgccccaacagcggcttcctgcggcagctgcaggtgctggacaaccggctgggccgggagaccggccgcttctag

SEQ ID NO: 335789 - DNA, 984 bp, Artificial Sequence
  derived and/or modified sequence
atgggcctgccccagccccggctgcccgcccccgccctgcaggccggcccagcaactgcagggtgtcggcccgaattgcgtggccagtcttggtctcttcttccagctatggggctttgtcacttcgccactcttgccctgatcctgctggtcttattggaggctctggcccaggccgatacgcagaaaatggtggaagcccagcgaggtgttggccctcgggcctgctattccatctggctcctgctcgccccaaccccgccactgagtcattgcctgcaatctcctcaaaagcagcaccaggtgtgtggcgacaggagattgaaagcctcgtcgacaaattgccctagtgaaaagtgtaccgcatgggcaagatatagccacagaatggattccctgcaaaaacaggatttgagaaggcctaagatccacggtgccgtgcaagcctctccttaccagccccccacccttgcgtccctgcagaggctgctgtgggtcaggcaggctgccacactcaaccacatagacgaggtgtggcccagtttgtttctcggggatgcctacgcagccagagataaaagtaagctgatccagttgggtattactcacgttgtaaacgccgcagcgggtaagtttcaagtggatacaggcgcaaaattctaccgcggcatgtcactggagtattatggtatcgaagcagatgacaacccattttttgatctgtctgtatactttctccccgtagcccgctatattcgggccgccttgtccgtgccacagggtcgggttctggtgcactgcgccatgggcgtttcccgcagtgcgacactagtgctggccttcctgatgatttgcgaaaacatgaccttagttgaagccattcaaacagtccaagcacaccggaacatttgtccaaactctgggttcctgcggcagcttcaagtgcttgataacaggctgggccgcgaaacaggacgcttctag

SEQ ID NO: 335790 - DNA, 984 bp, Artificial Sequence
  derived and/or modified sequence
atgggtctgcctcagcctaggttacccgctcccgcattacaggccggtcctgcaaccgcagggtgcaggccggagctgagaggacagagctggtcacttctgcccgcaatgggtttatgccattttgcaactttggccctcatccttttggtcctcttagaagcacttgcccaagcagacacccagaagatggtggaggctcagcgcggagtaggtccaagggcgtgctattcaatctggctgctcctcgccccaacaccccctctgtcacattgcctccagtccccacagaagcagcatcaggtgtgcggcgacaggagactgaaggcgtccagtaccaattgtccatccgagaagtgcaccgcatgggcgagatatagtcatcggatggatagccttcagaagcaggacctgaggcgcccaaaaattcatggagccgttcaggcctcgccgtaccagcctcccacactagcatctctgcagagactgttgtgggtacgtcaagctgcgacactcaatcacatcgatgaggtgtggccctctctttttctgggagatgcttacgccgcacgtgataagagcaaactgatccaactgggcatcacccacgtagtgaatgccgcagccggtaaattccaggtcgatactggagcaaagttttaccgaggcatgagcttagaatattatggcatcgaggccgatgacaaccccttcttcgatctgagcgtttatttcctccctgtggccaggtacattagggccgcactttccgtaccccaaggccgagtccttgtccactgtgctatgggagtgtcacgctccgctacgcttgtcctggcgttcctgatgatctgtgaaaatatgacactcgtggaagctatccagacagtccaagcgcaccgcaacatatgcccaaacagcggattcctgagacagctgcaggttttagacaaccggttgggacgggagactggtcgattctag

SEQ ID NO: 335791 - DNA, 984 bp, Artificial Sequence
  derived and/or modified sequence
atgggcctgccccagcccagactgcccgcccccgccctgcaggccggccccgccaccgccggctgcagacccgagctgagaggccagagctggagcctgctgcccgccatgggcctgtgccacttcgccaccctggccctgatcctgctggtgctgctggaggccctggcccaggccgacacccagaagatggtggaggcccagagaggcgtgggccccagagcctgctacagcatctggctgctgctggcccccaccccccccctgagccactgcctgcagagcccccagaagcagcaccaggtgtgcggcgacagaagactgaaggccagcagcaccaactgccccagcgagaagtgcaccgcctgggccagatacagccacagaatggacagcctgcagaagcaggacctgagaagacccaagatccacggcgccgtgcaggccagcccctaccagccccccaccctggccagcctgcagagactgctgtgggtgagacaggccgccaccctgaaccacatcgacgaggtgtggcccagcctgttcctgggcgacgcctacgccgccagagacaagagcaagctgatccagctgggcatcacccacgtggtgaacgccgccgccggcaagttccaggtggacaccggcgccaagttctacagaggcatgagcctggagtactacggcatcgaggccgacgacaaccccttcttcgacctgagcgtgtacttcctgcccgtggccagatacatcagagccgccctgagcgtgccccagggcagagtgctggtgcactgcgccatgggcgtgagcagaagcgccaccctggtgctggccttcctgatgatctgcgagaacatgaccctggtggaggccatccagaccgtgcaggcccacagaaacatctgccccaacagcggcttcctgagacagctgcaggtgctggacaacagactgggcagagagaccggcagattctag

SEQ ID NO: 335792 - DNA, 1126 bp, Artificial Sequence
  derived and/or modified sequence
acagaggcagaggggtgggcgggctggcccatggctgagacctctctcccagagctggggggagaggacaaagccacgccttgccccagcatcctggagctggaggagctcctgcgggcagggaagtcttcttgcagccgtgtggacgaagtttggcccaaccttttcataggagatgcagctggtccttactccctgccatggggctctgccactttgccaccctggcactgatcctgctggtgctgctggaggctctggcccaggcggacacacagaagatggtggaagcccagcgtggggtcggccctagagcctgctactccatctggctcctcctggcgcctacaccccctctcagccactgtcttcagtctccacagaaacagcatcaagtgtgcggagacaggcggctgaaagccagcagcacgaactgcccgtcagagaagtgcacagcctgggccagatactcccacaggatggactcactgcagaagcaggacctccggaggcccaagatccatggggcagtccaggcatctccctaccagccgcccacattggcttcgctgcagcgcttgctgtgggtccgtcaggctgccacactgaaccatatcgatgaggtctggcccagcctcttcctgggagatgcgtacgcagcccgggacaagagcaagctgatccagctgggaatcacccacgttgtgaatgccgctgcaggcaagttccaggtggacacaggtgccaaattctaccgtggaatgtccctggagtactatggcatcgaggcggacgacaaccccttcttcgacctcagtgtctactttctgcctgttgctcgatacatccgagctgccctcagtgttccccaaggccgcgtgctggtacactgtgccatgggggtaagccgctctgccacacttgtcctggccttcctcatgatctgtgagaacatgacgctggtagaggccatccagacggtgcaggcccaccgcaatatctgccctaactcaggcttcctccggcagctccaggttctggacaaccgactggggcgggagacggggcggttctgatctggcaggcagccaggatccctgacccttggcccaaccccaccagcctg

SEQ ID NO: 335793 - DNA, 624 bp, Artificial Sequence
  derived and/or modified sequence
atgcgccactgcattaattgttgtattcaactcttgcctgacggcgcccacaaacagcaagtcaactgccagggtggccctcatcacggccaccaggcgtgtcccacatgcaaaggagaaaacaaaatcctctttagggtggactcaaagcaaatgaacctcctcgccgtgctggaagtgcggaccgaaggtaacgagaactggggaggcttcctgagatttaagaaggggaagcgctgttccttggtattcggcctgataatcatgacgctggtgatggcctcctatattctgtctggagctcatcaggagttattgatcagttcgccctttcactacggcgggtttccatctaatccaagtctgatggattctgaaaatcccagcgacaccaaggagcatcaccatcagtcaagtgtaaacaatatctcctatatgaaagactacccttccattaaactcatcattaacagtatcacaaccaggatcgagttcaccacaaggcaactcccagacttagaagacttgaagaaacaagagcttcacatgttctctgtgattccgaataaattcctcccgaaacacaacgcccaagctgaactgggcttgaatgtggcctgctag

SEQ ID NO: 335794 - DNA, 624 bp, Artificial Sequence
  derived and/or modified sequence
atgaggcactgcatcaactgctgcatccagctgctgcctgatggagcccacaagcagcaggtgaactgccagggcggcccccaccacggccaccaggcctgccccacctgcaagggggagaacaagatcctcttccgggtggacagcaagcagatgaacctgctggccgtgctggaggtgaggacagagggcaatgaaaactggggcggcttcctgcgcttcaagaagggcaagcgctgcagcctggtgtttggcctcatcatcatgaccctggtgatggccagctacatcctgagcggggcccaccaggagctgctgatcagcagccccttccactatggaggcttccccagcaaccccagcctgatggattctgagaaccccagcgacaccaaggagcaccaccaccagagctctgtgaacaacatctcctacatgaaggactaccccagcatcaagctgatcatcaacagcatcaccaccagaattgagttcaccacccggcagctgcctgacctggaggacctgaagaagcaggagctgcacatgttttctgtcatccccaacaagttcctgcccaagcacaatgcccaggccgagctgggcctgaatgtggcctgctag

SEQ ID NO: 335795 - DNA, 624 bp, Artificial Sequence
  derived and/or modified sequence
atgcggcactgcatcaactgctgcatccagctgctgcccgacggcgcccataagcagcaggttaactgccagggcgggccccatcatggccaccaggcttgccccacatgcaagggggagaacaagatcctgtttcgggtagacagcaaacaaatgaacttgttggcggtcctggaagttcggacggaagggaatgaaaactgggggggcttcctgagattcaagaaggggaagagatgtagcctcgtgttcgggctaattattatgacgctggtgatggccagttatatcttgagtggggcccaccaggaactcttgatatcttcaccctttcactacggagggtttccttctaatcctagccttatggattcagaaaacccgagcgataccaaagaacatcatcatcagagcagcgtgaataacatctcttacatgaaggactacccatccataaagttaatcatcaattctatcacaacacgaatcgaattcaccacaagacagctaccagatctggaagacctgaagaagcaagaactccatatgttttcggtgatcccaaacaaattccttcctaagcacaacgcccaggccgagctaggtttgaacgtggcctgctag

SEQ ID NO: 335796 - DNA, 624 bp, Artificial Sequence
  derived and/or modified sequence
atgcgccactgcatcaactgctgcattcaattgctccccgatggagctcacaaacaacaagtaaattgtcaggggggacctcaccacgggcaccaggcatgccctacctgtaaaggggagaacaagatcctgttcagggtggattcaaagcaaatgaacctgcttgccgtcctggaggtgaggacagaagggaatgaaaactggggagggtttcttaggttcaaaaaagggaagcgctgctccctcgtgttcggcctcattataatgacacttgtaatggcatcctacatcctctctggggctcaccaggagctgctaattagctctccattccattatggcggtttcccatctaacccatccctgatggattccgaaaacccatctgatacgaaggaacatcaccatcagtcgtccgtgaacaacattagctatatgaaggattacccgtctatcaagctgattattaactccattaccacacgcattgagtttacgacccgccaactcccagatttagaggatctgaagaaacaagagttacatatgttctcagttatacccaacaaattcctgcccaagcacaatgcgcaggcagaactgggcctaaatgtggcctgttag

SEQ ID NO: 335797 - DNA, 1566 bp, Artificial Sequence
  derived and/or modified sequence
aaacttttcctcccagcgctcggggagtcaggttgacgcgccctggatgcggggctagaggctcggggctgggcgcgctcccgcggagccggagccgcagaggctcccgggctggactcaggcttctcaggaaatctggcattttttaaagtttgcgccccacaaagaggaaatattccaaaggtactcaggatgtaaaaggggagatcttcacagatgcctccgtggatggcatggcaatccatccatcaatgagaagaccatgatttcttttaattttctgtgtgtttccacattccccagtgagaattcttccacctttttttgtgccatgggaaaaacctgaagggcaggcagagctgctcccgaacttgtgaccttctctgaggttgcagcggctcttgtagaacatgactctgggacatcacttccttttgttttctttcggagctgaaccaaagaatgtgcaccctctttctctagtgctgtggtgtctgcttatttttgtatttgtgctttccatccatcttctgtgatcacaaggcattcttaaggttttctagcacgacttgcggacatccagactcgtggggggcccacccatggctcggtaagccagcagcccagggcactggcactaccatgaggcactgcattaattgctgcatacagctgttacccgacggcgcacacaagcagcaggtcaactgccaagggggcccccatcacggtcaccaggcgtgccccacgtgcaaaggagaaaacaaaattctgtttcgtgtggacagtaagcagatgaacttgcttgctgttctcgaagtgaggactgaagggaacgaaaactggggtgggtttttgcgcttcaaaaaggggaagcgatgtagcctcgtttttggactgataataatgaccttggtaatggcttcttacatcctttctggggcccaccaagagcttctgatctcatcacctttccattacggaggcttccccagcaaccccagcttgatggacagcgaaaacccaagtgacacaaaggagcatcaccaccaatcctctgtaaataatatttcatacatgaaggactatccaagcattaaattaattatcaacagcatcacaactaggattgagttcacgaccagacagctcccagacttagaagaccttaagaagcaggagttgcatatgttttcagtcatccccaacaaattccttccaaaacacaatgcacaagctgaacttgggctgaacgtggcgtgttgagatttggaatgaggtttctaagagccgtgttcttcatggaattttccaggccacttggcagcttggtttaccgatggatgggctagagatcttgtcgtttcttggaagtcacagggaagattgaagagaacgcttgagcatccttggcaacagcccaggtgggacctggatgaagctttgcactcaagtattgtcaagggaagcttcctgtgaaccaaagttctcaggccaaggtctcgcccaccaaagccagaaagtgcaagcacccgtctacccagctctaacttgtatgtgtgagac

SEQ ID NO: 335798 - DNA, 624 bp, Artificial Sequence
  derived and/or modified sequence
atgagacactgcatcaactgctgcatccagctgctgcccgacggcgcccacaagcagcaggtgaactgccagggcggcccccaccacggccaccaggcctgccccacctgcaagggcgagaacaagatcctgttcagagtggacagcaagcagatgaacctgctggccgtgctggaggtgagaaccgagggcaacgagaactggggcggcttcctgagattcaagaagggcaagagatgcagcctggtgttcggcctgatcatcatgaccctggtgatggccagctacatcctgagcggcgcccaccaggagctgctgatcagcagccccttccactacggcggcttccccagcaaccccagcctgatggacagcgagaaccccagcgacaccaaggagcaccaccaccagagcagcgtgaacaacatcagctacatgaaggactaccccagcatcaagctgatcatcaacagcatcaccaccagaatcgagttcaccaccagacagctgcccgacctggaggacctgaagaagcaggagctgcacatgttcagcgtgatccccaacaagttcctgcccaagcacaacgcccaggccgagctgggcctgaacgtggcctgctag

SEQ ID NO: 335799 - protein, 302 aa, Artificial Sequence
  derived and/or modified sequence
MEFGLLSEAEARSPALSLSDAGTPHPQLPEHGCKGQEHSDSEKASASLPGGSPEDGSLKKKQRRQRTHFTSQQLQELEATFQRNRYPDMSTREEIAVWTNLTEARVRVWFKNRRAKWRKRERSQQAELCKGSFAAPLGGLVPPYEEVYPGYSYGNWPPKALAPPLAAKTFPFAFNSVNVGPLASQPVFSPPSSIAASMVPSAAAAPGTVPGPGALQGLGGGPPGLAPAAVSSGAVSCPYASAAAAAAAAASSPYVYRDPCNSSLASLRLKAKQHASFSYPAVHGPPPAANLSPCQYAVERPV

SEQ ID NO: 335800 - DNA, 1407 bp, Artificial Sequence
  derived and/or modified sequence
ggagcgcccgagcggagaggcggcccgggagcaggggggcggcccccactccggccgggtgcccggcccctggcccctgcctgccctctagatcgccgccgcagccgccgctactgggagtctgcctgttgcaggacgcactagccctccctccatggagttcggcctgctcagcgaggcagaggcccggagccctgccctgtcgctgtcagacgctggcactccgcacccccagctcccagagcacggctgcaagggccaggagcacagcgactcagaaaaggcctcggcttcgctgcccggcggctccccagaggacggttcgctgaaaaagaagcagcggcggcagcgcacgcacttcaccagccagcagctacaggagctagaggcgaccttccagaggaaccgctaccccgacatgagcacgcgcgaggagatcgccgtgtggaccaacctcaccgaggcccgcgtgcgggtgtggttcaagaaccggcgcgccaaatggcggaagcgcgagcgcagccagcaggccgagctatgcaaaggcagcttcgcggcgccgctcggggggctggtgccgccctacgaggaggtgtaccccggctactcgtacggcaactggccgcccaaggctcttgccccgccgctcgccgccaagacctttccattcgccttcaactcggtcaacgtggggcctctggcttcgcagcccgtcttctcgccacccagctccatcgccgcctccatggtgccctccgccgcggctgccccgggcaccgtgccagggcctggggccctgcagggcctgggcgggggcccccccgggctggctccggccgccgtgtcctccggggccgtgtcctgcccttatgcctcggccgccgccgccgccgcggctgccgcctcttccccctacgtctatcgggacccgtgtaactcgagcctggccagcctgcggctcaaagccaaacagcacgcctccttcagctaccccgctgtgcacgggccgcccccggcagccaaccttagtccgtgccagtacgccgtggaaaggcccgtatgagcggccccgcccgtagatcatccccgagggcgggggcaacgattcacagcctccgcggactggggtcattttgactggcttgctcccgccccagggtctgaaaggggtgtttgggcagctggggggcaccggctcaggagagggccttcccctcccagccctgaggggtggactaggccctacacacagaccgcgcccctgggactaaagccaggaacagggaccagctccccgggggccaactcacccttggcccatcccgccttctccaggcttcccctccctcgttttcaaagataaatgaaataaacgtgcgcggactgtcaaaaaaaaaaaaaaaaaaa

SEQ ID NO: 335801 - DNA, 1391 bp, Artificial Sequence
  derived and/or modified sequence
ggagcgcccgagcggagaggcggcccgggagcaggggggcggcccccactccggccgggtgcccggcccctggcccctgcctgccctctagatcgccgccgcagccgccgctactgggagtctgcctgttgcaggacgcactagccctccctccatggagttcggcctgctcagcgaggcagaggcccggagccctgccctgtcgctgtcagacgctggcactccgcacccccagctcccagagcacggctgcaagggccaggagcacagcgactcagaaaaggcctcggcttcgctgcccggcggctccccagaggacggttcgctgaaaaagaagcagcggcggcagcgcacgcacttcaccagccagcagctacaggagctagaggcgaccttccagaggaaccgctaccccgacatgagcacgcgcgaggagatcgccgtgtggaccaacctcaccgaggcccgcgtgcgggtgtggttcaagaaccggcgcgccaaatggcggaagcgcgagcgcagccagcaggccgagctatgcaaaggcagcttcgcggcgccgctcggggggctggtgccgccctacgaggaggtgtaccccggctactcgtacggcaactggccgcccaaggctcttgccccgccgctcgccgccaagacctttccattcgccttcaactcggtcaacgtggggcctctggcttcgcagcccgtcttctcgccacccagctccatcgccgcctccatggtgccctccgccgcggctgccccgggcaccgtgccagggcctggggccctgcagggcctgggcgggggcccccccgggctggctccggccgccgtgtcctccggggccgtgtcctgcccttatgcctcggccgccgccgccgccgcggctgccgcctcttccccctacgtctatcgggacccgtgtaactcgagcctggccagcctgcggctcaaagccaaacagcacgcctccttcagctaccccgctgtgcacgggccgcccccggcagccaaccttagtccgtgccagtacgccgtggaaaggcccgtatgagcggccccgcccgtagatcatccccgagggcgggggcaacgattcacagcctccgcggactggggtcattttgactggcttgctcccgccccagggtctgaaaggggtgtttgggcagctggggggcaccggctcaggagagggccttcccctcccagccctgaggggtggactaggccctacacacagaccgcgcccctgggactaaagccaggaacagggaccagctccccgggggccaactcacccttggcccatcccgccttctccaggcttcccctccctcgttttcaaagataaatgaaataaacgtgcgcggactgtcgaa

SEQ ID NO: 335802 - DNA, 1187 bp, Artificial Sequence
  derived and/or modified sequence
tccatggagttcggcctgctcagcgaggcagaggcccggagccctgccctgtcgctgtcagacgctggcactccgcacccccagctcccagagcacggctgcaagggccaggagcacagcgactcagaaaaggcctcggcttcgctgcccggcggctccccagaggacggttcgctgaaaaagaagcagcggcggcagcgcacgcacttcaccagccagcagctacaggagctagaggcgaccttccagaggaaccgctaccccgacatgagcacgcgcgaggagatcgccgtgtggaccaacctcaccgaggcccgcgtgcgggtgtggttcaagaaccggcgcgccaaatggcggaagcgcgagcgcagccagcaggccgagctatgcaaaggcagcttcgcggcgccgctcggggggctggtgccgccctacgaggaggtgtaccccggctactcgtacggcaactggccgcccaaggctcttgccccgccgctcgccgccaagacctttccattcgccttcaactcggtcaacgtggggcctctggcttcgcagcccgtcttctcgccacccagctccatcgccgcctccatggtgccctccgccgcggctgccccgggcaccgtgccagggcctggggccctgcagggcctgggcgggggcccccccgggctggctccggccgccgtgtcctccggggccgtgtcctgcccttatgcctcggccgccgccgccgccgcggctgccgcctcttccccctacgtctatcgggacccgtgtaactcgagcctggccagcctgcggctcaaagccaaacagcacgcctccttcagctaccccgctgtgcacgggccgcccccggcagccaaccttagtccgtgccagtacgccgtggaaaggcccgtatgagcggccccgcccgtagatcatccccgagggcgggggcccagggtctgaaaggggtgtttgggcagctggggggcaccggctcaggagagggccttcccctcccagccctgaggggtggactaggccctacacacagaccgcgcccctgggactaaagccaggaacagggaccagctccccgggggccaactcacccttggcccatcccgccttctccaggcttcccctccctcgttttcaaagataaatgaaataaacgtgcgcggactgtcgaa

SEQ ID NO: 335803 - protein, 395 aa, Artificial Sequence
  derived and/or modified sequence
MRALLARLLLCVLVVSDSKGSNELHQVPYKSKTCYEGNGHFYRGKASTDTMGRPCLPWNSATVLQQTYHAHRSDALQLGLGKHNYCRNPDNRRRPWCYVQVGLKLLVQECMVHDCADGKKPSSPPEELKFQCGQKTLRPRFKIIGGEFTTIENQPWFAAIYRRHRGGSVTYVCGGSLISPCWVISATHCFIDYPKKEDYIVYLGRSRLNSNTQGEMKFEVENLILHKDYSADTLAHHNDIALLKIRSKEGRCAQPSRTIQTICLPSMYNDPQFGTSCEITGFGKENSTDYLYPEQLKMTVVKLISHRECQQPHYYGSEVTTKMLCAADPQWKTDSCQGDSGGPLVCSLQGRMTLTGIVSWGRGCALKDKPGVYTRVSHFLPWIRSHTKEENGLAL

SEQ ID NO: 335804 - protein, 431 aa, Artificial Sequence
  derived and/or modified sequence
MRALLARLLLCVLVVSDSKGSNELHQVPSNCDCLNGGTCVSNKYFSNIHWCNCPKKFGGQHCEIDKSKTCYEGNGHFYRGKASTDTMGRPCLPWNSATVLQQTYHAHRSDALQLGLGKHNYCRNPDNRRRPWCYVQVGLKLLVQECMVHDCADGKKPSSPPEELKFQCGQKTLRPRFKIIGGEFTTIENQPWFAAIYRRHRGGSVTYVCGGSLISPCWVISATHCFIDYPKKEDYIVYLGRSRLNSNTQGEMKFEVENLILHKDYSADTLAHHNDIALLKIRSKEGRCAQPSRTIQTICLPSMYNDPQFGTSCEITGFGKENSTDYLYPEQLKMTVVKLISHRECQQPHYYGSEVTTKMLCAADPQWKTDSCQGDSGGPLVCSLQGRMTLTGIVSWGRGCALKDKPGVYTRVSHFLPWIRSHTKEENGLAL

SEQ ID NO: 335805 - DNA, 1188 bp, Artificial Sequence
  derived and/or modified sequence
atgagagccctgctggccagactgctgctgtgcgtgctggtggtgagcgacagcaagggcagcaacgagctgcaccaggtgccctacaagagcaagacctgctacgagggcaacggccacttctacagaggcaaggccagcaccgacaccatgggcagaccctgcctgccctggaacagcgccaccgtgctgcagcagacctaccacgcccacagaagcgacgccctgcagctgggcctgggcaagcacaactactgcagaaaccccgacaacagaagaagaccctggtgctacgtgcaggtgggcctgaagctgctggtgcaggagtgcatggtgcacgactgcgccgacggcaagaagcccagcagcccccccgaggagctgaagttccagtgcggccagaagaccctgagacccagattcaagatcatcggcggcgagttcaccaccatcgagaaccagccctggttcgccgccatctacagaagacacagaggcggcagcgtgacctacgtgtgcggcggcagcctgatcagcccctgctgggtgatcagcgccacccactgcttcatcgactaccccaagaaggaggactacatcgtgtacctgggcagaagcagactgaacagcaacacccagggcgagatgaagttcgaggtggagaacctgatcctgcacaaggactacagcgccgacaccctggcccaccacaacgacatcgccctgctgaagatcagaagcaaggagggcagatgcgcccagcccagcagaaccatccagaccatctgcctgcccagcatgtacaacgacccccagttcggcaccagctgcgagatcaccggcttcggcaaggagaacagcaccgactacctgtaccccgagcagctgaagatgaccgtggtgaagctgatcagccacagagagtgccagcagccccactactacggcagcgaggtgaccaccaagatgctgtgcgccgccgacccccagtggaagaccgacagctgccagggcgacagcggcggccccctggtgtgcagcctgcagggcagaatgaccctgaccggcatcgtgagctggggcagaggctgcgccctgaaggacaagcccggcgtgtacaccagagtgagccacttcctgccctggatcagaagccacaccaaggaggagaacggcctggccctgtag

SEQ ID NO: 335806 - DNA, 1296 bp, Artificial Sequence
  derived and/or modified sequence
atgagagccctgctggccagactgctgctgtgcgtgctggtggtgagcgacagcaagggcagcaacgagctgcaccaggtgcccagcaactgcgactgcctgaacggcggcacctgcgtgagcaacaagtacttcagcaacatccactggtgcaactgccccaagaagttcggcggccagcactgcgagatcgacaagagcaagacctgctacgagggcaacggccacttctacagaggcaaggccagcaccgacaccatgggcagaccctgcctgccctggaacagcgccaccgtgctgcagcagacctaccacgcccacagaagcgacgccctgcagctgggcctgggcaagcacaactactgcagaaaccccgacaacagaagaagaccctggtgctacgtgcaggtgggcctgaagctgctggtgcaggagtgcatggtgcacgactgcgccgacggcaagaagcccagcagcccccccgaggagctgaagttccagtgcggccagaagaccctgagacccagattcaagatcatcggcggcgagttcaccaccatcgagaaccagccctggttcgccgccatctacagaagacacagaggcggcagcgtgacctacgtgtgcggcggcagcctgatcagcccctgctgggtgatcagcgccacccactgcttcatcgactaccccaagaaggaggactacatcgtgtacctgggcagaagcagactgaacagcaacacccagggcgagatgaagttcgaggtggagaacctgatcctgcacaaggactacagcgccgacaccctggcccaccacaacgacatcgccctgctgaagatcagaagcaaggagggcagatgcgcccagcccagcagaaccatccagaccatctgcctgcccagcatgtacaacgacccccagttcggcaccagctgcgagatcaccggcttcggcaaggagaacagcaccgactacctgtaccccgagcagctgaagatgaccgtggtgaagctgatcagccacagagagtgccagcagccccactactacggcagcgaggtgaccaccaagatgctgtgcgccgccgacccccagtggaagaccgacagctgccagggcgacagcggcggccccctggtgtgcagcctgcagggcagaatgaccctgaccggcatcgtgagctggggcagaggctgcgccctgaaggacaagcccggcgtgtacaccagagtgagccacttcctgccctggatcagaagccacaccaaggaggagaacggcctggccctgtag

SEQ ID NO: 335807 - DNA, 1188 bp, Artificial Sequence
  derived and/or modified sequence
atgcgggccctccttgctagattgcttctatgcgtgttggtggtctccgacagcaaaggaagcaacgagctccatcaggtgccatataagagtaaaacttgctatgaggggaatggtcatttttatagaggcaaggcaagcactgataccatggggcggccttgtcttccatggaacagcgctacagtgctccagcagacttatcacgcccatagatctgatgccctccagctcggactcggcaaacacaactattgccgcaaccccgacaaccgccgacgcccttggtgctatgtgcaggtcggcttaaagctcttagtgcaggagtgtatggttcatgactgcgccgacggcaaaaagcctagctccccccccgaagagctgaagttccaatgcggccagaaaacactgaggccgcggtttaagataataggaggagagttcaccactattgaaaatcagccctggttcgccgctatttataggcgccaccgtggcggctctgtgacatacgtatgtggtgggtcactgattagtccctgttgggtaataagtgcaacacattgtttcatcgactatccaaagaaagaagactatatcgtctaccttggtcggtcccgactaaatagcaacacgcagggcgagatgaagtttgaggtggagaatctgattctgcacaaggattattccgcagacactctagcccatcataacgacatcgctctgctgaaaatcaggtcaaaggagggccggtgtgctcagccctcccgaactattcagacgatatgcttaccttcgatgtacaacgacccgcagttcgggaccagttgtgagataactggctttggaaaagagaactcaacggactacctgtatcctgagcaacttaagatgacagtggtcaaattaatctctcacagggagtgccagcagccccattattacgggagtgaggtcaccacaaagatgctctgcgctgccgatccgcagtggaagaccgactcatgccagggagacagcggcggacccctagtgtgttctttgcagggaagaatgaccctgactggaattgtttcctggggccggggatgtgccctcaaagataagcccggagtgtacacaagagtgagccattttttaccctggatcaggtcgcatactaaagaagaaaacgggcttgcgctgtag

SEQ ID NO: 335808 - DNA, 1188 bp, Artificial Sequence
  derived and/or modified sequence
atgcgcgccctccttgcgaggctgttgttgtgtgtattagtggtctccgacagcaaggggagcaatgagctgcatcaggtgccttacaaaagtaaaacctgttacgagggcaacggtcacttttatcgcggcaaagcaagcactgacacgatgggccggccctgtttaccgtggaattccgctacagtgttgcagcagacctatcacgcgcaccgcagcgatgcactgcagttggggctcggcaagcacaattactgtagaaatccagacaaccgcagaaggccttggtgttacgtgcaggtcgggctaaaattgttggtacaggagtgcatggtgcacgattgcgctgatggcaagaagccttcttccccccccgaggagctgaaatttcaatgtggacagaaaacactgcggcctcgcttcaagattatcggcggggagtttacaacgattgagaaccaaccctggtttgctgccatctatcgaagacataggggaggcagcgtgacttatgtgtgtggcggtagcctcatcagtccgtgttgggtcatcagcgccactcattgctttatcgattatcctaagaaggaagattacattgtgtaccttgggaggtctcggctcaactctaacactcagggagagatgaaattcgaagttgaaaacctcatccttcacaaggattatagcgctgacactctcgctcatcataatgatatcgcactcttaaaaatccggtcaaaagagggaaggtgcgcccagcccagccggaccatacagacgatctgtcttccctctatgtacaatgatccccagttcggaacttcctgtgagattaccggctttgggaaggagaattcaaccgactatttatatcctgagcaattgaagatgacggtcgtgaaacttatttcacaccgcgaatgccagcaaccacactactatggcagcgaggtgactactaaaatgctgtgtgccgccgacccccagtggaagaccgattcctgtcagggagacagcggagggccactagtgtgtagtctgcagggccgtatgactctcacgggcattgtctcctggggaagggggtgtgcacttaaagataagcctggggtatatactcgggtttcgcatttcctgccctggattcggagccataccaaggaagagaatggactcgctctgtag

SEQ ID NO: 335809 - DNA, 1296 bp, Artificial Sequence
  derived and/or modified sequence
atgcgggcccttctggctcggctattgctctgtgtgctggtggtgtctgattctaaaggcagcaacgagttacaccaggtccccagcaattgcgattgtctgaatggagggacgtgcgtatcgaacaaatatttcagcaatattcattggtgtaattgtcccaagaaatttggcggacaacactgtgagattgacaaatccaaaacctgttatgaagggaatgggcacttctatcgagggaaagcaagcacggataccatgggtagaccttgtctcccatggaattctgcgaccgttctgcagcaaacatatcatgctcatcggtctgatgcattgcaattgggtctcggcaaacataattactgccgcaatcctgacaacagacgaagaccctggtgctatgtccaggttggacttaagcttcttgtccaagagtgcatggtccacgattgtgctgacggtaagaagccctcatcacctccagaggagttaaagtttcagtgcgggcagaaaactctaaggcctagattcaagatcatcggcggggagttcaccactattgagaatcagccttggtttgctgccatatataggaggcacaggggcggctcggtgacatacgtctgtggcggtagcttgatatcaccctgctgggttatttccgccacacactgctttattgattaccctaagaaggaggattacatcgtgtaccttggaaggagtagattgaatagcaacacacaaggagagatgaaatttgaggtggagaacctcattctgcacaaggattatagcgccgatacgctggcccaccacaatgatattgccctgttgaaaatccggtcaaaggagggtagatgcgcacagccgagccgcactattcagactatctgcttgccgagcatgtacaacgatccgcaattcggcacgagctgcgaaatcacaggcttcggcaaggaaaactctaccgattatctctatccggagcagcttaagatgaccgtggtcaaactcatctcccaccgggagtgccagcaaccgcactattacggctccgaagtcacaaccaaaatgctctgcgcggctgacccccagtggaaaaccgattcttgtcagggagactccgggggccccctggtgtgctcactccagggcagaatgaccctgaccggaatcgtgtcatggggaaggggctgtgcactaaaggacaaacccggagtgtatactagagtaagccatttcttaccatggattagatcacacactaaagaagaaaatggccttgccctttag

SEQ ID NO: 335810 - DNA, 1188 bp, Artificial Sequence
  derived and/or modified sequence
atgagggccctgctggcccggctgctgctgtgtgtgctggtggtgtctgacagcaagggcagcaatgagctgcaccaggtgccctacaagagcaagacctgctatgagggcaatggccacttctaccggggcaaggccagcacagacaccatgggccggccctgcctgccctggaacagcgccaccgtgctgcagcagacctaccacgcccacagaagtgatgccctgcagctgggcctgggcaagcacaactactgcagaaatccagacaacagaagaagaccctggtgctacgtgcaggtgggcctgaagctgctggtgcaggagtgcatggtgcatgactgtgctgatggcaagaagcccagcagccccccagaggagctgaagttccagtgtggccagaagaccctgcggccccgcttcaagatcatcggcggggagttcaccaccatcgagaaccagccctggtttgctgccatctaccgccgccaccggggcggctctgtgacctacgtgtgtggcggcagcctcatcagcccctgctgggtgatcagcgccacccactgcttcatcgactaccccaagaaggaggactacatcgtgtacctgggccgcagccggctgaacagcaacacccagggcgagatgaagtttgaggtggagaacctgatcctgcacaaggactacagcgctgacaccctggcccaccacaatgacatcgccctgctgaagatccgcagcaaggagggccgctgtgcccagcccagcaggaccatccagaccatctgcctgcccagcatgtacaatgacccccagtttggcaccagctgtgagatcaccggctttgggaaggagaacagcacagactacctgtacccagagcagctgaagatgacagtggtgaagctgatcagccaccgggagtgccagcagccccactactacggcagcgaggtgaccaccaagatgctgtgtgccgctgacccccagtggaagacagacagctgccagggcgacagcggcggccccctggtgtgcagcctgcagggccgcatgaccctgactggaattgtgtcctggggccggggctgtgccctgaaggacaagccaggagtgtacaccagggtgagccacttcctgccctggatccgcagccacaccaaggaggagaatggcctggccctgtag

SEQ ID NO: 335811 - DNA, 1296 bp, Artificial Sequence
  derived and/or modified sequence
atgagggccctgctggcccggctgctgctgtgtgtgctggtggtgtctgacagcaagggcagcaatgagctgcaccaggtgcccagcaactgtgactgcctgaatggaggcacctgtgtgagcaacaagtacttcagcaacatccactggtgcaactgccccaagaagtttggaggccagcactgtgaaattgacaagagcaagacctgctatgagggcaatggccacttctaccggggcaaggccagcacagacaccatgggccggccctgcctgccctggaacagcgccaccgtgctgcagcagacctaccacgcccacagaagtgatgccctgcagctgggcctgggcaagcacaactactgcagaaatccagacaacagaagaagaccctggtgctacgtgcaggtgggcctgaagctgctggtgcaggagtgcatggtgcatgactgtgctgatggcaagaagcccagcagccccccagaggagctgaagttccagtgtggccagaagaccctgcggccccgcttcaagatcatcggcggggagttcaccaccatcgagaaccagccctggtttgctgccatctaccgccgccaccggggcggctctgtgacctacgtgtgtggcggcagcctcatcagcccctgctgggtgatcagcgccacccactgcttcatcgactaccccaagaaggaggactacatcgtgtacctgggccgcagccggctgaacagcaacacccagggcgagatgaagtttgaggtggagaacctgatcctgcacaaggactacagcgctgacaccctggcccaccacaatgacatcgccctgctgaagatccgcagcaaggagggccgctgtgcccagcccagcaggaccatccagaccatctgcctgcccagcatgtacaatgacccccagtttggcaccagctgtgagatcaccggctttgggaaggagaacagcacagactacctgtacccagagcagctgaagatgacagtggtgaagctgatcagccaccgggagtgccagcagccccactactacggcagcgaggtgaccaccaagatgctgtgtgccgctgacccccagtggaagacagacagctgccagggcgacagcggcggccccctggtgtgcagcctgcagggccgcatgaccctgactggaattgtgtcctggggccggggctgtgccctgaaggacaagccaggagtgtacaccagggtgagccacttcctgccctggatccgcagccacaccaaggaggagaatggcctggccctgtag

SEQ ID NO: 335812 - DNA, 1188 bp, Artificial Sequence
  derived and/or modified sequence
atgcgggccctgctggcccggctgctgctgtgcgtgctggtggtgtcggactccaagggcagcaacgagctacaccaagtaccgtataagtccaaaacctgctacgaaggcaatggacacttttaccgtggcaaagcttcgactgacaccatgggcagaccatgtctcccatggaacagcgcaaccgtgcttcagcagacttatcatgcccataggagtgacgcactccagctgggactggggaagcataattattgcaggaaccccgataatcggcgtcgaccttggtgttacgttcaagttggactgaagctgttagtccaagagtgcatggtacacgactgcgctgacggcaagaaacccagtagtccaccggaggagttgaagttccaatgcggacagaagaccctcaggccccgattcaagataataggcggcgaatttacaacaatcgaaaatcagccctggttcgctgccatctatcggcgccacagaggaggctccgttacttatgtatgcggggggtcactgatctcaccttgttgggttatctcagccacacattgcttcatcgactatcctaagaaggaggactacattgtctacctgggtcgttctcgcctgaacagcaacacccagggggagatgaagttcgaggtggagaacctgatcctgcataaggactactctgctgatacattggcccaccataacgatattgccctcctcaaaattaggtctaaagagggaaggtgtgcccaaccaagtcgaaccatccagacaatctgtttaccatcaatgtataatgatcctcaattcggcacttcctgcgaaatcactggctttggaaaagagaactcgaccgactatctctatccagagcagttgaagatgactgtggtgaaacttatatcccaccgggaatgccagcagccacactattacggatctgaggtgactacaaaaatgctgtgtgctgctgacccgcagtggaaaacagattcatgccagggggactctggtggaccactcgtgtgcagcttgcaggggagaatgaccctgaccggcattgtgagttggggccgcggatgtgcccttaaagacaaaccgggagtttatactagggtgagtcatttccttccctggattagatcccataccaaagaggagaatggcctcgccctctag

SEQ ID NO: 335813 - DNA, 1188 bp, Artificial Sequence
  derived and/or modified sequence
atgcgggccctgctggcccggctgctgctgtgcgtgctggtggtgtcagacagcaagggatctaatgagcttcatcaggtcccctataagagcaagacctgttatgaaggtaatggccatttctatcgcgggaaggcctctactgataccatgggacgcccctgcctgccgtggaactcggccactgtgctacagcagacataccatgcacaccggagtgatgcgctgcagctggggttaggtaaacataactactgtaggaatccagataacaggagaaggccatggtgttatgtgcaagtggggctgaagctcctggtccaggagtgcatggtgcacgattgcgccgatggaaagaagccttcttctcctcctgaggagcttaagtttcagtgtgggcaaaaaacactgcggcctcgttttaagatcattggtggggagtttacaaccatcgaaaaccaaccctggtttgcggccatttataggcgtcaccgggggggatcagtgacatatgtctgcggtggctctctcatcagcccatgctgggtaatctctgctacacattgtttcattgactacccaaaaaaggaagattacattgtataccttggtcgcagtagactgaattcaaacactcaaggagagatgaagttcgaggtggagaatctgatactacacaaagactacagtgccgacaccctggctcaccataacgacatcgcactcctgaaaattagaagtaaagagggacggtgtgcacagcctagcagaacgatccagacgatctgtctgccttccatgtataacgacccacagttcggcactagttgtgaaatcacagggttcggaaaagagaactcaacggactacctttatcctgagcagctcaaaatgacagtcgtgaagctaatttcgcaccgtgagtgtcagcagccccactattatggttccgaagtgaccacgaaaatgctctgtgcggccgatccacagtggaaaacagactcctgtcagggcgacagcggagggcctttggtgtgtagtctgcagggccgaatgactctgacaggcatcgttagctggggcaggggctgcgcgctgaaagataagccaggcgtgtacactcgcgtttcccatttcctgccatggataaggagtcacacaaaggaggagaatggactggcactgtag

SEQ ID NO: 335814 - DNA, 1296 bp, Artificial Sequence
  derived and/or modified sequence
atgcgggccctgctggcccggctgctgctgtgcgtgctggtggtgagcgactctaagggttccaatgagctgcaccaggtgcctagcaattgtgactgtctcaatggcgggacatgtgtaagtaacaagtatttctccaatatccattggtgcaattgcccgaaaaagttcgggggccaacactgtgaaatcgataaatccaagacgtgttacgagggcaacggacacttttataggggcaaggccagtacagataccatggggagaccttgcctgccatggaatagtgcaaccgtcttacagcagacataccatgcccaccgatctgacgcgcttcagctaggactcggaaagcataattactgccgcaatcccgataaccggagacgaccatggtgctacgtacaggtaggactaaaactcctcgtacaggagtgtatggtgcatgattgcgccgacggtaagaagcctagcagtcctccagaagaactcaagtttcagtgcggccagaagaccctgcggccgcggtttaagatcatcgggggagagttcactaccatcgaaaatcagccctggtttgccgccatctatcgacgccatagagggggctctgttacctacgtctgcggcgggtccctgatctccccctgctgggtgatcagcgccactcactgtttcattgactatccaaagaaggaggattacattgtctaccttggaagatccagactgaactccaatactcaaggtgagatgaagttcgaggtggaaaacctcatcctgcataaagattacagcgcggacacactggcacatcacaacgacatagcactcctgaagattcggtccaaggaaggccgctgcgcccagccaagcagaacaattcaaacgatttgcctgccgtccatgtacaatgacccacagttcgggacctcttgtgagattaccggatttgggaaagagaactcaaccgattacctttaccccgagcagcttaaaatgaccgtggttaaattaattagtcaccgtgagtgccaacagccacactattacggcagcgaagtgacaaccaagatgttgtgtgccgcagatcctcaatggaagactgacagctgtcagggcgatagcggaggccccttggtctgctctcttcagggcaggatgacactgactggcatagtgagctgggggcgaggatgcgctttgaaggacaagcccggggtttacacccgagtgtctcactttctcccttggattcgaagtcacactaaggaggagaatgggctggctctgtag

SEQ ID NO: 335815 - DNA, 1188 bp, Artificial Sequence
  derived and/or modified sequence
atgagagctctgctggccagattgctcctctgcgttcttgtcgtctctgattctaaagggagtaatgagctgcatcaggtgccctataaatcaaagacctgctacgaaggtaatggtcacttttaccggggaaaggcgtctacagacaccatggggcgaccctgcttgccatggaactctgcgacagtgctgcagcagacatatcatgcccacagaagcgacgccctgcagctgggcttggggaaacacaattactgtagaaatcccgacaacaggaggcgtccgtggtgctacgtccaggttggattgaagcttctggtacaggagtgcatggttcacgattgcgccgatggcaagaaaccaagcagtcctcctgaggagctaaaatttcaatgtgggcaaaagacactaagacctagattcaagatcatcggcggagagttcaccacgatcgaaaaccagccatggttcgcggctatctaccgtaggcatcggggaggctcagtcacctacgtctgcggcggtagtcttatcagtccttgttgggtcatatctgccacacactgtttcatcgattaccctaagaaggaggattacattgtctacctcgggaggagcaggctcaacagcaacacacagggggagatgaaatttgaagtggaaaatctgatcctgcataaggactatagcgccgacacccttgcgcaccataacgatatcgccttgctcaagatacgaagtaaagagggacggtgtgcgcagccctcacgaactatccagacaatttgcctaccttcgatgtataacgaccctcagttcggcactagttgcgaaataaccgggtttggcaaggagaactcaacagactacttgtatcctgagcagctgaagatgaccgttgtcaagttgatcagtcatagagagtgccaacaacctcattactatggctccgaagttacaaccaaaatgctctgcgcagcggatccccagtggaagaccgactcttgtcaaggcgattcaggcggtccgctcgtctgtagtcttcagggaagaatgaccttaactggtattgttagttggggcagggggtgtgccctcaaggataaacccggagtctatactcgcgtgtcgcattttctcccctggatccgctcacatactaaggaagagaatggactcgccctttag

SEQ ID NO: 335816 - DNA, 1188 bp, Artificial Sequence
  derived and/or modified sequence
atgagagccctacttgctagacttctcctctgcgtgctggtagtgtctgatagcaagggctctaacgagctgcatcaggtaccttataagtctaaaacgtgttacgaaggcaacggacacttttacagaggaaaagcgtccaccgataccatgggccgaccttgcctgccgtggaacagcgcaacggtgttgcagcagacctaccacgcacaccgaagtgacgcactgcaactgggtctagggaaacataattattgtcgaaatccagacaacagaagacggccatggtgctacgttcaggtcggcttaaagctgctggtccaggaatgcatggtgcacgattgtgctgatggtaaaaaaccttcctctccgcctgaagaactgaaattccagtgcggccaaaaaacgttgaggccgagatttaaaattatcggaggtgagttcaccactattgagaatcaaccctggttcgccgcaatttaccgacgccaccgtggaggcagtgtaacatatgtgtgcggcggaagtctgatatccccctgctgggttatctcagcgacgcattgttttatcgattatccaaagaaggaggactacatcgtgtacctaggccgaagcagactaaattcgaatacccagggggagatgaagttcgaagtagagaatctcatcctgcacaaggattactctgctgatacgttggcgcatcataacgatatcgccctcctgaaaattaggagcaaggagggccgttgcgcccagccctcaaggaccatccagaccatctgtctcccgtcaatgtataatgacccccaattcgggacgtcttgtgaaattactggtttcggcaaggaaaatagcactgattatctgtaccccgagcagctgaaaatgacggttgtaaagctgataagccaccgcgaatgccaacaaccacactattacgggagcgaggtcaccacgaaaatgttgtgtgctgccgaccctcagtggaaaaccgattcctgtcagggcgactccggcggtcccctggtgtgtagcctgcagggtaggatgacattaacgggtatagtgtcatggggcaggggatgcgccttgaaggataagcctggtgtgtacactcgcgtatcccacttcttgccttggatccggagtcataccaaagaggagaacggactggcattgtag

SEQ ID NO: 335817 - DNA, 1296 bp, Artificial Sequence
  derived and/or modified sequence
atgcgggcactgctcgcaaggctactgctgtgtgtcctggtggtttccgatagcaagggtagcaacgaattacatcaagtgccctcaaattgcgattgtctcaacggtggcacttgtgtttctaataagtatttctcaaacatacattggtgtaactgcccaaagaagtttggagggcaacattgcgagatcgacaagagtaagacttgctacgagggcaatggacacttttatcgaggtaaagcgagtacagacaccatgggccgtccctgtcttccttggaactcagcaacggttctgcaacagacttaccacgcccataggtctgatgccctgcagttaggcttgggaaagcacaattattgtagaaatcccgataataggcggaggccatggtgctatgtgcaggtgggactgaagcttcttgttcaagagtgcatggtccacgactgtgccgatggaaagaagccgagttcccctcccgaggagctgaagttccaatgtggacagaaaacattacggccacgttttaaaatcatcgggggagaatttaccaccatcgaaaaccagccatggtttgcagctatttatagaaggcacaggggaggctcagtaacttatgtatgcggaggatctctcatctccccatgctgggtcatctctgccacccactgtttcatcgactatcccaagaaagaggattacatcgtgtacctgggcaggtctcgcctgaattcaaatactcaaggcgagatgaaattcgaagtagaaaatctcatactgcacaaagactacagcgctgatacactcgcacatcataacgacattgctctgctaaagatacgctccaaggaagggagatgcgcacaaccaagccgaacaatccagactatatgtctccccagtatgtataatgacccgcagttcggcacttcttgcgagattaccgggtttgggaaggaaaattccaccgactatctgtaccccgagcagctgaagatgaccgttgttaaactgatctcgcatcgggagtgccagcagccccattattatggaagtgaagtaaccacaaaaatgctgtgcgcagcagacccccagtggaagacggactcttgtcaaggcgattctgggggaccgttggtgtgtagtcttcagggcagaatgacactaaccggcattgtgtcatggggcagaggttgcgcactgaaggacaaacccggagtgtatacacgcgtatctcatttcctgccttggattaggtcccacaccaaggaggagaatggcctggccctttag

SEQ ID NO: 335818 - DNA, 1188 bp, Artificial Sequence
  derived and/or modified sequence
atgagagccctgctggcgcgcctgcttctctgcgtcctggtcgtgagcgactccaaaggcagcaatgaacttcatcaagttccatataagtcaaaaacctgctatgaggggaatggtcacttttaccgaggaaaggccagcactgacaccatgggccggccctgcctgccctggaactctgccactgtccttcagcaaacgtaccatgcccacagatctgatgctcttcagctgggcctggggaaacataattactgcaggaacccagacaaccggaggcgaccctggtgctatgtgcaggtgggcctaaagctgcttgtccaagagtgcatggtgcatgactgcgcagatggaaaaaagccctcctctcctccagaagaattaaaatttcagtgtggccaaaagactctgaggccccgctttaagattattgggggagaattcaccaccatcgagaaccagccctggtttgcggccatctacaggaggcaccgggggggctctgtcacctacgtgtgtggaggcagcctcatcagcccttgctgggtgatcagcgccacacactgcttcattgattacccaaagaaggaggactacatcgtctacctgggtcgctcaaggcttaactccaacacgcaaggggagatgaagtttgaggtggaaaacctcatcctacacaaggactacagcgctgacacgcttgctcaccacaacgacattgccttgctgaagatccgttccaaggagggcaggtgtgcgcagccatcccggactatacagaccatctgcctgccctcgatgtataacgatccccagtttggcacaagctgtgagatcactggctttggaaaagagaattctaccgactatctctatccggagcagctgaaaatgactgttgtgaagctgatttcccaccgggagtgtcagcagccccactactacggctctgaagtcaccaccaaaatgctgtgtgctgctgacccacagtggaaaacagattcctgccagggagactcagggggacccctcgtctgttccctccaaggccgcatgactttgactggaattgtgagctggggccgtggatgtgccctgaaggacaagccaggcgtctacacgagagtctcacacttcttaccctggatccgcagtcacaccaaggaagagaatggcctggccctctga

SEQ ID NO: 335819 - DNA, 2211 bp, Artificial Sequence
  derived and/or modified sequence
cccgggccagggtccacctgtccccgcagcgccggctcgcgccctcctgccgcagccaccgagccgccgtctagcgccccgacctcgccaccatgagagccctgctggcgcgcctgcttctctgcgtcctggtcgtgagcgactccaaaggcagcaatgaacttcatcaagttccatataagtcaaaaacctgctatgaggggaatggtcacttttaccgaggaaaggccagcactgacaccatgggccggccctgcctgccctggaactctgccactgtccttcagcaaacgtaccatgcccacagatctgatgctcttcagctgggcctggggaaacataattactgcaggaacccagacaaccggaggcgaccctggtgctatgtgcaggtgggcctaaagctgcttgtccaagagtgcatggtgcatgactgcgcagatggaaaaaagccctcctctcctccagaagaattaaaatttcagtgtggccaaaagactctgaggccccgctttaagattattgggggagaattcaccaccatcgagaaccagccctggtttgcggccatctacaggaggcaccgggggggctctgtcacctacgtgtgtggaggcagcctcatcagcccttgctgggtgatcagcgccacacactgcttcattgattacccaaagaaggaggactacatcgtctacctgggtcgctcaaggcttaactccaacacgcaaggggagatgaagtttgaggtggaaaacctcatcctacacaaggactacagcgctgacacgcttgctcaccacaacgacattgccttgctgaagatccgttccaaggagggcaggtgtgcgcagccatcccggactatacagaccatctgcctgccctcgatgtataacgatccccagtttggcacaagctgtgagatcactggctttggaaaagagaattctaccgactatctctatccggagcagctgaaaatgactgttgtgaagctgatttcccaccgggagtgtcagcagccccactactacggctctgaagtcaccaccaaaatgctgtgtgctgctgacccacagtggaaaacagattcctgccagggagactcagggggacccctcgtctgttccctccaaggccgcatgactttgactggaattgtgagctggggccgtggatgtgccctgaaggacaagccaggcgtctacacgagagtctcacacttcttaccctggatccgcagtcacaccaaggaagagaatggcctggccctctgagggtccccagggaggaaacgggcaccacccgctttcttgctggttgtcatttttgcagtagagtcatctccatcagctgtaagaagagactgggaagataggctctgcacagatggatttgcctgtgccacccaccagggcgaacgacaatagctttaccctcaggcataggcctgggtgctggctgcccagacccctctggccaggatggaggggtggtcctgactcaacatgttactgaccagcaacttgtctttttctggactgaagcctgcaggagttaaaaagggcagggcatctcctgtgcatgggtgaagggagagccagctcccccgacggtgggcatttgtgaggcccatggttgagaaatgaataatttcccaattaggaagtgtaacagctgaggtctcttgagggagcttagccaatgtgggagcagcggtttggggagcagagacactaacgacttcagggcagggctctgatattccatgaatgtatcaggaaatatatatgtgtgtgtatgtttgcacacttgtgtgtgggctgtgagtgtaagtgtgagtaagagctggtgtctgattgttaagtctaaatatttccttaaactgtgtggactgtgatgccacacagagtggtctttctggagaggttataggtcactcctggggcctcttgggtcccccacgtgacagtgcctgggaatgtattattctgcagcatgacctgtgaccagcactgtctcagtttcactttcacatagatgtccctttcttggccagttatcccttccttttagcctagttcatccaatcctcactgggtggggtgaggaccactcctgtacactgaatatttatatttcactatttttatttatatttttgtaattttaaataaaagtgatcaataaaatgtgatttttctgatg

SEQ ID NO: 335820 - DNA, 2321 bp, Artificial Sequence
  derived and/or modified sequence
gcccgggccagggtccacctgtccccgcagcgccggctcgcgccctcctgccgcagccaccgagccgccgtctagcgccccgacctcgccaccatgagagccctgctggcgcgcctgcttctctgcgtcctggtcgtgagcgactccaaaggcagcaatgaacttcatcaagttccatcgaactgtgactgtctaaatggaggaacatgtgtgtccaacaagtacttctccaacattcactggtgcaactgcccaaagaaattcggagggcagcactgtgaaatagataagtcaaaaacctgctatgaggggaatggtcacttttaccgaggaaaggccagcactgacaccatgggccggccctgcctgccctggaactctgccactgtccttcagcaaacgtaccatgcccacagatctgatgctcttcagctgggcctggggaaacataattactgcaggaacccagacaaccggaggcgaccctggtgctatgtgcaggtgggcctaaagctgcttgtccaagagtgcatggtgcatgactgcgcagatggaaaaaagccctcctctcctccagaagaattaaaatttcagtgtggccaaaagactctgaggccccgctttaagattattgggggagaattcaccaccatcgagaaccagccctggtttgcggccatctacaggaggcaccgggggggctctgtcacctacgtgtgtggaggcagcctcatcagcccttgctgggtgatcagcgccacacactgcttcattgattacccaaagaaggaggactacatcgtctacctgggtcgctcaaggcttaactccaacacgcaaggggagatgaagtttgaggtggaaaacctcatcctacacaaggactacagcgctgacacgcttgctcaccacaacgacattgccttgctgaagatccgttccaaggagggcaggtgtgcgcagccatcccggactatacagaccatctgcctgccctcgatgtataacgatccccagtttggcacaagctgtgagatcactggctttggaaaagagaattctaccgactatctctatccggagcagctgaaaatgactgttgtgaagctgatttcccaccgggagtgtcagcagccccactactacggctctgaagtcaccaccaaaatgctgtgtgctgctgacccacagtggaaaacagattcctgccagggagactcagggggacccctcgtctgttccctccaaggccgcatgactttgactggaattgtgagctggggccgtggatgtgccctgaaggacaagccaggcgtctacacgagagtctcacacttcttaccctggatccgcagtcacaccaaggaagagaatggcctggccctctgagggtccccagggaggaaacgggcaccacccgctttcttgctggttgtcatttttgcagtagagtcatctccatcagctgtaagaagagactgggaagataggctctgcacagatggatttgcctgtgccacccaccagggcgaacgacaatagctttaccctcaggcataggcctgggtgctggctgcccagacccctctggccaggatggaggggtggtcctgactcaacatgttactgaccagcaacttgtctttttctggactgaagcctgcaggagttaaaaagggcagggcatctcctgtgcatgggtgaagggagagccagctcccccgacggtgggcatttgtgaggcccatggttgagaaatgaataatttcccaattaggaagtgtaacagctgaggtctcttgagggagcttagccaatgtgggagcagcggtttggggagcagagacactaacgacttcagggcagggctctgatattccatgaatgtatcaggaaatatatatgtgtgtgtatgtttgcacacttgtgtgtgggctgtgagtgtaagtgtgagtaagagctggtgtctgattgttaagtctaaatatttccttaaactgtgtggactgtgatgccacacagagtggtctttctggagaggttataggtcactcctggggcctcttgggtcccccacgtgacagtgcctgggaatgtattattctgcagcatgacctgtgaccagcactgtctcagtttcactttcacatagatgtccctttcttggccagttatcccttccttttagcctagttcatccaatcctcactgggtggggtgaggaccactcctgtacactgaatatttatatttcactatttttatttatatttttgtaattttaaataaaagtgatcaataaaatgtgatttttctgatga

SEQ ID NO: 335821 - protein, 196 aa, Artificial Sequence
  derived and/or modified sequence
MNIRQFNCSPHPYWLPNFMDVFTWSLPFVGEKVTEMLVNVLSICSDDELMTEGEDQFDERLIYGNKKGSAAARKEIIRNKIRAIGKMARVFSVLREESESVLTLKGLTPTGMLPSGVLAGGRQTLQSATVEAIEAEKAIRGFSPPHRICSFEEAKGLDRINERMPPRKDAVQQDGFNSLNTAHATENHGTGNHTAQ

SEQ ID NO: 335822 - protein, 186 aa, Artificial Sequence
  derived and/or modified sequence
HPYWLPNFMDVFTWSLPFVGEKVTEMLVNVLSICSDDELMTEGEDQFDERLIYGNKKGSAAARKEIIRNKIRAIGKMARVFSVLREESESVLTLKGLTPTGMLPSGVLAGGRQTLQSATVEAIEAEKAIRGFSPPHRICSFEEAKGLDRINERMPPRKDAVQQDGFNSLNTAHATENHGTGNHTAQ

SEQ ID NO: 335823 - DNA, 591 bp, Artificial Sequence
  derived and/or modified sequence
atgaacatcagacagttcaactgcagcccccacccctactggctgcccaacttcatggacgtgttcacctggagcctgcccttcgtgggcgagaaggtgaccgagatgctggtgaacgtgctgagcatctgcagcgacgacgagctgatgaccgagggcgaggaccagttcgacgagagactgatctacggcaacaagaagggcagcgccgccgccagaaaggagatcatcagaaacaagatcagagccatcggcaagatggccagagtgttcagcgtgctgagagaggagagcgagagcgtgctgaccctgaagggcctgacccccaccggcatgctgcccagcggcgtgctggccggcggcagacagaccctgcagagcgccaccgtggaggccatcgaggccgagaaggccatcagaggcttcagccccccccacagaatctgcagcttcgaggaggccaagggcctggacagaatcaacgagagaatgccccccagaaaggacgccgtgcagcaggacggcttcaacagcctgaacaccgcccacgccaccgagaaccacggcaccggcaaccacaccgcccagtag

SEQ ID NO: 335824 - DNA, 561 bp, Artificial Sequence
  derived and/or modified sequence
cacccctactggctgcccaacttcatggacgtgttcacctggagcctgcccttcgtgggcgagaaggtgaccgagatgctggtgaacgtgctgagcatctgcagcgacgacgagctgatgaccgagggcgaggaccagttcgacgagagactgatctacggcaacaagaagggcagcgccgccgccagaaaggagatcatcagaaacaagatcagagccatcggcaagatggccagagtgttcagcgtgctgagagaggagagcgagagcgtgctgaccctgaagggcctgacccccaccggcatgctgcccagcggcgtgctggccggcggcagacagaccctgcagagcgccaccgtggaggccatcgaggccgagaaggccatcagaggcttcagccccccccacagaatctgcagcttcgaggaggccaagggcctggacagaatcaacgagagaatgccccccagaaaggacgccgtgcagcaggacggcttcaacagcctgaacaccgcccacgccaccgagaaccacggcaccggcaaccacaccgcccagtag

SEQ ID NO: 335825 - DNA, 591 bp, Artificial Sequence
  derived and/or modified sequence
atgaacattcgccagtttaactgctctcctcacccctattggcttcccaacttcatggatgtgttcacatggtccctcccgttcgttggcgagaaagtgacggagatgttggtgaatgtgctatcaatctgcagcgacgacgagctgatgactgaaggggaggatcagtttgatgagcgtctcatttacgggaacaaaaagggtagcgccgcggcaaggaaggagatcattagaaataaaatcagagcgataggaaaaatggctcgcgtgtttagtgtgctccgcgaagagagcgagagtgtgctgacactcaagggcctcacccccactggaatgctccctagtggagtgcttgccggggggcgacagaccctgcagagcgcgaccgtggaagcaattgaagccgagaaggctatcagaggattttccccccctcacagaatctgctcattcgaggaggctaaaggtctggacagaatcaatgaacgcatgccgccacgtaaggatgctgtgcagcaagacggatttaactctctgaataccgctcacgccaccgagaatcacgggactggcaatcatacggcccagtag

SEQ ID NO: 335826 - DNA, 561 bp, Artificial Sequence
  derived and/or modified sequence
catccttactggttgcctaatttcatggatgtgtttacatggtcccttcctttcgtaggagagaaggtaacggaaatgctcgtgaacgtgctgtctatctgcagcgatgacgaactcatgaccgagggtgaagatcaatttgacgaaaggctcatatatgggaacaagaaaggcagcgccgcagctaggaaagaaatcataagaaataagattagagccattggaaagatggctcgcgtttttagtgttctgcgggaggagtctgagtcagtgctgactctgaagggactgacaccaaccggcatgctcccttccggggttcttgcggggggccggcaaaccctccagagtgccacagtagaagccattgaggctgaaaaagcaattaggggcttttccccgccgcataggatctgtagctttgaggaagctaaaggcttggatagaattaacgaaagaatgccgcctagaaaagatgctgttcaacaagatgggttcaattctttgaacacagcgcacgcaactgagaatcacggaacaggaaaccataccgcccagtag

SEQ ID NO: 335827 - DNA, 591 bp, Artificial Sequence
  derived and/or modified sequence
atgaacatccggcagttcaactgcagcccccacccctactggctgcccaacttcatggatgtgttcacctggagcctgccctttgtgggggagaaggtgacagagatgctggtgaatgtgctgagcatctgcagtgatgatgagctgatgacagaaggagaggaccagtttgatgagcggctcatctacggcaacaagaagggcagcgctgctgccaggaaggagatcatccggaacaagatccgggccatcggcaagatggcccgggtcttctctgtgctgcgggaggagagcgagagcgtgctgaccctgaagggcctgacccccaccggcatgctgcccagcggcgtgctggccggcggccggcagaccctgcagagcgccaccgtggaggccattgaagctgagaaggccatccggggcttcagccccccccaccgcatctgcagctttgaggaggccaagggcctggaccgcatcaatgaaagaatgccacccaggaaggatgctgtgcagcaggacggcttcaacagcctgaacacagcccacgccacagagaaccacggcaccggcaaccacacagcccagtag

SEQ ID NO: 335828 - DNA, 561 bp, Artificial Sequence
  derived and/or modified sequence
cacccctactggctgcccaacttcatggatgtgttcacctggagcctgccctttgtgggggagaaggtgacagagatgctggtgaatgtgctgagcatctgcagtgatgatgagctgatgacagaaggagaggaccagtttgatgagcggctcatctacggcaacaagaagggcagcgctgctgccaggaaggagatcatccggaacaagatccgggccatcggcaagatggcccgggtcttctctgtgctgcgggaggagagcgagagcgtgctgaccctgaagggcctgacccccaccggcatgctgcccagcggcgtgctggccggcggccggcagaccctgcagagcgccaccgtggaggccattgaagctgagaaggccatccggggcttcagccccccccaccgcatctgcagctttgaggaggccaagggcctggaccgcatcaatgaaagaatgccacccaggaaggatgctgtgcagcaggacggcttcaacagcctgaacacagcccacgccacagagaaccacggcaccggcaaccacacagcccagtag

SEQ ID NO: 335829 - DNA, 591 bp, Artificial Sequence
  derived and/or modified sequence
atgaacatccggcagttcaactgcagcccccacccctactggctgcctaatttcatggacgtcttcacctggtcgctgccctttgtgggggagaaggtgacagagatgttggtgaacgtgctttcgatctgcagcgacgacgagctgatgacagagggagaggatcagttcgatgagaggctcatctatggcaataaaaagggaagcgctgcagcacgcaaagagatcataaggaacaaaattcgggccatcggcaagatggctagggtgtttagcgtgctgcgagaggagagtgagtccgttctgacattaaaaggtttgaccccaaccgggatgctgccatctggtgtgctggcagggggaagacaaaccttacagtctgccactgtggaggccatcgaggcggagaaagccatcaggggattttcaccaccccataggatttgcagttttgaagaggcgaaaggactcgaccggattaatgagcgcatgccaccacgtaaggatgccgtgcagcaagacggttttaactccctgaacaccgctcacgcaacggaaaaccatggcacagggaaccacactgcgcagtag

SEQ ID NO: 335830 - DNA, 561 bp, Artificial Sequence
  derived and/or modified sequence
cacccctactggctgcccaacttcatggacgtgttcacctggagcctgcccttcgtcggcgaaaaggtcacagagatgctggtaaacgtgctctccatctgtagcgatgacgagctgatgacggaaggcgaggaccagttcgatgagcgcttgatctatggtaacaaaaaggggtccgcagcggccagaaaggagatcattagaaataagatcagagcgatcggcaagatggcgcgcgtgttttcagtgctgagggaagagtccgagtctgtgctcacactgaaggggcttactccaaccggcatgctcccaagcggtgttcttgctggcggcaggcagactctgcagagcgcgacagtggaggcaattgaggccgagaaagctatacgcggcttttcccctcctcataggatctgctccttcgaagaagccaaggggcttgaccgtattaatgagcggatgccacctagaaaggacgccgtgcagcaggacgggtttaactctttaaacaccgcccacgcgaccgagaatcatgggactggtaatcacactgcacagtag

SEQ ID NO: 335831 - DNA, 591 bp, Artificial Sequence
  derived and/or modified sequence
atgaatatccgccaatttaattgtagcccacacccgtactggctccccaacttcatggacgtgttcacatggagccttccttttgttggcgagaaagtgaccgagatgctggtgaacgtgctgtccatttgtagcgatgacgagttgatgacggagggggaggaccagtttgatgagcgcctaatctacgggaacaaaaaaggctcagctgcagcccgaaaggagatcatacgcaacaaaattcgggctataggcaagatggctcgagttttctctgtgttgagagaagaaagcgagtccgtgttgactctcaaggggctcacccctacaggcatgctgcccagtggagtcttagctggcggacggcagacccttcagtctgccaccgtcgaggccattgaggctgagaaggcaatccggggattttcgccgcctcaccgaatttgctccttcgaggaggcaaaagggctcgatagaatcaatgagcgcatgcctcctagaaaagacgccgtccagcaggacggttttaattctttgaacacagcccatgctacagagaaccacggtaccggaaaccacaccgcccagtag

SEQ ID NO: 335832 - DNA, 561 bp, Artificial Sequence
  derived and/or modified sequence
catccttactggcttccaaattttatggatgtcttcacttggtctctcccttttgttggcgagaaagttactgagatgctagtcaacgtactctcgatttgttccgatgatgaactgatgaccgagggcgaagatcagttcgacgagcgcctgatctacgggaataaaaaggggagcgccgcagcgaggaaggaaatcataaggaataagatccgcgcaatcggtaaaatggctcgcgtgttctcagtcctgagggaggagtcagaatccgtgctcacgttgaaggggctgacaccaacaggcatgctcccgtcaggggtgctcgctggagggagacagaccctgcagtctgcaaccgtggaggccatagaagccgagaaggccatccggggattttccccccctcaccgcatatgttcctttgaagaggcgaaaggtttggatcgcattaacgagcgcatgcccccaaggaaagatgcagttcagcaggatggctttaactccttgaacactgcacacgccaccgaaaaccatggtactggtaatcatactgcccagtag

SEQ ID NO: 335833 - DNA, 3173 bp, Artificial Sequence
  derived and/or modified sequence
atgccggtcttagcccctctgtagggaaagagggtccgccatgttccccggcggcgccgccgcttggctctggtagccgccgcccccgcccccaaccccgcccggcccagagcctagccgagccccgggcccagcatggccgccccggagccggcccgggctgcaccgcccccacccccgcccccgccgccccctcccggggctgaccgcgtcgtcaaagctgtccctttccccccaacacatcgcttgacatctgaagaagtatttgatttggatgggatacccagggttgatgttctgaagaaccacttggtgaaagaaggtcgagtagatgaagaaattgcgcttagaattatcaatgagggtgctgccatccttcggagagagaaaaccatgatagaagtagaagctccaatcacagtgtgtggtgacatccatggccaattttttgatctgatgaaactttttgaagtaggaggatcacctgctaatacacgatacctttttcttggcgattatgtggacagaggttattttagtatagagtgtgtcttatatttatgggttctgaagattctatacccaagcacattatttcttctgagaggcaaccatgaatgcagacaccttactgaatattttacctttaagcaggaatgtaaaattaagtattcggaaagagtctatgaagcttgtatggaagcttttgatagtttgcctcttgctgcacttttaaaccaacagtttctttgtgttcatggtggactttcaccagaaatacacacactggatgatattaggagattagatagattcaaagagccacctgcatttggaccaatgtgtgacttgttatggtccgatccttctgaagattttggaaatgaaaaatcacaggaacattttagtcacaatacagttcgaggatgttcttatttttataactatccagcagtgtgtgaatttttgcaaaacaataatttgttatcgattattagagctcatgaagctcaagatgcaggctatagaatgtacagaaaaagtcaaactacagggttcccttcattaataacaattttttcggcacctaattacttagatgtctacaataataaagctgctgtattaaagtatgaaaataatgtgatgaatattcgacagtttaactgttctccacatccttactggttgcctaattttatggatgtcttcacgtggtctttaccgtttgttggagaaaaagtgacagaaatgttggtaaatgttctgagtatttgctctgatgatgaactaatgactgaaggtgaagaccagtttgatgaacggctcatatatggcaataaaaaaggttcagctgcagcccggaaagaaatcataagaaacaaaattcgagcaattggcaagatggcaagagtcttctctgttctcagggaggagagtgaaagtgtgctgacactcaagggcctgactcccacagggatgttgcctagtggagtgttagctggaggacggcagaccctgcaaagtgccacagttgaggctattgaggctgaaaaagcaatacgaggattctctccaccacatagaatctgcagttttgaagaggcaaagggtttggataggatcaatgagagaatgccacctcggaaagatgctgtacagcaagatggtttcaattctctgaacaccgcacatgccactgagaaccacgggacgggcaaccatactgcccagtgacccactacttcccagggactctcacatctcgggccccaaatggacagatcacccgaggagctggaggggtcggccaagctgactgtaaatttcacagtctctctgaagaaaccattgtgcttctgagaccctagcccccttcctggatggaggcttgagggccctgggacatgtgctatctgataagattgggtcatcgctgccaaggtggagagcagtgagcaaggggcttggggcaatttccagtggagggcatccacacctccattttatgcttgtggttcacacatttaagtttacaaatcagatttcttttccccttcagtagaattagattttgtttttcaatcatgatttcaaatgcaatcctaagagctaatgtggacttttctttttccatgaaatgtctttaaaggatgaattagcatggtcttaaaatacatttctgaggttactagctgtattttgaattgtgagcaaaatgccgagaaacccagttggcatttatacaaaatgttgacctcaggtctatagttcttaaatgtggctaattctgtaacatagtcttggtattttttaattatgaatgcatatcctatttccaggcaggctctcttacttgaacacaaatccaaaaactaatttagagtcttttttgcccagatcttttaagacttacaccccagagatttaagaagaaaacctctaaatttcaaaattatgaagaattacagaattactcatttaaggtactttaaaagaagtttgtacattgtcaaagtaaattttaattcaaatcatgtctgtaaaacttgacgtattttgtgtatgcatgttttcattttgcaaatatttaatatatagacctatgatgtacaggtacgacatgtataggttacctagatgttatgagaaattttagtttattgtgagtactcaagttgcttagagagccaccagggtgatttgctgctggctttctatcatttttatgttttaatgcaaaggaaattttaaaatgttctggaagtgtttttgattaagcaatgcagcctagaagcaatggttctgttcaatcattcagatgttagtggaagcataaaagtcaagactgcatgttgaaacctttcttttgatagttactgaactgcttggttaaactaaatggaaccatgtgctaatttttcacaattattgacctgtattgattgccactgtagtttggtatttccctttactttggtggcctgcttccctcatgccctggaatacaactcagagctccaggcagcggaaccatctattgttttgtttgccagaaagtgcaccctgtatggtctcctgtctaagttggaaatattatgcatgtgcaggactattcgagtattttataaacagtagcacacaataaattccatgcatgggccgctgctcct

SEQ ID NO: 335834 - DNA, 605 bp, Artificial Sequence
  derived and/or modified sequence
catccttactggttgcctaattttatggatgtcttcacgtggtctttaccgtttgttggagaaaaagtgacagaaatgttggtaaatgttctgagtatttgctctgatgatgaactaatgactgaaggtgaagaccagtttgatgaacggctcatatatggcaataaaaaaggttcagctgcagcccggaaagaaatcataagaaacaaaattcgagcaattggcaagatggcaagagtcttctctgttctcagggaggagagtgaaagtgtgctgacactcaagggcctgactcccacagggatgttgcctagtggagtgttagctggaggacggcagaccctgcaaagtgccacagttgaggctattgaggctgaaaaagcaatacgaggattctctccaccacatagaatctgcagttttgaagaggcaaagggtttggataggatcaatgagagaatgccacctcggaaagatgctgtacagcaagatggtttcaattctctgaacaccgcacatgccactgagaaccacgggacgggcaaccatactgcccagtgacccactacttcccagggactctcacatctcgggccccaaatgga

SEQ ID NO: 335835 - protein, 315 aa, Artificial Sequence
  derived and/or modified sequence
MAQVLIVGAGMTGSLCAALLRRQTSGPLYLAVWDKAEDSGGRMTTACSPHNPQCTADLGAQYITCTPHYAKKHQRFYDELLAYGVLRPLSSPIEGMVMKEGDCNFVAPQGISSIIKHYLKESGAEVYFRHRVTQINLRDDKWEVSKQTGSPEQFDLIVLTMPVPEILQLQGDITTLISECQRQQLEAVSYSSRYALGLFYEAGTKIDVPWAGQYITSNPCIRFVSIDNKKRNIESSEIGPSLVIHTTVPFGVTYLEHSIEDVQELVFQQLENILPGLPQPIATKCQKWRHSQVPSAGVILGCAKSPWMMAIGFPI

SEQ ID NO: 335836 - DNA, 948 bp, Artificial Sequence
  derived and/or modified sequence
atggcccaagtgctaatcgtaggagccgggatgacgggaagcctgtgcgctgccctcctgcgcaggcagacgtctggaccactgtaccttgccgtttgggataaggcagaggactccggcggccggatgacaaccgcctgctctccacataacccccagtgcacagccgacctgggggcccaatacattacttgcacccctcactacgctaagaaacaccagagattctacgacgagttattagcttatggcgtgctcaggccattgtcaagtccaattgaagggatggttatgaaggagggagattgtaacttcgttgccccacagggcatctcatctataataaagcattacttgaaagagtctggagctgaggtctacttccgacaccgggtgacacagatcaatctccgggacgacaaatgggaggtgagtaagcagaccggctcccctgaacagtttgatctgatagtgctcacaatgcccgtcccagaaatactgcagcttcagggcgacatcaccactctcatcagtgagtgccagcggcagcagctcgaggcagtatcctacagctctagatatgcccttggactattctacgaggccggtacaaagatcgacgtcccttgggcaggacagtatatcacgagcaacccctgcatccggtttgtgtccattgataataagaaacgcaacatcgaaagtagtgagatcggccctagtctggtcatccacaccaccgtaccctttggggtaacttatctggaacactctatcgaagacgtgcaagaacttgtcttccagcagctggagaacattctcccaggattaccacagcctatcgcaacgaagtgtcaaaagtggaggcactctcaggttcccagtgcgggagtcattctagggtgtgctaagtccccatggatgatggccattggcttccccatttag

SEQ ID NO: 335837 - DNA, 948 bp, Artificial Sequence
  derived and/or modified sequence
atggcccaggtgctgattgtgggcgccggcatgacaggcagcctgtgtgccgccctgctgcggcggcagaccagcggccccctgtacctggccgtgtgggacaaggcagaagattctgggggccgcatgaccacagcctgcagcccccacaacccccagtgcacagctgacctgggcgcccagtacatcacctgcaccccccactacgccaagaagcaccagcgcttctatgatgagctgctggcctatggagtgctgcggcccctgagcagccccatcgagggcatggtgatgaaggagggggactgcaactttgtggccccccagggcatcagcagcatcatcaagcactacctgaaggagagcggggctgaggtgtacttccgccaccgggtgacccagatcaacctgagagatgacaagtgggaggtgtccaagcagacaggcagccctgagcagtttgacctgattgtgctgaccatgcctgtgcctgagatcctgcagctgcagggcgacatcaccaccctcatcagcgagtgccagaggcagcagctggaggccgtgtcctacagcagccgctatgccctgggcctcttctatgaggccggcaccaagattgatgtgccctgggccggccagtacatcaccagcaacccctgcatccgctttgtgtccattgacaacaagaagagaaatattgagagcagcgagatcggccccagcctggtgatccacaccaccgtgcccttcggcgtgacctacctggagcacagcattgaagatgtgcaggagctggtgttccagcagctggagaacatcctgcccggcctgccccagcccatcgccaccaagtgccagaagtggaggcacagccaggtgcccagcgctggggtcatcctgggctgtgccaagagcccctggatgatggccatcggcttccccatctag

SEQ ID NO: 335838 - DNA, 948 bp, Artificial Sequence
  derived and/or modified sequence
atggcccaggtgctgatcgtgggcgccggcatgaccggcagcctgtgtgcggctctcttgagacggcaaacctcgggtcccctttacctggccgtatgggataaggcagaagactccgggggaagaatgaccaccgcttgctcaccacataacccacagtgtacagcagacttgggcgcccaatacatcacttgtacaccacactacgccaaaaagcatcagaggttttatgatgaactgctagcgtacggggtgttgagacccctctcatcgccaatcgaggggatggtcatgaaagagggtgactgtaatttcgtagctccgcagggaattagcagtataatcaagcattacctcaaggagtctggggccgaagtctacttcaggcaccgtgtgacccaaatcaatttgcgagacgataaatgggaggtttctaagcagacagggagccccgagcaattcgacctgatcgtcctgacaatgccagtgccagagatactccagttgcagggagacatcactaccctgattagtgagtgccagcgtcagcagctcgaagccgtttcatatagttcacgatacgccctggggctgttctacgaagccggcacgaagatcgacgtaccttgggccggccagtatatcacctctaatccatgtatcaggttcgttagtattgacaataagaaacggaacatcgaatctagcgagattggcccctcactggtgatccatactactgtgccctttggagtgacttatctcgagcattcgattgaggatgtgcaggagcttgtgtttcagcagctggaaaacattctcccggggctgccacagcctatcgcgaccaagtgtcagaaatggaggcattctcaggtgccctccgccggtgtgatcttgggatgtgcgaagagcccttggatgatggccatcggctttccaatttag

SEQ ID NO: 335839 - DNA, 948 bp, Artificial Sequence
  derived and/or modified sequence
atggctcaagtcctcatcgtcggcgctggcatgactggttctctgtgcgcagctctgttgcgacgccagacaagtggtcctctgtacttggcggtttgggataaggccgaagattctggcggacgcatgaccactgcctgttcaccccataaccctcagtgtacagcagacttaggagcgcaatatatcacgtgcacaccccattatgctaaaaaacaccaacggttctacgatgagttactggcctacggcgtgcttagaccattgtccagtcccattgaaggcatggtgatgaaggagggcgactgtaacttcgtggcaccacaaggaatttcatccattatcaagcattatctcaaagaatcaggggctgaggtgtattttcgacatcgggtgacgcaaattaatctccgggatgacaaatgggaggtgtcaaagcagaccggatcccccgagcaatttgacctgatagtgctaaccatgccagtacctgaaatcttgcaactgcagggcgacatcaccactttgatcagcgagtgtcagagacagcagctggaagcagtgagctactcctctcggtacgctctcggacttttctacgaagctggcaccaaaatcgacgtaccctgggccggtcaatacataacaagtaacccatgtataaggtttgtgtccatagacaacaagaaacggaatattgaaagctcagagattggcccaagcctggtgattcacactaccgttccttttggcgtgacctacctggagcacagcatcgaggatgttcaggagctcgttttccagcagctcgagaacatactccctggcctgccacagcctattgctaccaaatgccagaagtggaggcattctcaggtcccatctgctggagtcatccttggctgcgccaagtccccgtggatgatggcaattgggttccccatttag

SEQ ID NO: 335840 - DNA, 3385 bp, Artificial Sequence
  derived and/or modified sequence
ttggacttacgtatttctttttattcaagaactctatccaatatatacacattttccttttggcttttgtcatttgtgtctttaagactttgaataatgtttttaaataatattaactttaatctttcatacacctttcagaaatttactatttgtattttgttttgtgtattttgtaacacacaagttgtaaatgattatgtattttctgttcaattccatctttcatttttatgcttaaaaatgtcttcttagtcatatatgcccgtctacattttcttctagttcttttattagatatatctagtattaattcgtcacccatttgatacatggtaatttttttcatgatgtggacatgaagtaaatattctgatttttaaatgtttccattataattggctaccattgtcaattttcttattggttctgatacttattcggtttcttagttttccaggtaataatttatctgcaagtcagcgtaacttaattatttgttttttaatagttcagtattaccattgcctttgttgtttcattgagaacttccagtacaatgtcaggagggggaaaaaaacaacggcaatggcaccaatccttctcttgttgttcatctttatattccttagaacatacggaatgcgttctgacatagaacttattgaagagtaatttggaattttctgatgaatcaactgtctttaatctttacaagtttgaaaggtatacgttattgtttccatttcccagatggagaaattgaggttcaggaaggttacacaaagtcccaggtctaagaaaaatgtctcccagattccaaaagatgtttctattatgctaatagtggccgttcaagcattagaggaaaggttgcccgtggtatcgctggtaaattcttcttcccactttcaaatctagaatagtaaaacagcaaaaatcccaacaggcatgagagttatcgcagtagataggttaagctgcttctctgctgtggtcaacgtcagctctgttgcgaggcgggttctcccaacaatagcccacaccatttccaggcttttctgggcgaggggcagggcgcccggcccccaaagcgagaagacagacagccccggttctccgcagccccaggtttgctcctcaaggacggaggggcctctcagctccggccgcctcctttccgccccctgcaggccggccggaggaaagctcagggcccaggtcggcccagggagcacggaaccaaagagcgctagcgccggttcggccgcctttccagaaagcccgggccgaacggccccgccgcagagactcagcgcggatcgctgctccctctcgccatggcgcaggtgctgatcgtgggcgccgggatgacaggaagcttgtgcgctgcgctgctgaggaggcagacgtccggtcccttgtaccttgctgtgtgggacaaggctgaggactcagggggaagaatgactacagcctgcagtcctcataatcctcagtgcacagctgacttgggtgctcagtacatcacctgcactcctcattatgccaaaaaacaccaacgtttttatgatgaactgttagcctatggcgttttgaggcctctaagctcgcctattgaaggaatggtgatgaaagaaggagactgtaactttgtggcacctcaaggaatttcttcaattattaagcattacttgaaagaatcaggtgcagaagtctacttcagacatcgtgtgacacagatcaacctaagagatgacaaatgggaagtatccaaacaaacaggctcccctgagcagtttgatcttattgttctcacaatgccagttcctgagattctgcagcttcaaggtgacatcaccaccttaattagtgaatgccaaaggcagcaactggaggctgtgagctactcctctcgatatgctctgggcctcttttatgaagctggtacgaagattgatgtcccttgggctgggcagtacatcaccagtaatccctgcatacgcttcgtctccattgataataagaagcgcaatatagagtcatcagaaattgggccttccctcgtgattcacaccactgtcccatttggagttacatacttggaacacagcattgaggatgtgcaagagttagtcttccagcagctggaaaacattttgccgggtttgcctcagccaattgctaccaaatgccaaaaatggagacattcacaggtaccaagtgctggtgtgattctaggatgtgcgaagagcccctggatgatggcgattggatttcccatctgacttcctggaaattggagcacacagtcaggttttatttgatttttttttttaaggataccacttcacagcctttaggatagctattatttagaagcaaaacagaagataaatgttggcaaggatgtggagatattggattcccttgtgcagtgccggtgggaatgtaaaatgatgtagctactatggaaaatgatacggcaatttctttagaaatgaaatatagaattgctgtatgatctgcagttccacatctggatatctatccaaaagaagtgaaagtagggacttgaacgaacatttgtacaccaatgttcacagcggctttattcacaacagccaaaaggtggaagcaacccagtgtccatggatagatgaatagataaataaaatgtggtataaacatacaatgggctattgtttagccttaaaagggaaggaaattctgacatgctgcaatatggatgaagcttaaagtcattatgcaaagtggaataagcctatcacaaaaaataatattacataattctacttatatgaggaatctagagcagtcagtttcacagagacagaaaatagaatggtggttgccaagggctgggagaagagggcaatggagagtgagtgtttagtgggtcagagttttagtttgggaaggtaaaaagttctggagatggatgatggttatgggtgctcaacagtgtgaatgtacttaatgccacagaactgcacatttaaatgtggttaaaatcatcacttttatgttatgtatatttaccacaataaataaagaagttgatatttcttatacttacaaagaggagaagggcatttgcaaatcaacaagaagtgtgaggcccctctctctagcagaaaaatagactaaatctatttctttatcttttaacatcctgtttaagggaaatgccaaaacaaatgggaaaaaatacacacacacaaatatatatgaacatgttttgcctcatgagtaatcaaaatgtgtacatatgtatgtttatgtatgtgtgtttatatttaaaatcgtgttctgccttatgagtaaacaaaaagtatacaaattaaaaactataatgaaacgt

SEQ ID NO: 335841 - DNA, 948 bp, Artificial Sequence
  derived and/or modified sequence
atggcccaggtgctgatcgtgggcgccggcatgaccggcagcctgtgcgccgccctgctgagaagacagaccagcggccccctgtacctggccgtgtgggacaaggccgaggacagcggcggcagaatgaccaccgcctgcagcccccacaacccccagtgcaccgccgacctgggcgcccagtacatcacctgcaccccccactacgccaagaagcaccagagattctacgacgagctgctggcctacggcgtgctgagacccctgagcagccccatcgagggcatggtgatgaaggagggcgactgcaacttcgtggccccccagggcatcagcagcatcatcaagcactacctgaaggagagcggcgccgaggtgtacttcagacacagagtgacccagatcaacctgagagacgacaagtgggaggtgagcaagcagaccggcagccccgagcagttcgacctgatcgtgctgaccatgcccgtgcccgagatcctgcagctgcagggcgacatcaccaccctgatcagcgagtgccagagacagcagctggaggccgtgagctacagcagcagatacgccctgggcctgttctacgaggccggcaccaagatcgacgtgccctgggccggccagtacatcaccagcaacccctgcatcagattcgtgagcatcgacaacaagaagagaaacatcgagagcagcgagatcggccccagcctggtgatccacaccaccgtgcccttcggcgtgacctacctggagcacagcatcgaggacgtgcaggagctggtgttccagcagctggagaacatcctgcccggcctgccccagcccatcgccaccaagtgccagaagtggagacacagccaggtgcccagcgccggcgtgatcctgggctgcgccaagagcccctggatgatggccatcggcttccccatctag

SEQ ID NO: 335842 - protein, 333 aa, Artificial Sequence
  derived and/or modified sequence
MPRRGLILHTRTHWLLLGLALLCSLVLFMYLLECAPQTDGNASLPGVVGENYGKEYYQALLQEQEEHYQTRATSLKRQIAQLKQELQEMSEKMRSLQERRNVGANGIGYQSNKEQAPSDLLEFLHSQIDKAEVSIGAKLPSEYGVIPFESFTLMKVFQLEMGLTRHPEEKPVRKDKRDELVEVIEAGLEVINNPDEDDEQEDEEGPLGEKLIFNENDFVEGYYRTERDKGTQYELFFKKADLTEYRHVTLFRPFGPLMKVKSEMIDITRSIINIIVPLAERTEAFVQFMQNFRDVCIHQDKKIHLTVVYFGKEGLSKVKSILESVTRLASSTW

SEQ ID NO: 335843 - DNA, 1337 bp, Artificial Sequence
  derived and/or modified sequence
cggcggcgggcccaaggcgtgaggcgccgcccgggtgtccccgcggcgcaggaggcggtggagcgcagagcgggcgagcgcgaaaaatcactaccaatataatggattttatatatcagattgctttattctggatatcatggtaacaatacagaaagtatacataatttcccatttctgcaagtagtcatgactgctgaagaaagaaaaacttaaagctacggcagaattattttatggaaattctgattttgtttttaatttttgataactttttactaaaggtatgaacacacaaagagcttattttgttaggcaaatacacattaataagaatgcctagaagaggactgattcttcacacccggacccactggttgctgttgggccttgctttgctctgcagtttggtattatttatgtacctcctggaatgtgccccccagactgatggaaatgcatctcttcctggtgttgttggggaaaattatggtaaagagtattatcaagccctcctacaggaacaagaagaacattatcagaccagggcaaccagtctgaaacgccaaattgcccaactaaaacaagaattacaagaaatgagtgagaagatgcggtcactgcaagaaagaaggaatgtaggggctaatggcataggctatcagagcaacaaagagcaagcacctagtgatcttttagagtttcttcattcccaaattgacaaagctgaagttagcataggggccaaactacccagtgagtatggggtcattccctttgaaagttttaccttaatgaaagtatttcaattggaaatgggtctcactcgccatcctgaagaaaagccagttagaaaagacaaacgagatgaattggtggaagttattgaagcgggcttggaggtcattaataatcctgatgaagatgatgaacaagaagatgaggagggtccccttggagagaaactgatatttaatgaaaatgacttcgtagaaggttattatcgcactgagagagataagggcacacagtatgaactcttttttaagaaagcagaccttacggaatatagacatgtgaccctcttccgcccttttggacctctcatgaaagtgaagagtgagatgattgacatcactagatcaattattaatatcattgtgccacttgctgaaagaactgaagcatttgtacaatttatgcagaacttcagggatgtttgtattcatcaagacaagaagattcatctcacagtggtgtattttggtaaagaaggactgtctaaagtcaagtctatcctagaatctgtcaccagattggcttcttccacatggtga

SEQ ID NO: 335844 - DNA, 1002 bp, Artificial Sequence
  derived and/or modified sequence
atgcccagaagaggcctgatcctgcacaccagaacccactggctgctgctgggcctggccctgctgtgcagcctggtgctgttcatgtacctgctggagtgcgccccccagaccgacggcaacgccagcctgcccggcgtggtgggcgagaactacggcaaggagtactaccaggccctgctgcaggagcaggaggagcactaccagaccagagccaccagcctgaagagacagatcgcccagctgaagcaggagctgcaggagatgagcgagaagatgagaagcctgcaggagagaagaaacgtgggcgccaacggcatcggctaccagagcaacaaggagcaggcccccagcgacctgctggagttcctgcacagccagatcgacaaggccgaggtgagcatcggcgccaagctgcccagcgagtacggcgtgatccccttcgagagcttcaccctgatgaaggtgttccagctggagatgggcctgaccagacaccccgaggagaagcccgtgagaaaggacaagagagacgagctggtggaggtgatcgaggccggcctggaggtgatcaacaaccccgacgaggacgacgagcaggaggacgaggagggccccctgggcgagaagctgatcttcaacgagaacgacttcgtggagggctactacagaaccgagagagacaagggcacccagtacgagctgttcttcaagaaggccgacctgaccgagtacagacacgtgaccctgttcagacccttcggccccctgatgaaggtgaagagcgagatgatcgacatcaccagaagcatcatcaacatcatcgtgcccctggccgagagaaccgaggccttcgtgcagttcatgcagaacttcagagacgtgtgcatccaccaggacaagaagatccacctgaccgtggtgtacttcggcaaggagggcctgagcaaggtgaagagcatcctggagagcgtgaccagactggccagcagcacctggtag

SEQ ID NO: 335845 - DNA, 1002 bp, Artificial Sequence
  derived and/or modified sequence
atgccccgtcgcgggttaatcctccacactcgcacccattggctgctactcggccttgcccttctatgttccctcgttctttttatgtatctgctcgaatgtgcaccacagactgacgggaatgcaagtctgcccggggttgttggcgaaaattatgggaaagagtattaccaagcactgctgcaggaacaggaggagcattaccagacacgcgcaacgtcactgaagcgccagattgcccaactcaaacaggaactgcaggaaatgtcggagaaaatgcgttcacttcaggagaggagaaacgtgggtgctaatggcatcgggtaccagagtaacaaggaacaggccccgagcgaccttctggagtttctccacagtcaaatagacaaggctgaggttagtattggggcaaaattaccatcagagtacggtgtgattcctttcgaaagcttcacactgatgaaggtgtttcaacttgagatgggtttgacccgacatcccgaagaaaagccagtgcggaaagataagcgcgacgaattagttgaggttattgaggctggtcttgaggtaataaacaaccctgatgaggatgatgaacaggaagacgaagagggtccactcggcgaaaaacttatattcaatgagaacgacttcgtggagggttactaccggaccgagagggataaaggcacgcagtatgaactgttttttaagaaggctgatctgaccgagtacaggcacgtgactttgttccggccttttgggcccttgatgaaggtcaaatctgagatgatcgatatcacccggagtatcattaatatcattgtgcccttggcagagcgcaccgaagcctttgtgcagttcatgcaaaactttcgagacgtgtgcatccaccaagacaaaaaaatccatcttacagtggtatattttggaaaagaaggtctcagtaaggtgaaaagcattcttgagagcgtgacacgtctcgcttcatctacttggtag

SEQ ID NO: 335846 - DNA, 1002 bp, Artificial Sequence
  derived and/or modified sequence
atgccccggcggggcctcatcctgcacaccaggacccactggctgctgctgggcctggccctgctgtgcagcctggtgctcttcatgtacctgctggagtgtgccccccagacagatggaaatgccagcctgcccggggtggtgggggagaactacggcaaggagtactaccaggccctgctgcaggagcaggaggagcactaccagacccgggccaccagcctgaagaggcagatcgcccagctgaagcaggagctgcaggagatgtctgagaagatgaggagcctgcaggagaggagaaatgtgggcgccaatggaattggctaccagagcaacaaggagcaggcccccagcgacctgctggagttcctgcacagccagattgacaaggccgaggtgtccattggagccaagctgcccagtgaatatggagtcatcccctttgagagcttcaccctgatgaaggtgttccagctggagatgggcctgaccaggcaccctgaggagaagcctgtgaggaaggacaagagagatgagctggtggaggtgattgaggccggcctggaggtgatcaacaacccagatgaagatgatgagcaggaggatgaggagggccccctgggggagaagctgatcttcaatgaaaatgactttgtggagggctactacagaacagagcgggacaagggcacccagtatgagctgttcttcaagaaggctgacctgacagagtacagacatgtgaccctcttccggcccttcggccccctgatgaaggtgaagtctgagatgattgacatcaccaggagcatcatcaacatcatcgtgcccctggccgagaggacagaggcctttgtgcagttcatgcagaacttcagagatgtgtgcatccaccaggacaagaagatccacctgactgtggtgtactttgggaaggagggcctgagcaaggtgaagagcatcctggagagcgtgacccggctggccagcagcacctggtag

SEQ ID NO: 335847 - DNA, 1002 bp, Artificial Sequence
  derived and/or modified sequence
atgccccggcggggcctgatcctgcacacccggacccactggctgctgctcggtctggccctgttgtgttctctggtgctgttcatgtatctccttgagtgtgcaccccagacggacggtaatgcatcactgccaggagtggtgggagaaaactatgggaaggagtactatcaggcgctgctgcaggagcaggaagaacactaccaaactcgcgccacgtccctcaaaaggcagatcgcacaattaaaacaagagttacaggaaatgagcgaaaaaatgcgctctctccaggagcgccgcaacgttggagccaatggcatcggttaccaaagtaataaggaacaagcccccagtgatctcttggaatttctgcacagccaaatagataaggccgaagttagtatcggcgccaaactgccctccgagtacggggtcattccttttgagagtttcaccctgatgaaggtgttccagttggagatggggctcacgaggcaccctgaggaaaagcctgtcagaaaagataagcgagatgagctagtggaggtcatagaggccgggctcgaggtgattaacaacccagatgaggacgatgagcaggaagatgaagagggaccccttggagagaagctcatcttcaacgaaaacgacttcgtcgaaggttactacagaacggagagagacaaaggtacccagtacgagctattttttaagaaagcagacttaactgagtacagacacgtcacactgttcagaccatttggcccccttatgaaggtgaaaagtgagatgatcgatatcactcggagcataatcaatattattgtcccactggcggagagaacagaggccttcgttcaattcatgcagaacttccgtgacgtatgcattcatcaggataaaaaaattcacttgaccgtagtgtacttcggcaaggagggactgtcgaaagtgaagtctattctcgagtccgtgaccagactcgcttcctctacgtggtag

SEQ ID NO: 335848 - DNA, 1002 bp, Artificial Sequence
  derived and/or modified sequence
atgcctcggagaggactgattctgcatactcgcacccactggcttcttctgggcctggctctgctgtgctccctcgtcctttttatgtatctgctggagtgtgcgccacagaccgatggtaatgctagtctcccgggtgtcgtcggcgaaaactacggtaaagaatactatcaagcactactccaagagcaggaggagcactaccaaaccagagcgacttccctgaagcgccagatcgcccagctcaaacaggagctccaagagatgtctgagaagatgcggagcctccaagagaggcggaacgtgggggcaaatggaattggctatcagtcaaataaggagcaggccccaagtgacctgcttgaattcctgcatagtcaaatagataaagccgaggtgagcatcggagcaaagctcccctccgagtacggtgtgatcccttttgagtctttcacgttgatgaaagtgttccagctggaaatgggccttactcgccatccagaagagaaaccggtaagaaaagataagcgggacgagctggtcgaagttatagaggctggcttggaggtcattaataaccctgatgaggatgatgaacaggaagatgaggaggggcctctcggggagaaactaatatttaacgagaacgattttgtggagggatactatcgaacggagagggataaaggcactcagtatgaactgttttttaagaaggccgatctcactgagtacaggcacgtcacacttttcagaccttttggacctcttatgaaagtgaaatctgagatgatcgatattaccaggtctatcatcaacatcatcgtccccctggctgaaaggaccgaggccttcgtccagtttatgcagaattttcgtgacgtttgcatccaccaggacaagaagattcatctcacagttgtgtatttcggcaaggaaggtctcagcaaagtgaaatctatactggaatctgtcaccagactggctagctcaacttggtag

SEQ ID NO: 335849 - protein, 192 aa, Artificial Sequence
  derived and/or modified sequence
MANFQNFKPRSNREEMKFHEFVEKLQDIQQRGGEERLYLQQTLNDTVGRKIVMDFLGFNWNWINKQQGKRGWGQLTSNLLLIGMEGNVTPAHYDEQQNFFAQIKGYKRCILFPPDQFECLYPYPVHHPCDRQSQVDFDNPDYERFPNFQNVVGYETVVGPGDVLYIPMYWWHHIESLLNGGITITVNFWYKG

SEQ ID NO: 335850 - DNA, 579 bp, Artificial Sequence
  derived and/or modified sequence
atggcaaatttccagaacttcaaaccgaggtctaaccgcgaggagatgaagttccacgaattcgtcgagaagctgcaggacattcagcagcgcggtggggaagaacggctgtatctccaacagaccttgaacgatactgttggtagaaaaatcgtgatggactttctgggatttaactggaactggatcaacaaacagcagggaaagcgcggttggggtcagctgacctctaacctgctgctaatcggtatggaagggaatgtgactccggctcactacgatgagcagcagaatttctttgcccagattaaaggttacaaaaggtgtattctcttcccacccgatcagtttgaatgcctctacccgtatccggtccaccatccgtgtgatcgacagtcacaagtggatttcgacaaccctgactacgaacggttcccaaactttcagaatgtggtgggctacgaaacagtcgtcgggcccggagacgtgctgtatatcccaatgtattggtggcatcatattgaatccctgctcaacggcggcattaccatcactgtgaatttctggtacaaggggtag

SEQ ID NO: 335851 - DNA, 579 bp, Artificial Sequence
  derived and/or modified sequence
atggccaacttccagaacttcaagcccaggagcaaccgggaggagatgaagttccatgaatttgtggagaagctgcaggacatccagcagaggggcggggaggagcggctgtacctgcagcagaccctgaatgacacagtgggcaggaagatcgtgatggacttcctgggcttcaactggaactggatcaacaagcagcagggcaagaggggctggggccagctgaccagcaacctgctgctgattggcatggagggcaatgtgaccccagcccactatgatgagcagcagaacttctttgcccagatcaagggctacaagcgctgcatcctcttccccccagaccagtttgagtgcctgtacccctaccctgtgcaccacccctgtgaccggcagagccaggtggactttgacaacccagactatgagcgcttccccaacttccagaatgtggtgggctatgagaccgtggtgggccctggagatgtgctgtacatccccatgtactggtggcaccacatcgagagcctgctgaatggaggcatcaccatcaccgtgaacttctggtacaagggctag

SEQ ID NO: 335852 - DNA, 579 bp, Artificial Sequence
  derived and/or modified sequence
atggccaacttccagaacttcaagccccggagcaaccgggaggagatgaaatttcacgagttcgtggagaaacttcaggacatccaacagagaggtggagaagagaggctgtatctgcagcagacacttaatgatacagttggccggaagatcgttatggatttcctcggatttaactggaattggattaataaacagcaggggaagcgaggctggggacagctgacgtccaacttactgctgatagggatggagggcaatgtcactcctgctcattatgatgagcaacagaacttcttcgcacagatcaaaggatataagcggtgcatccttttccctcctgatcagttcgaatgcctctacccataccctgtgcaccatccttgtgacaggcagtcccaggtggacttcgataaccccgattacgagcggttcccgaatttccagaatgtcgtcggctacgaaacagtggtgggacccggagacgttttatatatccccatgtattggtggcaccacattgaatcccttctgaatggaggtatcacaatcactgttaatttttggtacaaaggttag

SEQ ID NO: 335853 - DNA, 579 bp, Artificial Sequence
  derived and/or modified sequence
atggctaactttcagaactttaagccccgaagtaaccgcgaagaaatgaaatttcatgaattcgtcgaaaaactccaagatattcaacaaagagggggagaggagcgcctctacctgcagcagaccttgaatgacactgtcggaagaaaaatagtcatggacttcctgggttttaactggaactggatcaacaagcagcaaggtaagagggggtggggccaactgaccagcaatctgctcctcataggaatggagggcaacgtgacacccgctcattacgacgaacagcagaattttttcgcccagatcaagggttataagagatgtatcttattcccgccagaccagtttgaatgtttgtatccctaccctgtccatcacccctgcgaccgacagtcccaggtggacttcgacaatcccgactacgaacggttcccaaatttccagaatgtagtggggtacgaaaccgttgtgggtccaggcgacgtgctttacatccccatgtactggtggcatcacatagagtcacttttgaatggaggcatcactattactgttaatttctggtacaaagggtag

SEQ ID NO: 335854 - DNA, 579 bp, Artificial Sequence
  derived and/or modified sequence
atggccaacttccagaacttcaagcccagaagcaacagagaggagatgaagttccacgagttcgtggagaagctgcaggacatccagcagagaggcggcgaggagagactgtacctgcagcagaccctgaacgacaccgtgggcagaaagatcgtgatggacttcctgggcttcaactggaactggatcaacaagcagcagggcaagagaggctggggccagctgaccagcaacctgctgctgatcggcatggagggcaacgtgacccccgcccactacgacgagcagcagaacttcttcgcccagatcaagggctacaagagatgcatcctgttcccccccgaccagttcgagtgcctgtacccctaccccgtgcaccacccctgcgacagacagagccaggtggacttcgacaaccccgactacgagagattccccaacttccagaacgtggtgggctacgagaccgtggtgggccccggcgacgtgctgtacatccccatgtactggtggcaccacatcgagagcctgctgaacggcggcatcaccatcaccgtgaacttctggtacaagggctag

SEQ ID NO: 335855 - protein, 758 aa, Artificial Sequence
  derived and/or modified sequence
MTRRCMPARPGFPSSPAPGSSPPRCHLRPGSTAHAAAGKRTESPGDRKQSIIDFFKPASKQDRHMLDSPQKSNIKYGGSRLSITGTEQFERKLSSPKESKPKRVPPEKSPIIEAFMKGVKEHHEDHGIHESRRPCLSLASKYLAKGTNIYVPSSYHLPKEMKSLKKKHRSPERRKSLFIHENNEKNDRDRGKTNADSKKQTTVAEADIFNNSSRSLSSRSSLSRHHPEESPLGAKFQLSLASYCRERELKRLRKEQMEQRINSENSFSEASSLSLKSSIERKYKPRQEQRKQNDIIPGKNNLSNVENGHLSRKRSSSDSWEPTSAGSKQNKFPEKRKRNSVDSDLKSTRESMIPKARESFLEKRPDGPHQKEKFIKHIALKTPGDVLRLEDISKEPSDETDGSSAGLAPSNSGNSGHHSTRNSDQIQVAGTKETKMQKPHLPLSQEKSAIKKASNLQKNKTASSTTKEKETKLPLLSRVPSAGSSLVPLNAKNCALPVSKKDKERSSSKECSGHSTESTKHKEHKAKTNKADSNVSSGKISGGPLRSEYGTPTKSPPAALEVVPCIPSPAAPSDKAPSEGESSGNSNAGSSALKRKLRGDFDSDEESLGYNLDSDEEEETLKSLEEIMALNFNQTPAATGKPPALSKGLRSQSSDYTGHVHPGTYTNTLERLVKEMEDTQRFVSIKINLLNLTFCLFVWLTFNLPFLKNHEKLACILDSVVNCVRIRYVGRTQWLMPVITTLWETQARLLEPRSSRLR

SEQ ID NO: 335856 - protein, 181 aa, Artificial Sequence
  derived and/or modified sequence
SCIIKEGDVGSLVYVMEDGKVEVTKEGVKLCTMGPGKVFGELAILYNCTRTATVKTLVNVKLWAIDRQCFQTIMMRTGLIKHTEYMEFLKSVPTFQSLPEEILSKLADVLEETHYENGEYIIRQGARGDTFFIISKGTVNVTREDSPSEDPVFLRTLGKGDWFGEKALQGWTWNLFEYVVE

SEQ ID NO: 335857 - DNA, 546 bp, Artificial Sequence
  derived and/or modified sequence
agctgcataataaaggagggggacgtgggatccctggtctacgtgatggaagatggtaaggttgaagtcaccaaggagggagtcaagctgtgtacaatgggccccggtaaagtcttcggtgagctggccatcctgtacaattgcacccggactgccacagtgaagactcttgtcaatgttaagctgtgggcaattgacaggcaatgttttcagacgataatgatgagaactggcctcattaagcacacagaatatatggagttcctgaagtcagttcccacatttcagtctcttcccgaggaaatactgtcaaaactcgcggatgttctggaggagacccattacgagaacggcgaatatataatccgccagggggccaggggagacaccttcttcataatctccaaaggcaccgtgaacgtcacccgagaagacagcccatccgaggatccagtctttttacggacgctgggaaagggagactggttcggagagaaggcgctgcagggctggacttggaacctctttgagtacgtcgtagaatag

SEQ ID NO: 335858 - DNA, 546 bp, Artificial Sequence
  derived and/or modified sequence
agctgcatcatcaaggagggagatgtgggcagcctggtgtatgtgatggaggatggcaaggtggaggtgaccaaggagggcgtgaagctgtgcaccatgggccctgggaaggtgtttggagagctggccatcctgtacaactgcaccaggacagccaccgtgaagaccctggtgaatgtgaagctgtgggccatcgaccggcagtgcttccagaccatcatgatgaggacaggcctcatcaagcacacagagtacatggagttcctgaagtctgtgcccaccttccagagcctgcctgaggagatcctgagcaagctggctgatgtgctggaggagacccactatgaaaatggagagtacatcatccggcagggcgcccggggggacaccttcttcatcatcagcaagggcaccgtgaatgtgacccgggaggacagccccagtgaagatcctgtgttcctgcggaccctgggcaaaggagactggtttggagagaaggccctgcagggctggacctggaacctgtttgaatatgtggtggagtag

SEQ ID NO: 335859 - DNA, 546 bp, Artificial Sequence
  derived and/or modified sequence
agctgcatcatcaaggagggcgacgtgggcagcctggtgtacgtgatggaagacggtaaggtcgaagttacaaaggaaggggtcaaactgtgcactatgggaccaggcaaggtgtttggggagctggcgattctgtacaactgcactagaacggcgaccgtgaaaacacttgtgaacgtgaaactatgggctatcgatcggcagtgcttccaaacgattatgatgaggacagggcttatcaagcacactgagtatatggagttcctcaagtctgtgccaacatttcagagtctgcccgaagagattctttccaagctggctgatgtgttagaggagactcactatgaaaacggagaatatatcatccgtcagggagctagaggtgatacgtttttcatcatatctaagggaactgttaacgtcacaagggaagacagcccgagtgaggatcctgtctttttgcggactctggggaaaggcgattggttcggcgagaaggcactgcaggggtggacctggaatctattcgaatacgtggtggagtag

SEQ ID NO: 335860 - DNA, 546 bp, Artificial Sequence
  derived and/or modified sequence
tcttgtattatcaaggagggagacgtgggcagcttggtctacgtgatggaggacgggaaggttgaggtgaccaaagaaggagtgaaactatgtaccatgggccctggtaaagtattcggtgagctggcaattctgtataactgcacacgaacagccactgtgaagaccctggtcaacgttaagctgtgggctattgaccgccagtgtttccagactatcatgatgcggacaggtctgattaagcacacagaatatatggaattcctgaagtccgtacccacatttcagagtctgcctgaagagattttatcaaagctcgcagacgttttagaggaaacacactatgagaatggagagtatattattaggcagggagcccgaggggacacgttttttattatttcgaaaggcacggtgaacgtcaccagagaagactccccgtcagaagatcctgtgtttttgaggacgcttgggaaaggcgactggttcggggagaaagctcttcagggctggacctggaacctgttcgaatatgtggtcgagtag

SEQ ID NO: 335861 - DNA, 584 bp, Artificial Sequence
  derived and/or modified sequence
agttgcatcatcaaagaaggagacgtggggtcactggtgtatgtcatggaagatggtaaggttgaagttacaaaagaaggtgtgaagttgtgtaccatgggtccaggaaaagtgtttggggaattggctattctttacaactgtacccggacagcgaccgtcaagactcttgtaaatgtaaaactctgggccattgatcgacaatgttttcaaacaataatgatgaggacaggactcatcaagcataccgagtatatggaatttttaaaaagcgttccaacattccagagccttcctgaagagatcctcagcaagcttgctgatgtccttgaagagacccactatgaaaatggagaatatattatcaggcaaggtgcaagaggggacaccttctttatcatcagcaaaggaacggtaaatgtcactcgtgaagactcaccgagtgaagacccagtctttcttagaactttaggaaaaggagactggtttggagagaaagccttgcagggctggacttggaatctgtttgaatacgttgtggaataaattccttaatttctaataaatcagtgttatattaattg

SEQ ID NO: 335862 - DNA, 546 bp, Artificial Sequence
  derived and/or modified sequence
agctgcatcatcaaggagggcgacgtgggcagcctggtgtacgtgatggaggacggcaaggtggaggtgaccaaggagggcgtgaagctgtgcaccatgggccccggcaaggtgttcggcgagctggccatcctgtacaactgcaccagaaccgccaccgtgaagaccctggtgaacgtgaagctgtgggccatcgacagacagtgcttccagaccatcatgatgagaaccggcctgatcaagcacaccgagtacatggagttcctgaagagcgtgcccaccttccagagcctgcccgaggagatcctgagcaagctggccgacgtgctggaggagacccactacgagaacggcgagtacatcatcagacagggcgccagaggcgacaccttcttcatcatcagcaagggcaccgtgaacgtgaccagagaggacagccccagcgaggaccccgtgttcctgagaaccctgggcaagggcgactggttcggcgagaaggccctgcagggctggacctggaacctgttcgagtacgtggtggagtag

SEQ ID NO: 335863 - protein, 427 aa, Artificial Sequence
  derived and/or modified sequence
MSRSKRDNNFYSVEIGDSTFTVLKRYQNLKPIGSGAQGIVCAAYDAILERNVAIKKLSRPFQNQTHAKRAYRELVLMKCVNHKNIIGLLNVFTPQKSLEEFQDVYIVMELMDANLCQVIQMELDHERMSYLLYQMLCGIKHLHSAGIIHRDLKPSNIVVKSDCTLKILDFGLARTAGTSFMMTPYVVTRYYRAPEVILGMGYKENVDIWSVGCIMGEMIKGGVLFPGTDHIDQWNKVIEQLGTPCPEFMKKLQPTVRTYVENRPKYAGYSFEKLFPDVLFPADSEHNKLKASQARDLLSKMLVIDASKRISVDEALQHPYINVWYDPSEAEAPPPKIPDKQLDEREHTIEEWKELIYKEVMDLEERTKNGVIRGQPSPLGAAVINGSQHPSSSSSVNDVSSMSTDPTLASDTDSSLEAAAGPLGCCR

SEQ ID NO: 335864 - DNA, 1284 bp, Artificial Sequence
  derived and/or modified sequence
atgagcagaagcaagagagacaacaacttctacagcgtggagatcggcgacagcaccttcaccgtgctgaagagataccagaacctgaagcccatcggcagcggcgcccagggcatcgtgtgcgccgcctacgacgccatcctggagagaaacgtggccatcaagaagctgagcagacccttccagaaccagacccacgccaagagagcctacagagagctggtgctgatgaagtgcgtgaaccacaagaacatcatcggcctgctgaacgtgttcaccccccagaagagcctggaggagttccaggacgtgtacatcgtgatggagctgatggacgccaacctgtgccaggtgatccagatggagctggaccacgagagaatgagctacctgctgtaccagatgctgtgcggcatcaagcacctgcacagcgccggcatcatccacagagacctgaagcccagcaacatcgtggtgaagagcgactgcaccctgaagatcctggacttcggcctggccagaaccgccggcaccagcttcatgatgaccccctacgtggtgaccagatactacagagcccccgaggtgatcctgggcatgggctacaaggagaacgtggacatctggagcgtgggctgcatcatgggcgagatgatcaagggcggcgtgctgttccccggcaccgaccacatcgaccagtggaacaaggtgatcgagcagctgggcaccccctgccccgagttcatgaagaagctgcagcccaccgtgagaacctacgtggagaacagacccaagtacgccggctacagcttcgagaagctgttccccgacgtgctgttccccgccgacagcgagcacaacaagctgaaggccagccaggccagagacctgctgagcaagatgctggtgatcgacgccagcaagagaatcagcgtggacgaggccctgcagcacccctacatcaacgtgtggtacgaccccagcgaggccgaggcccccccccccaagatccccgacaagcagctggacgagagagagcacaccatcgaggagtggaaggagctgatctacaaggaggtgatggacctggaggagagaaccaagaacggcgtgatcagaggccagcccagccccctgggcgccgccgtgatcaacggcagccagcaccccagcagcagcagcagcgtgaacgacgtgagcagcatgagcaccgaccccaccctggccagcgacaccgacagcagcctggaggccgccgccggccccctgggctgctgcagatag

SEQ ID NO: 335865 - DNA, 1284 bp, Artificial Sequence
  derived and/or modified sequence
atgtcccggtctaagcgggataacaacttctactccgtcgagatcggagatagcactttcaccgtgcttaaacggtaccagaacctgaaacccataggctctggtgcccaaggcatagtgtgcgccgcctacgatgccatcctggagaggaacgttgccattaaaaaattatctcgccccttccagaaccaaacccacgccaagcgagcctatcgggaactggtgttaatgaaatgcgtgaaccacaaaaacattatcggcctgctcaatgtgttcacaccacagaaatcactggaagaatttcaggacgtgtacattgtgatggagcttatggacgcaaatctctgtcaggtaattcagatggagctcgatcacgagcgtatgtcgtatctgctgtaccagatgttatgtggaataaagcacctccatagcgctgggataatccatcgtgatctgaaaccttcaaacatagtggttaagtctgattgtacattgaaaattcttgattttggtctggcccggaccgctggcacaagcttcatgatgactccttacgttgtgaccaggtactatagagcccctgaagtcatcctcggcatgggctacaaggagaatgtagacatttggtccgtggggtgcattatgggggaaatgatcaagggcggggttcttttccctggtactgatcacattgatcagtggaataaggtcatcgaacaactgggtactccttgccccgaattcatgaaaaagcttcagcctacagtgagaacttatgtggagaaccggccaaaatatgcggggtactctttcgagaagttgttccctgatgtcttgttcccagccgattccgagcacaacaaactcaaagcgtcgcaagcgcgggatctcctttcaaagatgctcgtaatcgacgcgagcaaacgcattagcgtggacgaggctcttcagcacccctacatcaacgtgtggtacgacccgtctgaagccgaggcccctcctccaaagattccagataagcagctcgacgagagggagcacacgattgaagaatggaaggaactgatatacaaggaggtcatggacctggaggagcggacaaaaaacggagtgattagggggcaaccctctccactgggggccgcagtgatcaatggaagccaacacccttcctcatcttctagcgtcaacgacgtttccagtatgtctactgacccaactctggcctctgatactgacagttcattggaggcagcagccgggcccctgggctgttgtaggtag

SEQ ID NO: 335866 - DNA, 1284 bp, Artificial Sequence
  derived and/or modified sequence
atgagccgcagcaagagggacaacaacttctacagcgtggagattggagacagcaccttcaccgtgctgaagcgctaccagaacctgaagcccatcggcagcggggcccagggcatcgtgtgtgccgcctatgatgccatcctggagagaaatgtggccatcaagaagctgagccggcccttccagaaccagacccacgccaagagggcctaccgggagctggtgctgatgaagtgtgtgaaccacaagaacatcatcggcctgctgaatgtgttcaccccccagaagagcctggaggagttccaggatgtgtacatcgtgatggagctgatggatgccaacctgtgccaggtgatccagatggagctggaccacgagaggatgagctacctgctgtaccagatgctgtgtggcatcaagcacctgcacagcgctggcatcatccaccgggacctgaagcccagcaacatcgtggtgaagagtgactgcaccctgaagatcctggactttggcctggccaggacagctggcaccagcttcatgatgaccccctacgtggtgacccgctactaccgggcccctgaggtgatcctgggcatgggctacaaggaaaatgtggacatctggagcgtgggctgcatcatgggagagatgatcaagggcggcgtgctcttccctggaacagaccacatcgaccagtggaacaaggtgattgagcagctgggcaccccctgcccagagttcatgaagaagctgcagcccaccgtgaggacctacgtggagaaccggcccaagtatgccggctacagctttgagaagctgttcccagatgtgctcttccctgctgacagcgagcacaacaagctgaaggccagccaggcccgggacctgctgagcaagatgctggtgattgatgccagcaagaggatctctgtggatgaggccctgcagcacccctacatcaacgtgtggtatgaccccagcgaggccgaggcccccccacccaagatcccagacaagcagctggatgagcgggagcacaccatcgaggagtggaaggagctgatctacaaggaggtgatggacctggaggagaggaccaagaatggagtcatccggggccagcccagccccctgggcgccgccgtcatcaatggcagccagcaccccagcagcagcagctctgtgaatgatgtgtcctccatgagcacagaccccaccctggccagtgacacagacagcagcctggaggccgccgccggccccctgggctgctgcaggtag

SEQ ID NO: 335867 - DNA, 1284 bp, Artificial Sequence
  derived and/or modified sequence
atgagccggagcaagcgggacaacaacttctacagcgtggagatcggagatagcacattcacggtactgaagcggtatcagaacctgaagccaatcggcagcggcgcccaggggattgtgtgcgctgcttatgacgccatcctggagagaaacgtcgctatcaagaagttgtcacgaccattccaaaatcagactcacgcaaaacgggcctaccgagaactggtgttgatgaaatgcgttaaccacaaaaacataattggccttctgaacgtgtttaccccgcaaaaaagtttagaagaattccaggatgtgtatattgtgatggagttgatggacgcgaacctgtgccaagtgatccagatggagcttgatcatgaaagaatgagctatctgctttaccagatgctgtgcggaataaaacatctgcacagtgcaggaattatccatcgcgacctgaaacccagtaatatcgtagtcaaatctgactgcaccctgaaaatcttggactttgggctggcacggactgctggaacaagtttcatgatgacgccttacgtggtgactcgttactaccgtgcccccgaggtcatcttaggaatgggctataaggagaacgtggatatctggtcagttggatgcatcatgggtgagatgataaagggtggggtgctgtttcctggaactgatcatatagaccagtggaacaaggtaatcgaacagttgggaacgccgtgtccggaatttatgaaaaaactacaaccaacggttcgcacttatgtcgaaaatagacccaagtacgctggatacagtttcgaaaagctgttcccagatgttctatttcccgcagacagtgaacacaataaactgaaggcatcccaggcacgcgatctgctctctaaaatgctggtgattgatgctagtaagcgtatttctgtggacgaagcgctgcaacacccctatatcaatgtgtggtacgaccccagcgaggctgaggctcctcctcctaaaatcccagataagcagctcgatgaaagagagcacactattgaggagtggaaagagttgatctacaaggaagtgatggatctcgaagaacgtaccaagaatggcgttatcaggggccagccttctccactcggggcagccgttattaacggctcccagcacccatcaagcagctcctccgtcaatgacgtgagcagtatgtctaccgatcccaccctggcaagcgatactgactcatctcttgaggccgccgctggtcccctgggatgttgtcggtag

SEQ ID NO: 335868 - DNA, 5628 bp, Artificial Sequence
  derived and/or modified sequence
attgcttgccatcatgagcagaagcaagcgtgacaacaatttttatagtgtagagattggagattctacattcacagtcctgaaacgatatcagaatttaaaacctataggctcaggagctcaaggaatagtatgcgcagcttatgatgccattcttgaaagaaatgttgcaatcaagaagctaagccgaccatttcagaatcagactcatgccaagcgggcctacagagagctagttcttatgaaatgtgttaatcacaaaaatataattggccttttgaatgttttcacaccacagaaatccctagaagaatttcaagatgtttacatagtcatggagctcatggatgcaaatctttgccaagtgattcagatggagctagatcatgaaagaatgtcctaccttctctatcagatgctgtgtggaatcaagcaccttcattctgctggaattattcatcgggacttaaagcccagtaatatagtagtaaaatctgattgcactttgaagattcttgacttcggtctggccaggactgcaggaacgagttttatgatgacgccttatgtagtgactcgctactacagagcacccgaggtcatccttggcatgggctacaaggaaaacgttgacatttggtcagttgggtgcatcatgggagaaatgatcaaaggtggtgttttgttcccaggtacagatcatattgatcagtggaataaagttattgaacagcttggaacaccatgtcctgaattcatgaagaaactgcaaccaacagtaaggacttacgttgaaaacagacctaaatatgctggatatagctttgagaaactcttccctgatgtccttttcccagctgactcagaacacaacaaacttaaagccagtcaggcaagggatttgttatccaaaatgctggtaatagatgcatctaaaaggatctctgtagatgaagctctccaacacccgtacatcaatgtctggtatgatccttctgaagcagaagctccaccaccaaagatccctgacaagcagttagatgaaagggaacacacaatagaagagtggaaagaattgatatataaggaagttatggacttggaggagagaaccaagaatggagttatacgggggcagccctctcctttaggtgcagcagtgatcaatggctctcagcatccatcatcatcgtcgtctgtcaatgatgtgtcttcaatgtcaacagatccgactttggcctctgatacagacagcagtctagaagcagcagctgggcctctgggctgctgtagatgactacttgggccatcggggggtgggagggatggggagtcggttagtcattgatagaactactttgaaaacaattcagtggtcttatttttgggtgatttttcaaaaaatgtagaattcattttgtagtaaagtagtttattttttttaatttcaagtgatgtaatttaaaacctaagttgtgtttcaaaacagcaacaaaactgtattgtattttttttgctgtaattaactgtataatgtaaacctaattattttatcatggtttaaattttttgcatatttgctttatcttatgctgctgatttttttaactgaatttgtaagattttgtttatcaaagcaactattatgtggtgacttgcctatatcatgaattatttaagatttttatagttttttttaattagaatttatttcagatgttttgttcatgatactatccttcagggttatgtgcttatcaatgaaataaccccagaggagtgagggaaaataacttgtagccagttatattcaggaataactactgtaaatgatgaacgtgttaggagacctccaatatttgctacttgccaatcctaatttagttacaagaattggtaggcaatcctacttaattttggcaaaagccccgtcatctaaatggcagaataactcagagcatgtctttgaagatgctgggcgtctaccaccaccttatgtccccaccctacccaacaaaaataagtaaaaagaatatggtgtattctacaaatttgtggcatgctcaaagtttatgatcacataaaggcaagaggatacttcatgaataatacatttcaatgcaaataaacagatggttcacttctactagctatgagcctgtttttgtatacactgagttaatctactcaggctgtaggtcccagcaatgttctagagtctggtctttccctttcctgcagcttcgggtccttggacctttcctgtttcctattacttggagtgtctgtcagttgagcaccagttgttctggtgtttcatttgattctacttgtagcataatcatttatacgagctattgggaggttccaaaccctacctagatttgtgtaggtgatgtatcaaatgagcaatataccgttcatctgaaaatagtagcacacagccatatataggatatcattttctaaggactgtttcttcacattgagcagagcaggcataaatggtggttatttagtctaagtcttttatttttttatacctgattttcaacataacacgcaatgtggatgtcgagtagtgttaagaatggtgctgctcctgacaagtgtatgttaactgtttacattttctatctgtagaattatttctctattactgaacttttcctaagtaaaatgtctttgaagtctcgttatttctgaaatacgttgtctgtaatagacccaggcaccttttaaattatctctggaacaagagggatttcatgtaatgaactaggaaatgcatactcacataagcaacaaggttctaggcagaaagccccttggaatttgtgaccaacaggagcaagaacaggtgcggctcaacatgcaatgtctgaaaatttgcttggcattttattcatatatttagtgcaaaattatttttgagtgagatattttacatcactgttaatgtgcaatatttaagattaaaatacattagcttttttatatactttgaagtagcaagtttgttttcgatggcttagagtcatgatttccagcttcccagcctttttatcagtcccttttctaatacaacaaggtgcattaatttgattaggcaaattagagttctaagacacttcttgaattgtagacagaaaatattggattcacaatttcagcagaaatttgagaatgagtgtgtttatattaatttcacaattagctgtattttctgtagcatagattatgtcactgttgcactttcacagcagacatgctttcagaaggttctcatattttatgtttgattgctgataagccatctctattgatacagattttggttaagtaaggaaaaccaggtgtgtgtctgtatcatttattgtaaatgccagctgccacttgccaaccatcatgttcagttcaattcaaagaaaacaaactctcattacttagtgtaaactaaaatacttaacaaattatatcctaaaaacaaggtctctttgttaaatgttgcatgccctaggttttaaattactacatccaaatacagttttcgtcttaaatttgttaagctaaatatatgttggttctttttattttggaatcctttaagcatcttaaacattttttttttgaagagaagttacaaataacatttctatcaggtagtacttgtatgaaaccacctttcttattctataattttgatttttcaattttatatacttaatatactcactgtcttactatcagaaagttattttgaccaagatttttattatcttcatagattcagaaagagatgctaattctgtaccaatgtcttcctggttactattctcttccctctaatatatactggccatttgtaaaaccattgtgttgttgggatcacttagttatactatacgcagatagagcatctcaactctgtcatagtgtttgctgaacagttttcagtgtcatgcacctttggctgctaattgttcctgacgtgcactcttccgagttggtaaaggcacagtgtgttcatgccagacttctaagagaaacaccagcctcttaaatcagaagcctacacacaacccccttaacaatccaaagaagcttgatggtgtgcaaagaagcatcctgccagccttgtcattgttctgttctatgctaatcctgctgtgttgtctaaaagatggagggaagaggacatcagtgtctgatagtgaaatcatcagcaggaaagtgaagctctttccttggttacagataagacttggtttacactattggccagtatctgctaaacatatgaagacttaactattcagtgttgcctaggcattcgcctgcacaacattttgaggttagaacatagaatattttcagaaatactgttgtagtttgtgagtgttgttcattagttacacattagctatagagtggatgcatgaagccccatgacaccagtaaacttctcttaccagtaggtaaaccaaacaccattctgtcattagcagccctcttaaatgttgcctctccgtatcctgttgcatttttgtgtgcattgtgtttctactgatctctcttaggtttttacggaatcaaaggaaactaatttttccttaatagcaagaaagatgaagaggtaaagggcattgaagcagaaatgtatagtttggggtacgattagaaaactcgtaaggaaaacagaagtcctaatttcaaactgactgctcttcgttaagtgctcttaaggagagtctagtaacagtaacactttctggccatttctagtttagattctcttcgttactgaaacttttgagaaatattacctgtggattaattttgcacaatgttctattctcataatgacttacaaattaaactaggtttttattgaactacctcacactaattttctatgctttcccaagtaagctgttgccctgttagatctttactgagtgaattataaatgtgtgttaaatactttctagccaatgttgacacaataccagtaagtatgtaaagtatataccttacatcagtaagagacacgtgtaaaatctttgactgtatgtcttgcaaaattgtgctcgttgacattattactgtttttgtaagtagaaacctgctcgtgatatcggtccatttacattttacaaaaggagtaaatcttagtaaaaattttacgaagaaataaattacttttgtaggcccaatatttggtatatttttgagaagctgttaatcttttagctgaataatgaagttagactgaattacgtgtctccctggactgtgacatctattttctcattacagtttatcctggtcagcagggtgtcacacctggaaacctgagtatgatagctgacatttgcttttctccctctgcgatgtcattcctcctccattcctctccttccctgtgttccgttccctctcctttcctctagacaaaacaaaatggggcactttttagggaatgctgagatcattattgtggtttttcatcattcatgccctagtcattaaacatgcaccactggaatgtaaacaatgttatctagtatgtcaattggttataatattttaaataaaaaagaaaaaagtggtatgaaaattatgaaa

SEQ ID NO: 335869 - DNA, 1284 bp, Artificial Sequence
  derived and/or modified sequence
atgtcccgaagcaagagggataacaatttttactccgtggagatcggtgattccacttttacagtgctaaaaagatatcagaatctcaaaccgatcgggagtggtgcccaggggattgtctgcgccgcatatgacgccatcctcgaaagaaatgtcgccattaaaaaactcagcagaccttttcagaaccagacacacgcaaagagggcttacagagagttggttttgatgaaatgcgtgaatcacaagaacatcatcgggctccttaatgtgtttactccccaaaagagccttgaagagtttcaggatgtgtatattgtgatggagctgatggatgctaacctttgtcaggtgattcagatggaactggaccacgagaggatgtcctatctattgtaccagatgctctgcggaattaaacatcttcatagcgccggaatcatacatagagatctgaaaccctcaaatatcgttgtcaaatccgactgcacactcaagatcctagatttcggtcttgccagaacagccggaacatcattcatgatgactccctatgttgtgacccgctactatcgggctcccgaagtgattctgggaatgggctataaggagaatgtggacatctggagcgtcgggtgtatcatgggagagatgatcaaagggggagtcctgttccctggcactgatcatatagatcaatggaataaggtcatcgagcaacttggtaccccatgtcctgagttcatgaaaaagctccagcccaccgtgcgaacctacgtggaaaaccggccaaagtacgccggttattcattcgaaaaactgtttcctgacgtgctgttccccgctgattccgaacacaacaagctgaaagctagtcaagcaagggacctcctgagcaagatgctagttattgacgcatcaaaaaggattagcgtggatgaggcgctacagcatccctacataaatgtttggtacgatccctcagaagccgaggcccctcctcctaaaattcccgataagcaactcgatgagagagagcatacaattgaggagtggaaagagcttatctacaaggaggtgatggatttggaggaaaggactaagaacggtgtgattagggggcagccctctcctctgggtgccgcagttattaacggcagccagcacccgtctagctcctcttcagtgaacgacgtgtcaagtatgtcaaccgatcccacactggcctcagacacagattccagtctcgaggccgcagctggccctctaggctgctgcaggtag

SEQ ID NO: 335870 - protein, 427 aa, Artificial Sequence
  derived and/or modified sequence
MSRSKRDNNFYSVEIGDSTFTVLKRYQNLKPIGSGAQGIVCAAYDAILERNVAIKKLSRPFQNQTHAKRAYRELVLMKCVNHKNIIGLLNVFTPQKSLEEFQDVYIVMELMDANLCQVIQMELDHERMSYLLYQMLCGIKHLHSAGIIHRDLKPSNIVVKSDCTLKILDFGLARTAGTSFMMTPYVVTRYYRAPEVILGMGYKENVDLWSVGCIMGEMVCHKILFPGRDYIDQWNKVIEQLGTPCPEFMKKLQPTVRTYVENRPKYAGYSFEKLFPDVLFPADSEHNKLKASQARDLLSKMLVIDASKRISVDEALQHPYINVWYDPSEAEAPPPKIPDKQLDEREHTIEEWKELIYKEVMDLEERTKNGVIRGQPSPLGAAVINGSQHPSSSSSVNDVSSMSTDPTLASDTDSSLEAAAGPLGCCR

SEQ ID NO: 335871 - DNA, 1284 bp, Artificial Sequence
  derived and/or modified sequence
atgagcagaagcaagagagacaacaacttctacagcgtggagatcggcgacagcaccttcaccgtgctgaagagataccagaacctgaagcccatcggcagcggcgcccagggcatcgtgtgcgccgcctacgacgccatcctggagagaaacgtggccatcaagaagctgagcagacccttccagaaccagacccacgccaagagagcctacagagagctggtgctgatgaagtgcgtgaaccacaagaacatcatcggcctgctgaacgtgttcaccccccagaagagcctggaggagttccaggacgtgtacatcgtgatggagctgatggacgccaacctgtgccaggtgatccagatggagctggaccacgagagaatgagctacctgctgtaccagatgctgtgcggcatcaagcacctgcacagcgccggcatcatccacagagacctgaagcccagcaacatcgtggtgaagagcgactgcaccctgaagatcctggacttcggcctggccagaaccgccggcaccagcttcatgatgaccccctacgtggtgaccagatactacagagcccccgaggtgatcctgggcatgggctacaaggagaacgtggacctgtggagcgtgggctgcatcatgggcgagatggtgtgccacaagatcctgttccccggcagagactacatcgaccagtggaacaaggtgatcgagcagctgggcaccccctgccccgagttcatgaagaagctgcagcccaccgtgagaacctacgtggagaacagacccaagtacgccggctacagcttcgagaagctgttccccgacgtgctgttccccgccgacagcgagcacaacaagctgaaggccagccaggccagagacctgctgagcaagatgctggtgatcgacgccagcaagagaatcagcgtggacgaggccctgcagcacccctacatcaacgtgtggtacgaccccagcgaggccgaggcccccccccccaagatccccgacaagcagctggacgagagagagcacaccatcgaggagtggaaggagctgatctacaaggaggtgatggacctggaggagagaaccaagaacggcgtgatcagaggccagcccagccccctgggcgccgccgtgatcaacggcagccagcaccccagcagcagcagcagcgtgaacgacgtgagcagcatgagcaccgaccccaccctggccagcgacaccgacagcagcctggaggccgccgccggccccctgggctgctgcagatag

SEQ ID NO: 335872 - DNA, 1284 bp, Artificial Sequence
  derived and/or modified sequence
atgtcccgttccaaacgcgacaataacttctattccgtagaaatcggagacagcacctttaccgtactgaagcgctatcaaaacctgaagcctatcggatccggcgcccagggcatcgtgtgcgcagcatacgatgccattctcgaacgcaatgtggcaataaaaaagctgtctagacctttccagaaccagactcatgcaaagcgtgcctaccgagagctcgtattaatgaaatgcgtgaaccacaagaacattattgggctgctgaacgtgtttacaccacagaagtctctggaagaattccaggacgtttatatcgttatggagttaatggacgccaacctgtgccaggtgatccagatggaactggatcatgagcgcatgagctacttactctatcaaatgctttgcggtattaagcaccttcactctgcaggtatcatacaccgggatttaaagccctcaaacattgtggtaaagtcagactgtaccctaaaaatcctcgacttcggattagcccgaacagccgggacttcatttatgatgaccccatacgtcgtgaccagatactacagagctccagaggtgatcctcggaatgggatacaaggaaaatgtagacctctggtctgttggatgtataatgggtgagatggtttgccataagatcctgttcccaggacgagactacatagatcagtggaacaaagtgatcgagcaactcggcacaccatgccccgaatttatgaagaagctacaacccactgttagaacatacgttgagaatcggcctaaatatgccgggtattcatttgagaaattgtttccggatgtcctattccccgctgattcagagcacaacaaactgaaagcctctcaggctcgggatctcctgtcgaagatgctggtcattgacgccagcaaaagaatctcggtggacgaggcactccaacatccctatatcaacgtctggtatgacccctccgaagcggaggcaccaccacctaagattccagataaacagctggatgagagggaacatacaatagaagagtggaaagagttgatttataaagaggtgatggaccttgaggaacggactaagaatggcgtgatccgcggccaaccctcaccactgggcgcagcagtaatcaacggttcccagcacccttcaagcagttctagcgtcaacgatgtatccagtatgagtacagaccccaccctggcttccgacacggatagcagtttggaggcggccgccggacctctcggctgttgtcggtag

SEQ ID NO: 335873 - DNA, 1284 bp, Artificial Sequence
  derived and/or modified sequence
atgtcccgaagcaagcgcgataataatttttatagcgtagagattggcgacagcactttcactgtgctgaaaaggtatcagaatctgaagcccattggaagcggagctcagggaattgtttgtgctgcctacgacgcaattctggaacgcaacgtggccattaaaaaattaagtcgaccattccagaaccagacccacgccaaaagagcctatcgggaactagtgttgatgaagtgcgtcaaccataaaaatatcatcggactgctcaacgtgttcaccccccagaagagtcttgaggagtttcaggatgtttatatcgtcatggagcttatggacgccaatctgtgtcaggtgattcaaatggagcttgaccacgaaagaatgagctacctcttatatcagatgctgtgtggaattaagcatctgcatagcgcggggattattcaccgcgacctgaaaccaagtaacattgtggtgaagtccgactgcaccctaaagattctggactttggccttgcacgcactgcgggcacctcctttatgatgacgccttacgtggtgactcggtactaccgagcgcccgaggttattctgggaatgggctataaggaaaacgtggatctctggtccgtggggtgtatcatgggcgaaatggtctgtcacaagatcttatttcctggcagagactacatcgatcagtggaataaggtgattgagcagctgggtaccccatgccctgagttcatgaaaaaattacaaccaacagtgaggacctatgttgaaaaccggcccaagtatgcaggctactcatttgaaaaattgttccccgatgttctgtttcccgcagattcagaacacaataaactgaaggcctcccaggccagagacttactgtccaagatgctcgtcattgacgcatctaagcgcatttctgtcgacgaggccctgcagcacccctatattaatgtttggtacgacccgtccgaagccgaggcgccccccccgaagattccagataaacagctggacgagcgggaacataccattgaggaatggaaggagttaatctataaggaggttatggacctcgaagagagaaccaaaaacggcgtgatccgcgggcagcccagtcctctcggggccgccgtgatcaacgggtcccaacacccttcatcttcaagtagcgtgaacgacgttagttctatgtcaaccgaccctacattggctagtgatactgacagtagtctcgaggcagccgcgggacccctgggatgttgtcgctag

SEQ ID NO: 335874 - DNA, 1284 bp, Artificial Sequence
  derived and/or modified sequence
atgagccgcagcaagagggacaacaacttctacagcgtggagattggagacagcaccttcaccgtgctgaagcgctaccagaacctgaagcccatcggcagcggggcccagggcatcgtgtgtgccgcctatgatgccatcctggagagaaatgtggccatcaagaagctgagccggcccttccagaaccagacccacgccaagagggcctaccgggagctggtgctgatgaagtgtgtgaaccacaagaacatcatcggcctgctgaatgtgttcaccccccagaagagcctggaggagttccaggatgtgtacatcgtgatggagctgatggatgccaacctgtgccaggtgatccagatggagctggaccacgagaggatgagctacctgctgtaccagatgctgtgtggcatcaagcacctgcacagcgctggcatcatccaccgggacctgaagcccagcaacatcgtggtgaagagtgactgcaccctgaagatcctggactttggcctggccaggacagctggcaccagcttcatgatgaccccctacgtggtgacccgctactaccgggcccctgaggtgatcctgggcatgggctacaaggaaaatgtggacctgtggagcgtgggctgcatcatgggagagatggtgtgccacaagatcctcttccctggccgggactacatcgaccagtggaacaaggtgattgagcagctgggcaccccctgcccagagttcatgaagaagctgcagcccaccgtgaggacctacgtggagaaccggcccaagtatgccggctacagctttgagaagctgttcccagatgtgctcttccctgctgacagcgagcacaacaagctgaaggccagccaggcccgggacctgctgagcaagatgctggtgattgatgccagcaagaggatctctgtggatgaggccctgcagcacccctacatcaacgtgtggtatgaccccagcgaggccgaggcccccccacccaagatcccagacaagcagctggatgagcgggagcacaccatcgaggagtggaaggagctgatctacaaggaggtgatggacctggaggagaggaccaagaatggagtcatccggggccagcccagccccctgggcgccgccgtcatcaatggcagccagcaccccagcagcagcagctctgtgaatgatgtgtcctccatgagcacagaccccaccctggccagtgacacagacagcagcctggaggccgccgccggccccctgggctgctgcaggtag

SEQ ID NO: 335875 - DNA, 1284 bp, Artificial Sequence
  derived and/or modified sequence
atgagccggagcaagcgggacaacaacttctacagcgtggagatcggtgactcaacctttaccgttctcaaacgctatcaaaacctgaagcccatcggttccggcgcccaaggcattgtttgtgctgcatacgacgccatcctggaacgcaacgtggccatcaaaaaactgtctcgacccttccaaaatcagacccatgccaaaagggcatacagagaacttgttttaatgaagtgcgtgaatcacaaaaacattatcggcttgctcaatgtgttcacccctcagaagtccctggaagagtttcaggacgtgtacattgttatggagctcatggatgctaatctgtgtcaggtaattcaaatggaactcgatcacgagcgaatgtcgtatctcctgtaccagatgctttgcgggatcaaacatctccacagcgcgggaatcatccacagagacctgaagcctagcaatattgtcgtaaaatctgattgcacccttaagatacttgattttgggctggctcgcacagcaggaacttccttcatgatgactccttatgttgtaacccggtactatagagcaccagaagtcattcttgggatggggtataaagagaacgttgatctctggtcagtcgggtgcattatgggagagatggtgtgtcacaaaatcctgttccccggcagagattacatagaccaatggaacaaagtgatcgagcagctcgggacgccgtgtcccgaatttatgaagaagcttcagccgactgtccggacatatgtggagaaccgacccaagtatgccggctactcatttgaaaaactgtttcccgatgtgctcttccctgcagacagcgaacataataagttgaaggcgtctcaggccagagacctattatcaaagatgctggtgatcgacgctagtaagcggatatccgttgatgaagccctacagcatccatacattaacgtgtggtatgacccttctgaagcagaagctcccccacccaagatccccgataagcagctggacgaaagggaacacactattgaggagtggaaagagctgatctataaagaagttatggatctggaggaaaggactaaaaacggcgtgattcgcggacagccgtcacccttgggggctgccgtcatcaatggaagtcagcatccttcgagctcctcgtcagtcaacgacgtgtctagcatgtctaccgaccccaccttagcttcagataccgattcctcgctggaggcagcggccggccctttaggatgctgtcgatag

SEQ ID NO: 335876 - DNA, 1284 bp, Artificial Sequence
  derived and/or modified sequence
atgagccggagcaagcgggacaacaacttctacagcgtggagatcggagattccacattcaccgtgctgaaacggtatcagaacctgaagcccatcggatcgggcgctcagggtatagtctgtgctgcttacgatgctattctagaacgaaatgttgcaataaaaaagctgtcccggccatttcaaaatcagacacacgcaaagcgcgcataccgcgagctggtgttgatgaaatgtgtaaaccacaagaatataattgggttactgaatgtgtttacaccccagaagtccctggaggagttccaagacgtttatatagtcatggaactcatggacgccaatttatgccaggtgatccagatggagttagatcacgaacggatgtcgtatctgctttaccagatgctgtgcgggatcaagcacctgcactcggccggcatcatccacagagatctcaaaccgtccaacattgtggtgaaaagtgattgtacgctcaaaattctcgacttcggtctcgcaaggactgccggcacttcttttatgatgactccctacgtggtgacgcgttattatagagctcctgaggtgattcttggaatgggatacaaagagaatgtcgacctgtggtccgtggggtgtattatgggcgaaatggtgtgccacaagattctatttccaggacgggactacatcgatcagtggaataaggtcattgaacaacttggtaccccctgccccgagttcatgaaaaaacttcagcctacggtgaggacatatgtggaaaatagacccaaatacgcggggtatagctttgagaaactctttccggacgtactgtttcccgctgacagtgagcacaataagctaaaagctagccaggcccgcgaccttctatccaagatgctcgtgatcgatgcctccaagcgcatctcagtcgatgaagcactacaacacccctatatcaacgtgtggtacgatccatctgaggccgaggcccctccccctaaaatccctgataaacagcttgacgaaagggaacacactatcgaagagtggaaagaactcatttataaggaggttatggacctagaggagcgaacgaagaacggagtgatacggggacagccttctccactgggggctgctgtcatcaacggatcccagcaccctagtagcagctcctctgtgaacgacgtatcctccatgtctaccgaccctaccctcgcctccgataccgacagctcccttgaagcagcggccggcccattgggatgctgcagatag

SEQ ID NO: 335877 - DNA, 1402 bp, Artificial Sequence
  derived and/or modified sequence
attaattgcttgccatcatgagcagaagcaagcgtgacaacaatttttatagtgtagagattggagattctacattcacagtcctgaaacgatatcagaatttaaaacctataggctcaggagctcaaggaatagtatgcgcagcttatgatgccattcttgaaagaaatgttgcaatcaagaagctaagccgaccatttcagaatcagactcatgccaagcgggcctacagagagctagttcttatgaaatgtgttaatcacaaaaatataattggccttttgaatgttttcacaccacagaaatccctagaagaatttcaagatgtttacatagtcatggagctcatggatgcaaatctttgccaagtgattcagatggagctagatcatgaaagaatgtcctaccttctctatcagatgctgtgtggaatcaagcaccttcattctgctggaattattcatcgggacttaaagcccagtaatatagtagtaaaatctgattgcactttgaagattcttgacttcggtctggccaggactgcaggaacgagttttatgatgacgccttatgtagtgactcgctactacagagcacccgaggtcatccttggcatgggctacaaggaaaacgtggatttatggtctgtggggtgcattatgggagaaatggtttgccacaaaatcctctttccaggaagggactatattgatcagtggaataaagttattgaacagcttggaacaccatgtcctgaattcatgaagaaactgcaaccaacagtaaggacttacgttgaaaacagacctaaatatgctggatatagctttgagaaactcttccctgatgtccttttcccagctgactcagaacacaacaaacttaaagccagtcaggcaagggatttgttatccaaaatgctggtaatagatgcatctaaaaggatctctgtagatgaagctctccaacacccgtacatcaatgtctggtatgatccttctgaagcagaagctccaccaccaaagatccctgacaagcagttagatgaaagggaacacacaatagaagagtggaaagaattgatatataaggaagttatggacttggaggagagaaccaagaatggagttatacgggggcagccctctcctttaggtgcagcagtgatcaatggctctcagcatccatcatcatcgtcgtctgtcaatgatgtgtcttcaatgtcaacagatccgactttggcctctgatacagacagcagtctagaagcagcagctgggcctctgggctgctgtagatgactacttgggccatcggggggtgggagggatggggagtcggttagtcattgatagaactactttgaaaacaattcagtggtcttatttttgggtgatttttc

SEQ ID NO: 335878 - DNA, 5796 bp, Artificial Sequence
  derived and/or modified sequence
gcggccgaggccggacgacgcggcttggattgcggagccgcgagcagcgctgggtaacggccgcggcgaccaccccggacggcccctgtccccgctggcgggcttccctgtcgccgttcgctgcgctgccggcttcttggtgaatttttggatgaagccattaaattaattgcttgccatcatgagcagaagcaagcgtgacaacaatttttatagtgtagagattggagattctacattcacagtcctgaaacgatatcagaatttaaaacctataggctcaggagctcaaggaatagtatgcgcagcttatgatgccattcttgaaagaaatgttgcaatcaagaagctaagccgaccatttcagaatcagactcatgccaagcgggcctacagagagctagttcttatgaaatgtgttaatcacaaaaatataattggccttttgaatgttttcacaccacagaaatccctagaagaatttcaagatgtttacatagtcatggagctcatggatgcaaatctttgccaagtgattcagatggagctagatcatgaaagaatgtcctaccttctctatcagatgctgtgtggaatcaagcaccttcattctgctggaattattcatcgggacttaaagcccagtaatatagtagtaaaatctgattgcactttgaagattcttgacttcggtctggccaggactgcaggaacgagttttatgatgacgccttatgtagtgactcgctactacagagcacccgaggtcatccttggcatgggctacaaggaaaacgtggatttatggtctgtggggtgcattatgggagaaatggtttgccacaaaatcctctttccaggaagggactatattgatcagtggaataaagttattgaacagcttggaacaccatgtcctgaattcatgaagaaactgcaaccaacagtaaggacttacgttgaaaacagacctaaatatgctggatatagctttgagaaactcttccctgatgtccttttcccagctgactcagaacacaacaaacttaaagccagtcaggcaagggatttgttatccaaaatgctggtaatagatgcatctaaaaggatctctgtagatgaagctctccaacacccgtacatcaatgtctggtatgatccttctgaagcagaagctccaccaccaaagatccctgacaagcagttagatgaaagggaacacacaatagaagagtggaaagaattgatatataaggaagttatggacttggaggagagaaccaagaatggagttatacgggggcagccctctcctttaggtgcagcagtgatcaatggctctcagcatccatcatcatcgtcgtctgtcaatgatgtgtcttcaatgtcaacagatccgactttggcctctgatacagacagcagtctagaagcagcagctgggcctctgggctgctgtagatgactacttgggccatcggggggtgggagggatggggagtcggttagtcattgatagaactactttgaaaacaattcagtggtcttatttttgggtgatttttcaaaaaatgtagaattcattttgtagtaaagtagtttattttttttaatttcaagtgatgtaatttaaaacctaagttgtgtttcaaaacagcaacaaaactgtattgtattttttttgctgtaattaactgtataatgtaaacctaattattttatcatggtttaaattttttgcatatttgctttatcttatgctgctgatttttttaactgaatttgtaagattttgtttatcaaagcaactattatgtggtgacttgcctatatcatgaattatttaagatttttatagttttttttaattagaatttatttcagatgttttgttcatgatactatccttcagggttatgtgcttatcaatgaaataaccccagaggagtgagggaaaataacttgtagccagttatattcaggaataactactgtaaatgatgaacgtgttaggagacctccaatatttgctacttgccaatcctaatttagttacaagaattggtaggcaatcctacttaattttggcaaaagccccgtcatctaaatggcagaataactcagagcatgtctttgaagatgctgggcgtctaccaccaccttatgtccccaccctacccaacaaaaataagtaaaaagaatatggtgtattctacaaatttgtggcatgctcaaagtttatgatcacataaaggcaagaggatacttcatgaataatacatttcaatgcaaataaacagatggttcacttctactagctatgagcctgtttttgtatacactgagttaatctactcaggctgtaggtcccagcaatgttctagagtctggtctttccctttcctgcagcttcgggtccttggacctttcctgtttcctattacttggagtgtctgtcagttgagcaccagttgttctggtgtttcatttgattctacttgtagcataatcatttatacgagctattgggaggttccaaaccctacctagatttgtgtaggtgatgtatcaaatgagcaatataccgttcatctgaaaatagtagcacacagccatatataggatatcattttctaaggactgtttcttcacattgagcagagcaggcataaatggtggttatttagtctaagtcttttatttttttatacctgattttcaacataacacgcaatgtggatgtcgagtagtgttaagaatggtgctgctcctgacaagtgtatgttaactgtttacattttctatctgtagaattatttctctattactgaacttttcctaagtaaaatgtctttgaagtctcgttatttctgaaatacgttgtctgtaatagacccaggcaccttttaaattatctctggaacaagagggatttcatgtaatgaactaggaaatgcatactcacataagcaacaaggttctaggcagaaagccccttggaatttgtgaccaacaggagcaagaacaggtgcggctcaacatgcaatgtctgaaaatttgcttggcattttattcatatatttagtgcaaaattatttttgagtgagatattttacatcactgttaatgtgcaatatttaagattaaaatacattagcttttttatatactttgaagtagcaagtttgttttcgatggcttagagtcatgatttccagcttcccagcctttttatcagtcccttttctaatacaacaaggtgcattaatttgattaggcaaattagagttctaagacacttcttgaattgtagacagaaaatattggattcacaatttcagcagaaatttgagaatgagtgtgtttatattaatttcacaattagctgtattttctgtagcatagattatgtcactgttgcactttcacagcagacatgctttcagaaggttctcatattttatgtttgattgctgataagccatctctattgatacagattttggttaagtaaggaaaaccaggtgtgtgtctgtatcatttattgtaaatgccagctgccacttgccaaccatcatgttcagttcaattcaaagaaaacaaactctcattacttagtgtaaactaaaatacttaacaaattatatcctaaaaacaaggtctctttgttaaatgttgcatgccctaggttttaaattactacatccaaatacagttttcgtcttaaatttgttaagctaaatatatgttggttctttttattttggaatcctttaagcatcttaaacattttttttttgaagagaagttacaaataacatttctatcaggtagtacttgtatgaaaccacctttcttattctataattttgatttttcaattttatatacttaatatactcactgtcttactatcagaaagttattttgaccaagatttttattatcttcatagattcagaaagagatgctaattctgtaccaatgtcttcctggttactattctcttccctctaatatatactggccatttgtaaaaccattgtgttgttgggatcacttagttatactatacgcagatagagcatctcaactctgtcatagtgtttgctgaacagttttcagtgtcatgcacctttggctgctaattgttcctgacgtgcactcttccgagttggtaaaggcacagtgtgttcatgccagacttctaagagaaacaccagcctcttaaatcagaagcctacacacaacccccttaacaatccaaagaagcttgatggtgtgcaaagaagcatcctgccagccttgtcattgttctgttctatgctaatcctgctgtgttgtctaaaagatggagggaagaggacatcagtgtctgatagtgaaatcatcagcaggaaagtgaagctctttccttggttacagataagacttggtttacactattggccagtatctgctaaacatatgaagacttaactattcagtgttgcctaggcattcgcctgcacaacattttgaggttagaacatagaatattttcagaaatactgttgtagtttgtgagtgttgttcattagttacacattagctatagagtggatgcatgaagccccatgacaccagtaaacttctcttaccagtaggtaaaccaaacaccattctgtcattagcagccctcttaaatgttgcctctccgtatcctgttgcatttttgtgtgcattgtgtttctactgatctctcttaggtttttacggaatcaaaggaaactaatttttccttaatagcaagaaagatgaagaggtaaagggcattgaagcagaaatgtatagtttggggtacgattagaaaactcgtaaggaaaacagaagtcctaatttcaaactgactgctcttcgttaagtgctcttaaggagagtctagtaacagtaacactttctggccatttctagtttagattctcttcgttactgaaacttttgagaaatattacctgtggattaattttgcacaatgttctattctcataatgacttacaaattaaactaggtttttattgaactacctcacactaattttctatgctttcccaagtaagctgttgccctgttagatctttactgagtgaattataaatgtgtgttaaatactttctagccaatgttgacacaataccagtaagtatgtaaagtatataccttacatcagtaagagacacgtgtaaaatctttgactgtatgtcttgcaaaattgtgctcgttgacattattactgtttttgtaagtagaaacctgctcgtgatatcggtccatttacattttacaaaaggagtaaatcttagtaaaaattttacgaagaaataaattacttttgtaggcccaatatttggtatatttttgagaagctgttaatcttttagctgaataatgaagttagactgaattacgtgtctccctggactgtgacatctattttctcattacagtttatcctggtcagcagggtgtcacacctggaaacctgagtatgatagctgacatttgcttttctccctctgcgatgtcattcctcctccattcctctccttccctgtgttccgttccctctcctttcctctagacaaaacaaaatggggcactttttagggaatgctgagatcattattgtggtttttcatcattcatgccctagtcattaaacatgcaccactggaatgtaaacaatgttatctagtatgtcaattggttataatattttaaataaaaaagaaaaaagtggtatgaaaattatgaaa

SEQ ID NO: 335879 - DNA, 1284 bp, Artificial Sequence
  derived and/or modified sequence
atgagccggtcaaaacgtgacaataacttttactctgttgaaatcggcgattccacattcacagtactcaagcgataccaaaacttaaagcccattgggtctggtgcacagggcatcgtgtgcgccgcttacgacgcaatccttgagagaaatgtggccattaagaaactttctcgacccttccaaaaccagactcatgccaagagagcctacagggaactggttctgatgaaatgtgtcaatcataagaacatcatcggtctgttgaacgtgttcacaccccaaaagagccttgaagagttccaggatgtatatatcgtaatggagcttatggacgcgaatctgtgtcaggtgatacagatggaactcgatcacgagcgcatgagttatcttctgtatcagatgctgtgcggtatcaaacacctacactctgctggaatcattcatcgggacctgaaacccagtaatatcgttgtaaaatctgactgtacacttaaaatcctggactttggcctcgcacggacggcgggaacttccttcatgatgacgccttacgtggttacaaggtactaccgtgctcccgaggttatcctgggcatgggatacaaggaaaacgtagacctctggagcgtgggctgtataatgggagaaatggtatgtcataaaatcctgttcccaggaagggactacattgaccagtggaacaaggtgatagagcagctaggtacaccatgccctgaattcatgaaaaagctgcagccaacagtgcgcacttacgtggagaaccgcccaaagtacgctgggtactccttcgaaaagctgttcccagatgtgttatttccagctgatagcgaacataacaaactgaaggcgagccaggcgagggacctactctcaaagatgctggttatcgatgccagcaagcgaatttccgtggacgaagcattacagcacccatacatcaacgtatggtacgaccccagcgaggctgaagcgccaccgcctaaaatccccgacaagcagctggatgaaagagagcacacgatcgaggagtggaaggagctgatctacaaagaggtcatggacctcgaggaaaggacgaagaacggcgtcatccgtggccagccgtcacccctgggggctgccgtaatcaatggtagtcagcatccctcatcctccagcagcgtgaacgatgttagcagcatgtctacggatcctaccttagcatcagacactgatagcagtctggaggcagccgctggtcccctgggctgctgccgttag

SEQ ID NO: 335880 - DNA, 1284 bp, Artificial Sequence
  derived and/or modified sequence
atgagtcggagcaaaagggacaacaacttctatagtgtggagatcggcgatagtacatttaccgtgctcaagcggtaccagaatttaaaaccaatagggagtggcgctcaggggatcgtgtgcgccgcttatgacgccatactggagcggaacgtcgcgatcaagaagttgtcccgcccattccaaaaccagacacatgcaaagcgcgcttaccgggagctcgtattaatgaagtgcgtgaatcataagaacattatcggcctactgaacgtcttcaccccccaaaagagcctggaagagttccaggatgtgtatatcgtgatggaacttatggacgctaacctgtgccaagtaatccaaatggagctggaccacgagaggatgagctatctgttgtatcagatgctctgtggcatcaagcaccttcactcagccggaatcatccatagagacctgaaaccctctaacatcgttgtgaaatctgattgcacactgaaaatcttagattttggcttggcacgcactgcagggacctccttcatgatgactccctatgtggttacaagatactaccgcgctccagaagtcatcctcgggatgggttataaggaaaacgtggatctttggtctgtggggtgtatcatgggagaaatggtctgtcataagatcctattccccggtcgggattatatagatcagtggaataaagtaatcgaacagctgggaaccccatgtcccgagtttatgaaaaagcttcaaccaaccgtgcggacatacgttgaaaaccgcccaaagtatgctggttactctttcgagaagctttttccggatgtcctgttccccgctgacagtgagcataacaagctcaaggccagccaggcacgggatctgctgtctaaaatgctggtgattgatgcatcaaaaaggatctcagtggacgaagctctgcagcatccttacattaacgtgtggtatgacccgtcagaggctgaagcgcctcctcctaagattcccgacaaacaacttgatgaacgagaacacacaattgaggaatggaaggaattaatctacaaagaagtgatggatcttgaggaaagaaccaaaaacggggtgatcagaggccagccgtcacctctgggcgcagccgtgatcaacgggtcccagcacccctctagctcaagttcggtcaacgatgtgtctagtatgtcgaccgatcctaccctggcttccgataccgattcatcactggaggccgcagcgggacccttgggatgctgccgatag

SEQ ID NO: 335881 - protein, 384 aa, Artificial Sequence
  derived and/or modified sequence
MSRSKRDNNFYSVEIGDSTFTVLKRYQNLKPIGSGAQGIVCAAYDAILERNVAIKKLSRPFQNQTHAKRAYRELVLMKCVNHKNIIGLLNVFTPQKSLEEFQDVYIVMELMDANLCQVIQMELDHERMSYLLYQMLCGIKHLHSAGIIHRDLKPSNIVVKSDCTLKILDFGLARTAGTSFMMTPYVVTRYYRAPEVILGMGYKENVDIWSVGCIMGEMIKGGVLFPGTDHIDQWNKVIEQLGTPCPEFMKKLQPTVRTYVENRPKYAGYSFEKLFPDVLFPADSEHNKLKASQARDLLSKMLVIDASKRISVDEALQHPYINVWYDPSEAEAPPPKIPDKQLDEREHTIEEWKELIYKEVMDLEERTKNGVIRGQPSPLAQVQQ

SEQ ID NO: 335882 - DNA, 1155 bp, Artificial Sequence
  derived and/or modified sequence
atgagcagaagcaagagagacaacaacttctacagcgtggagatcggcgacagcaccttcaccgtgctgaagagataccagaacctgaagcccatcggcagcggcgcccagggcatcgtgtgcgccgcctacgacgccatcctggagagaaacgtggccatcaagaagctgagcagacccttccagaaccagacccacgccaagagagcctacagagagctggtgctgatgaagtgcgtgaaccacaagaacatcatcggcctgctgaacgtgttcaccccccagaagagcctggaggagttccaggacgtgtacatcgtgatggagctgatggacgccaacctgtgccaggtgatccagatggagctggaccacgagagaatgagctacctgctgtaccagatgctgtgcggcatcaagcacctgcacagcgccggcatcatccacagagacctgaagcccagcaacatcgtggtgaagagcgactgcaccctgaagatcctggacttcggcctggccagaaccgccggcaccagcttcatgatgaccccctacgtggtgaccagatactacagagcccccgaggtgatcctgggcatgggctacaaggagaacgtggacatctggagcgtgggctgcatcatgggcgagatgatcaagggcggcgtgctgttccccggcaccgaccacatcgaccagtggaacaaggtgatcgagcagctgggcaccccctgccccgagttcatgaagaagctgcagcccaccgtgagaacctacgtggagaacagacccaagtacgccggctacagcttcgagaagctgttccccgacgtgctgttccccgccgacagcgagcacaacaagctgaaggccagccaggccagagacctgctgagcaagatgctggtgatcgacgccagcaagagaatcagcgtggacgaggccctgcagcacccctacatcaacgtgtggtacgaccccagcgaggccgaggcccccccccccaagatccccgacaagcagctggacgagagagagcacaccatcgaggagtggaaggagctgatctacaaggaggtgatggacctggaggagagaaccaagaacggcgtgatcagaggccagcccagccccctggcccaggtgcagcagtag

SEQ ID NO: 335883 - DNA, 1155 bp, Artificial Sequence
  derived and/or modified sequence
atgtcacgctccaagcgagacaacaacttttactccgtagaaattggggattctacatttacagtcctaaaaagataccaaaacctaaagcctatcgggagcggggcacagggcatcgtatgtgcggcctatgatgccatcctggaaaggaacgtcgctattaaaaaactcagcagaccattccagaaccagacacatgcgaaacgtgcctatcgcgaactggtcctcatgaaatgcgtaaatcataagaacatcatcggactgttaaatgtttttacaccacagaaatcactggaggagttccaggatgtgtacatcgtgatggaactaatggatgctaacctctgccaggtgatccagatggagttggaccatgaaaggatgtcatatctgctctaccaaatgctttgtggcattaaacacttacactcagccggcatcattcaccgggatttgaagccttccaatatcgtggttaaaagcgactgtaccctgaagatactcgactttgggttggcccgtactgcaggaacctccttcatgatgacgccctatgtggtgacaaggtactaccgggcgcccgaggtgatcctcggcatgggatacaaggagaatgttgatatatggtctgtgggatgcataatgggtgagatgataaaggggggagtgttgtttccagggaccgatcacatcgatcagtggaacaaagtgattgagcagctggggacaccgtgccccgaattcatgaaaaagctgcaaccaacagtgaggacgtacgtggaaaatcggccaaaatatgctggctacagtttcgagaagctgtttcctgacgtcttgttccccgccgatagcgagcataataaactcaaggcatcccaggcacgcgacctgctgagcaagatgctggtgatcgacgcaagcaaaagaatctcagtcgacgaggccttgcaacacccctacatcaacgtttggtatgacccttcagaggccgaggcacctcccccgaaaatcccggataagcagctcgatgaaagagaacacaccattgaagaatggaaggagctcatatacaaagaggtcatggacctagaagaaaggacgaagaatggagtcatccggggccagccctcacccctggcccaggtgcagcagtag

SEQ ID NO: 335884 - DNA, 1155 bp, Artificial Sequence
  derived and/or modified sequence
atgagccgcagcaagagggacaacaacttctacagcgtggagattggagacagcaccttcaccgtgctgaagcgctaccagaacctgaagcccatcggcagcggggcccagggcatcgtgtgtgccgcctatgatgccatcctggagagaaatgtggccatcaagaagctgagccggcccttccagaaccagacccacgccaagagggcctaccgggagctggtgctgatgaagtgtgtgaaccacaagaacatcatcggcctgctgaatgtgttcaccccccagaagagcctggaggagttccaggatgtgtacatcgtgatggagctgatggatgccaacctgtgccaggtgatccagatggagctggaccacgagaggatgagctacctgctgtaccagatgctgtgtggcatcaagcacctgcacagcgctggcatcatccaccgggacctgaagcccagcaacatcgtggtgaagagtgactgcaccctgaagatcctggactttggcctggccaggacagctggcaccagcttcatgatgaccccctacgtggtgacccgctactaccgggcccctgaggtgatcctgggcatgggctacaaggaaaatgtggacatctggagcgtgggctgcatcatgggagagatgatcaagggcggcgtgctcttccctggaacagaccacatcgaccagtggaacaaggtgattgagcagctgggcaccccctgcccagagttcatgaagaagctgcagcccaccgtgaggacctacgtggagaaccggcccaagtatgccggctacagctttgagaagctgttcccagatgtgctcttccctgctgacagcgagcacaacaagctgaaggccagccaggcccgggacctgctgagcaagatgctggtgattgatgccagcaagaggatctctgtggatgaggccctgcagcacccctacatcaacgtgtggtatgaccccagcgaggccgaggcccccccacccaagatcccagacaagcagctggatgagcgggagcacaccatcgaggagtggaaggagctgatctacaaggaggtgatggacctggaggagaggaccaagaatggagtcatccggggccagcccagccccctggcccaggtgcagcagtag

SEQ ID NO: 335885 - DNA, 1155 bp, Artificial Sequence
  derived and/or modified sequence
atgagccggagcaagcgggacaacaacttctacagcgtggagatcggcgacagtaccttcacagtcctgaaacgttaccagaatcttaagcctatcggtagcggcgcccagggaatcgtttgtgccgcgtatgacgccatcctggagcgtaacgtggctatcaagaagctttctcgcccattccagaatcagacacacgccaagagagcctatcgtgaactcgtcctgatgaagtgtgttaaccataagaacattatcggacttctgaacgtgtttacgccccagaagagcctggaagagttccaggacgtatacatagtgatggagctcatggacgctaacctgtgccaggtcattcagatggaattggaccatgaacggatgtcatacctcctgtatcagatgctatgcggcatcaagcacttacacagcgctgggatcatccacagagacctgaaacctagtaatattgtcgttaaatccgattgtaccttgaaaatactggattttgggctggcgaggaccgccggcacctctttcatgatgaccccttacgtggtgactcgctactaccgagcacccgaagtaattctaggcatgggatataaagagaacgtggatatctggtctgttggatgcatcatgggagaaatgattaaagggggcgtgctgttccctggtactgatcatatcgaccagtggaataaggtcatagagcaactcggaaccccatgccctgagtttatgaagaaactgcagcccactgtccgtacatacgtggaaaatcggcctaaatacgctggctactcctttgagaaactctttccggacgtcttattccctgcagactctgaacacaacaaacttaaggcgtctcaggctagggatctgctgtcgaaaatgttagtaatcgatgcatcgaaaagaatttcagtcgacgaagccctgcagcacccttacattaacgtttggtacgatcctagcgaggccgaagcaccgcccccaaagatccccgacaaacagctggacgagcgtgaacacactattgaagaatggaaggagctcatctacaaagaagtgatggatcttgaagagaggactaagaacggcgttattaggggtcagccctcacctttagctcaagtgcaacagtag

SEQ ID NO: 335886 - DNA, 5637 bp, Artificial Sequence
  derived and/or modified sequence
attaattgcttgccatcatgagcagaagcaagcgtgacaacaatttttatagtgtagagattggagattctacattcacagtcctgaaacgatatcagaatttaaaacctataggctcaggagctcaaggaatagtatgcgcagcttatgatgccattcttgaaagaaatgttgcaatcaagaagctaagccgaccatttcagaatcagactcatgccaagcgggcctacagagagctagttcttatgaaatgtgttaatcacaaaaatataattggccttttgaatgttttcacaccacagaaatccctagaagaatttcaagatgtttacatagtcatggagctcatggatgcaaatctttgccaagtgattcagatggagctagatcatgaaagaatgtcctaccttctctatcagatgctgtgtggaatcaagcaccttcattctgctggaattattcatcgggacttaaagcccagtaatatagtagtaaaatctgattgcactttgaagattcttgacttcggtctggccaggactgcaggaacgagttttatgatgacgccttatgtagtgactcgctactacagagcacccgaggtcatccttggcatgggctacaaggaaaacgttgacatttggtcagttgggtgcatcatgggagaaatgatcaaaggtggtgttttgttcccaggtacagatcatattgatcagtggaataaagttattgaacagcttggaacaccatgtcctgaattcatgaagaaactgcaaccaacagtaaggacttacgttgaaaacagacctaaatatgctggatatagctttgagaaactcttccctgatgtccttttcccagctgactcagaacacaacaaacttaaagccagtcaggcaagggatttgttatccaaaatgctggtaatagatgcatctaaaaggatctctgtagatgaagctctccaacacccgtacatcaatgtctggtatgatccttctgaagcagaagctccaccaccaaagatccctgacaagcagttagatgaaagggaacacacaatagaagagtggaaagaattgatatataaggaagttatggacttggaggagagaaccaagaatggagttatacgggggcagccctctcctttagcacaggtgcagcagtgatcaatggctctcagcatccatcatcatcgtcgtctgtcaatgatgtgtcttcaatgtcaacagatccgactttggcctctgatacagacagcagtctagaagcagcagctgggcctctgggctgctgtagatgactacttgggccatcggggggtgggagggatggggagtcggttagtcattgatagaactactttgaaaacaattcagtggtcttatttttgggtgatttttcaaaaaatgtagaattcattttgtagtaaagtagtttattttttttaatttcaagtgatgtaatttaaaacctaagttgtgtttcaaaacagcaacaaaactgtattgtattttttttgctgtaattaactgtataatgtaaacctaattattttatcatggtttaaattttttgcatatttgctttatcttatgctgctgatttttttaactgaatttgtaagattttgtttatcaaagcaactattatgtggtgacttgcctatatcatgaattatttaagatttttatagttttttttaattagaatttatttcagatgttttgttcatgatactatccttcagggttatgtgcttatcaatgaaataaccccagaggagtgagggaaaataacttgtagccagttatattcaggaataactactgtaaatgatgaacgtgttaggagacctccaatatttgctacttgccaatcctaatttagttacaagaattggtaggcaatcctacttaattttggcaaaagccccgtcatctaaatggcagaataactcagagcatgtctttgaagatgctgggcgtctaccaccaccttatgtccccaccctacccaacaaaaataagtaaaaagaatatggtgtattctacaaatttgtggcatgctcaaagtttatgatcacataaaggcaagaggatacttcatgaataatacatttcaatgcaaataaacagatggttcacttctactagctatgagcctgtttttgtatacactgagttaatctactcaggctgtaggtcccagcaatgttctagagtctggtctttccctttcctgcagcttcgggtccttggacctttcctgtttcctattacttggagtgtctgtcagttgagcaccagttgttctggtgtttcatttgattctacttgtagcataatcatttatacgagctattgggaggttccaaaccctacctagatttgtgtaggtgatgtatcaaatgagcaatataccgttcatctgaaaatagtagcacacagccatatataggatatcattttctaaggactgtttcttcacattgagcagagcaggcataaatggtggttatttagtctaagtcttttatttttttatacctgattttcaacataacacgcaatgtggatgtcgagtagtgttaagaatggtgctgctcctgacaagtgtatgttaactgtttacattttctatctgtagaattatttctctattactgaacttttcctaagtaaaatgtctttgaagtctcgttatttctgaaatacgttgtctgtaatagacccaggcaccttttaaattatctctggaacaagagggatttcatgtaatgaactaggaaatgcatactcacataagcaacaaggttctaggcagaaagccccttggaatttgtgaccaacaggagcaagaacaggtgcggctcaacatgcaatgtctgaaaatttgcttggcattttattcatatatttagtgcaaaattatttttgagtgagatattttacatcactgttaatgtgcaatatttaagattaaaatacattagcttttttatatactttgaagtagcaagtttgttttcgatggcttagagtcatgatttccagcttcccagcctttttatcagtcccttttctaatacaacaaggtgcattaatttgattaggcaaattagagttctaagacacttcttgaattgtagacagaaaatattggattcacaatttcagcagaaatttgagaatgagtgtgtttatattaatttcacaattagctgtattttctgtagcatagattatgtcactgttgcactttcacagcagacatgctttcagaaggttctcatattttatgtttgattgctgataagccatctctattgatacagattttggttaagtaaggaaaaccaggtgtgtgtctgtatcatttattgtaaatgccagctgccacttgccaaccatcatgttcagttcaattcaaagaaaacaaactctcattacttagtgtaaactaaaatacttaacaaattatatcctaaaaacaaggtctctttgttaaatgttgcatgccctaggttttaaattactacatccaaatacagttttcgtcttaaatttgttaagctaaatatatgttggttctttttattttggaatcctttaagcatcttaaacattttttttttgaagagaagttacaaataacatttctatcaggtagtacttgtatgaaaccacctttcttattctataattttgatttttcaattttatatacttaatatactcactgtcttactatcagaaagttattttgaccaagatttttattatcttcatagattcagaaagagatgctaattctgtaccaatgtcttcctggttactattctcttccctctaatatatactggccatttgtaaaaccattgtgttgttgggatcacttagttatactatacgcagatagagcatctcaactctgtcatagtgtttgctgaacagttttcagtgtcatgcacctttggctgctaattgttcctgacgtgcactcttccgagttggtaaaggcacagtgtgttcatgccagacttctaagagaaacaccagcctcttaaatcagaagcctacacacaacccccttaacaatccaaagaagcttgatggtgtgcaaagaagcatcctgccagccttgtcattgttctgttctatgctaatcctgctgtgttgtctaaaagatggagggaagaggacatcagtgtctgatagtgaaatcatcagcaggaaagtgaagctctttccttggttacagataagacttggtttacactattggccagtatctgctaaacatatgaagacttaactattcagtgttgcctaggcattcgcctgcacaacattttgaggttagaacatagaatattttcagaaatactgttgtagtttgtgagtgttgttcattagttacacattagctatagagtggatgcatgaagccccatgacaccagtaaacttctcttaccagtaggtaaaccaaacaccattctgtcattagcagccctcttaaatgttgcctctccgtatcctgttgcatttttgtgtgcattgtgtttctactgatctctcttaggtttttacggaatcaaaggaaactaatttttccttaatagcaagaaagatgaagaggtaaagggcattgaagcagaaatgtatagtttggggtacgattagaaaactcgtaaggaaaacagaagtcctaatttcaaactgactgctcttcgttaagtgctcttaaggagagtctagtaacagtaacactttctggccatttctagtttagattctcttcgttactgaaacttttgagaaatattacctgtggattaattttgcacaatgttctattctcataatgacttacaaattaaactaggtttttattgaactacctcacactaattttctatgctttcccaagtaagctgttgccctgttagatctttactgagtgaattataaatgtgtgttaaatactttctagccaatgttgacacaataccagtaagtatgtaaagtatataccttacatcagtaagagacacgtgtaaaatctttgactgtatgtcttgcaaaattgtgctcgttgacattattactgtttttgtaagtagaaacctgctcgtgatatcggtccatttacattttacaaaaggagtaaatcttagtaaaaattttacgaagaaataaattacttttgtaggcccaatatttggtatatttttgagaagctgttaatcttttagctgaataatgaagttagactgaattacgtgtctccctggactgtgacatctattttctcattacagtttatcctggtcagcagggtgtcacacctggaaacctgagtatgatagctgacatttgcttttctccctctgcgatgtcattcctcctccattcctctccttccctgtgttccgttccctctcctttcctctagacaaaacaaaatggggcactttttagggaatgctgagatcattattgtggtttttcatcattcatgccctagtcattaaacatgcaccactggaatgtaaacaatgttatctagtatgtcaattggttataatattttaaataaaaaagaaaaaagtggtatgaaaattatgaaa

SEQ ID NO: 335887 - DNA, 1155 bp, Artificial Sequence
  derived and/or modified sequence
atgtcccggtctaagcgggacaacaacttctatagcgtggagatcggggactctacatttaccgtcctgaaaagataccagaatctaaagcccatcggctcaggcgctcagggcatcgtgtgcgccgcatacgatgctatcttggaaaggaatgtagccattaagaaactgagccgtccattccagaatcagactcacgctaaaagagcatatcgtgagctggtcctgatgaagtgtgttaatcacaaaaacattattgggttgcttaacgtattcacccctcagaaaagtctggaggagttccaggatgtgtatattgtcatggagctaatggacgctaacttgtgtcaggtgatccaaatggagctggaccacgagagaatgtcctacttattgtaccagatgctttgtggaataaagcatctccactctgccggaatcattcaccgcgatctgaaaccgtccaacatcgtagtcaaatccgactgcaccctaaaaatactggacttcggactcgccagaacagccggtacaagtttcatgatgacaccttacgttgtcacccgttattacagggctcctgaggtgattcttggaatggggtacaaagagaacgttgatatttggagcgtcggatgtatcatgggcgagatgatcaagggaggtgtgctgtttcctggaacagatcatattgaccaatggaataaagtgattgaacaactcgggaccccttgcccagagttcatgaaaaaactgcagcccacagtgcggacctacgtggaaaatagaccgaagtatgcaggatacagctttgagaagttattcccagacgttctgttcccagcagattctgagcacaacaagcttaaggcatcccaagcacgggacttgttgtccaaaatgttagtgattgatgccagcaagcgcatcagtgttgatgaggctcttcagcatccgtacatcaatgtttggtacgatccatctgaggcagaggccccacccccaaaaatccctgacaagcagttagatgagcgcgagcataccatcgaggagtggaaggagctcatctacaaggaggtgatggacctggaagagagaacaaagaacggagtcatccgtggccagccgagcccactcgcacaagtccagcagtag

SEQ ID NO: 335888 - protein, 384 aa, Artificial Sequence
  derived and/or modified sequence
MSRSKRDNNFYSVEIGDSTFTVLKRYQNLKPIGSGAQGIVCAAYDAILERNVAIKKLSRPFQNQTHAKRAYRELVLMKCVNHKNIIGLLNVFTPQKSLEEFQDVYIVMELMDANLCQVIQMELDHERMSYLLYQMLCGIKHLHSAGIIHRDLKPSNIVVKSDCTLKILDFGLARTAGTSFMMTPYVVTRYYRAPEVILGMGYKENVDLWSVGCIMGEMVCHKILFPGRDYIDQWNKVIEQLGTPCPEFMKKLQPTVRTYVENRPKYAGYSFEKLFPDVLFPADSEHNKLKASQARDLLSKMLVIDASKRISVDEALQHPYINVWYDPSEAEAPPPKIPDKQLDEREHTIEEWKELIYKEVMDLEERTKNGVIRGQPSPLAQVQQ

SEQ ID NO: 335889 - DNA, 1155 bp, Artificial Sequence
  derived and/or modified sequence
atgagcagaagcaagagagacaacaacttctacagcgtggagatcggcgacagcaccttcaccgtgctgaagagataccagaacctgaagcccatcggcagcggcgcccagggcatcgtgtgcgccgcctacgacgccatcctggagagaaacgtggccatcaagaagctgagcagacccttccagaaccagacccacgccaagagagcctacagagagctggtgctgatgaagtgcgtgaaccacaagaacatcatcggcctgctgaacgtgttcaccccccagaagagcctggaggagttccaggacgtgtacatcgtgatggagctgatggacgccaacctgtgccaggtgatccagatggagctggaccacgagagaatgagctacctgctgtaccagatgctgtgcggcatcaagcacctgcacagcgccggcatcatccacagagacctgaagcccagcaacatcgtggtgaagagcgactgcaccctgaagatcctggacttcggcctggccagaaccgccggcaccagcttcatgatgaccccctacgtggtgaccagatactacagagcccccgaggtgatcctgggcatgggctacaaggagaacgtggacctgtggagcgtgggctgcatcatgggcgagatggtgtgccacaagatcctgttccccggcagagactacatcgaccagtggaacaaggtgatcgagcagctgggcaccccctgccccgagttcatgaagaagctgcagcccaccgtgagaacctacgtggagaacagacccaagtacgccggctacagcttcgagaagctgttccccgacgtgctgttccccgccgacagcgagcacaacaagctgaaggccagccaggccagagacctgctgagcaagatgctggtgatcgacgccagcaagagaatcagcgtggacgaggccctgcagcacccctacatcaacgtgtggtacgaccccagcgaggccgaggcccccccccccaagatccccgacaagcagctggacgagagagagcacaccatcgaggagtggaaggagctgatctacaaggaggtgatggacctggaggagagaaccaagaacggcgtgatcagaggccagcccagccccctggcccaggtgcagcagtag

SEQ ID NO: 335890 - DNA, 1155 bp, Artificial Sequence
  derived and/or modified sequence
atgtcccggtccaaaagagacaataacttctactccgttgagatcggcgactcaacatttaccgttctcaaacgatatcagaacctaaagcccattggaagcggcgctcaaggaatcgtctgtgctgcctacgacgccatcctggagcggaacgtcgcaattaagaagttgagccgcccttttcagaatcagacacatgcaaagcgagcatatcgagagctcgtgttaatgaagtgtgttaaccataagaatatcatagggcttttaaacgtctttactcctcagaaatccttggaggaattccaagatgtttacatcgttatggagctgatggacgcgaatttgtgccaagttatacagatggaactggaccacgaacggatgagctacctcctgtatcaaatgctgtgcggtataaagcatctgcactcagcgggaattatccaccgagatcttaagccaagtaacattgtcgtaaaatctgactgcacactaaaaatactcgacttcgggctggcgcgaaccgccgggacatctttcatgatgaccccgtatgtggttaccaggtattaccgagcacctgaagtgattttggggatgggttataaggaaaacgtagatttgtggagcgtaggatgtattatgggcgaaatggtgtgtcataagatcctgtttccagggagggattacatcgatcaatggaacaaggtgatagagcagcttggcaccccctgtcccgaattcatgaaaaagctccagcctaccgtacgaacttatgtggagaatcggccaaagtacgccggttacagctttgagaagctgtttcccgatgtcctgtttcctgccgactcagaacacaataagctaaaggccagtcaagcaagagatctcttgagcaagatgctagtcatcgacgcctcaaaacgcatctcggtggatgaggcgcttcagcacccctacattaatgtgtggtatgacccctccgaagctgaagcaccccctcctaagatccctgataagcagctggacgagcgggagcatacgattgaggagtggaaggagctgatctacaaggaggtgatggacctggaagagcgcacaaagaatggcgtaattagaggccaaccctctccgctagcccaggttcagcagtag

SEQ ID NO: 335891 - DNA, 1155 bp, Artificial Sequence
  derived and/or modified sequence
atgagccgcagcaagagggacaacaacttctacagcgtggagattggagacagcaccttcaccgtgctgaagcgctaccagaacctgaagcccatcggcagcggggcccagggcatcgtgtgtgccgcctatgatgccatcctggagagaaatgtggccatcaagaagctgagccggcccttccagaaccagacccacgccaagagggcctaccgggagctggtgctgatgaagtgtgtgaaccacaagaacatcatcggcctgctgaatgtgttcaccccccagaagagcctggaggagttccaggatgtgtacatcgtgatggagctgatggatgccaacctgtgccaggtgatccagatggagctggaccacgagaggatgagctacctgctgtaccagatgctgtgtggcatcaagcacctgcacagcgctggcatcatccaccgggacctgaagcccagcaacatcgtggtgaagagtgactgcaccctgaagatcctggactttggcctggccaggacagctggcaccagcttcatgatgaccccctacgtggtgacccgctactaccgggcccctgaggtgatcctgggcatgggctacaaggaaaatgtggacctgtggagcgtgggctgcatcatgggagagatggtgtgccacaagatcctcttccctggccgggactacatcgaccagtggaacaaggtgattgagcagctgggcaccccctgcccagagttcatgaagaagctgcagcccaccgtgaggacctacgtggagaaccggcccaagtatgccggctacagctttgagaagctgttcccagatgtgctcttccctgctgacagcgagcacaacaagctgaaggccagccaggcccgggacctgctgagcaagatgctggtgattgatgccagcaagaggatctctgtggatgaggccctgcagcacccctacatcaacgtgtggtatgaccccagcgaggccgaggcccccccacccaagatcccagacaagcagctggatgagcgggagcacaccatcgaggagtggaaggagctgatctacaaggaggtgatggacctggaggagaggaccaagaatggagtcatccggggccagcccagccccctggcccaggtgcagcagtag

SEQ ID NO: 335892 - DNA, 1155 bp, Artificial Sequence
  derived and/or modified sequence
atgagccggagcaagcgggacaacaacttctacagcgtggagatcggagatagtacatttaccgtgctgaagcgatatcagaatctgaaacccatcggctcaggggcccaggggatcgtgtgcgcagcctacgacgctattctggaacggaatgtggccatcaaaaagctctcccgcccatttcagaatcagactcatgcaaagcgcgcctacagggagctagttctgatgaaatgcgtcaaccacaagaatataatcggtctgttaaacgtgtttacaccccagaagtctcttgaagagttccaggacgtgtatatcgttatggagctgatggatgccaatctctgccaggttatccagatggagctcgaccacgagagaatgtcgtacctgttataccaaatgttatgcggtattaaacacctgcacagcgccggtatcatccatagagaccttaaaccatcaaacatcgttgtgaagagtgactgcacactgaagatactggacttcgggctggcccgtacggccggcacgtcgttcatgatgactccgtatgtcgtcacccggtattatcgtgcacccgaggtcattctagggatgggttataaggaaaacgttgatctgtggtcagtgggctgcatcatgggggagatggtttgccacaagattctgttcccgggtagagattatattgaccagtggaacaaagtgattgaacagttaggcaccccttgtcctgaatttatgaagaagctacagcctactgtgcgcacatacgtggagaaccgtccaaaatatgcaggttattcgtttgagaaactctttccagacgtactgttccctgccgactctgaacataacaagctgaaagcatctcaggcccgagatctgttatccaagatgttagtgatcgacgcatcaaagcgaatatctgtggatgaagctttgcagcatccttatatcaatgtgtggtatgatccttctgaagcggaagctccccctccaaagataccggataagcagctggatgagagggaacatacaatcgaagaatggaaagaactcatctacaaggaggtcatggatctggaagaaaggacgaagaacggggtgattcgcggccaaccaagtcccctggcccaggtacagcagtag

SEQ ID NO: 335893 - DNA, 5638 bp, Artificial Sequence
  derived and/or modified sequence
aattaattgcttgccatcatgagcagaagcaagcgtgacaacaatttttatagtgtagagattggagattctacattcacagtcctgaaacgatatcagaatttaaaacctataggctcaggagctcaaggaatagtatgcgcagcttatgatgccattcttgaaagaaatgttgcaatcaagaagctaagccgaccatttcagaatcagactcatgccaagcgggcctacagagagctagttcttatgaaatgtgttaatcacaaaaatataattggccttttgaatgttttcacaccacagaaatccctagaagaatttcaagatgtttacatagtcatggagctcatggatgcaaatctttgccaagtgattcagatggagctagatcatgaaagaatgtcctaccttctctatcagatgctgtgtggaatcaagcaccttcattctgctggaattattcatcgggacttaaagcccagtaatatagtagtaaaatctgattgcactttgaagattcttgacttcggtctggccaggactgcaggaacgagttttatgatgacgccttatgtagtgactcgctactacagagcacccgaggtcatccttggcatgggctacaaggaaaacgtggatttatggtctgtggggtgcattatgggagaaatggtttgccacaaaatcctctttccaggaagggactatattgatcagtggaataaagttattgaacagcttggaacaccatgtcctgaattcatgaagaaactgcaaccaacagtaaggacttacgttgaaaacagacctaaatatgctggatatagctttgagaaactcttccctgatgtccttttcccagctgactcagaacacaacaaacttaaagccagtcaggcaagggatttgttatccaaaatgctggtaatagatgcatctaaaaggatctctgtagatgaagctctccaacacccgtacatcaatgtctggtatgatccttctgaagcagaagctccaccaccaaagatccctgacaagcagttagatgaaagggaacacacaatagaagagtggaaagaattgatatataaggaagttatggacttggaggagagaaccaagaatggagttatacgggggcagccctctcctttagcacaggtgcagcagtgatcaatggctctcagcatccatcatcatcgtcgtctgtcaatgatgtgtcttcaatgtcaacagatccgactttggcctctgatacagacagcagtctagaagcagcagctgggcctctgggctgctgtagatgactacttgggccatcggggggtgggagggatggggagtcggttagtcattgatagaactactttgaaaacaattcagtggtcttatttttgggtgatttttcaaaaaatgtagaattcattttgtagtaaagtagtttattttttttaatttcaagtgatgtaatttaaaacctaagttgtgtttcaaaacagcaacaaaactgtattgtattttttttgctgtaattaactgtataatgtaaacctaattattttatcatggtttaaattttttgcatatttgctttatcttatgctgctgatttttttaactgaatttgtaagattttgtttatcaaagcaactattatgtggtgacttgcctatatcatgaattatttaagatttttatagttttttttaattagaatttatttcagatgttttgttcatgatactatccttcagggttatgtgcttatcaatgaaataaccccagaggagtgagggaaaataacttgtagccagttatattcaggaataactactgtaaatgatgaacgtgttaggagacctccaatatttgctacttgccaatcctaatttagttacaagaattggtaggcaatcctacttaattttggcaaaagccccgtcatctaaatggcagaataactcagagcatgtctttgaagatgctgggcgtctaccaccaccttatgtccccaccctacccaacaaaaataagtaaaaagaatatggtgtattctacaaatttgtggcatgctcaaagtttatgatcacataaaggcaagaggatacttcatgaataatacatttcaatgcaaataaacagatggttcacttctactagctatgagcctgtttttgtatacactgagttaatctactcaggctgtaggtcccagcaatgttctagagtctggtctttccctttcctgcagcttcgggtccttggacctttcctgtttcctattacttggagtgtctgtcagttgagcaccagttgttctggtgtttcatttgattctacttgtagcataatcatttatacgagctattgggaggttccaaaccctacctagatttgtgtaggtgatgtatcaaatgagcaatataccgttcatctgaaaatagtagcacacagccatatataggatatcattttctaaggactgtttcttcacattgagcagagcaggcataaatggtggttatttagtctaagtcttttatttttttatacctgattttcaacataacacgcaatgtggatgtcgagtagtgttaagaatggtgctgctcctgacaagtgtatgttaactgtttacattttctatctgtagaattatttctctattactgaacttttcctaagtaaaatgtctttgaagtctcgttatttctgaaatacgttgtctgtaatagacccaggcaccttttaaattatctctggaacaagagggatttcatgtaatgaactaggaaatgcatactcacataagcaacaaggttctaggcagaaagccccttggaatttgtgaccaacaggagcaagaacaggtgcggctcaacatgcaatgtctgaaaatttgcttggcattttattcatatatttagtgcaaaattatttttgagtgagatattttacatcactgttaatgtgcaatatttaagattaaaatacattagcttttttatatactttgaagtagcaagtttgttttcgatggcttagagtcatgatttccagcttcccagcctttttatcagtcccttttctaatacaacaaggtgcattaatttgattaggcaaattagagttctaagacacttcttgaattgtagacagaaaatattggattcacaatttcagcagaaatttgagaatgagtgtgtttatattaatttcacaattagctgtattttctgtagcatagattatgtcactgttgcactttcacagcagacatgctttcagaaggttctcatattttatgtttgattgctgataagccatctctattgatacagattttggttaagtaaggaaaaccaggtgtgtgtctgtatcatttattgtaaatgccagctgccacttgccaaccatcatgttcagttcaattcaaagaaaacaaactctcattacttagtgtaaactaaaatacttaacaaattatatcctaaaaacaaggtctctttgttaaatgttgcatgccctaggttttaaattactacatccaaatacagttttcgtcttaaatttgttaagctaaatatatgttggttctttttattttggaatcctttaagcatcttaaacattttttttttgaagagaagttacaaataacatttctatcaggtagtacttgtatgaaaccacctttcttattctataattttgatttttcaattttatatacttaatatactcactgtcttactatcagaaagttattttgaccaagatttttattatcttcatagattcagaaagagatgctaattctgtaccaatgtcttcctggttactattctcttccctctaatatatactggccatttgtaaaaccattgtgttgttgggatcacttagttatactatacgcagatagagcatctcaactctgtcatagtgtttgctgaacagttttcagtgtcatgcacctttggctgctaattgttcctgacgtgcactcttccgagttggtaaaggcacagtgtgttcatgccagacttctaagagaaacaccagcctcttaaatcagaagcctacacacaacccccttaacaatccaaagaagcttgatggtgtgcaaagaagcatcctgccagccttgtcattgttctgttctatgctaatcctgctgtgttgtctaaaagatggagggaagaggacatcagtgtctgatagtgaaatcatcagcaggaaagtgaagctctttccttggttacagataagacttggtttacactattggccagtatctgctaaacatatgaagacttaactattcagtgttgcctaggcattcgcctgcacaacattttgaggttagaacatagaatattttcagaaatactgttgtagtttgtgagtgttgttcattagttacacattagctatagagtggatgcatgaagccccatgacaccagtaaacttctcttaccagtaggtaaaccaaacaccattctgtcattagcagccctcttaaatgttgcctctccgtatcctgttgcatttttgtgtgcattgtgtttctactgatctctcttaggtttttacggaatcaaaggaaactaatttttccttaatagcaagaaagatgaagaggtaaagggcattgaagcagaaatgtatagtttggggtacgattagaaaactcgtaaggaaaacagaagtcctaatttcaaactgactgctcttcgttaagtgctcttaaggagagtctagtaacagtaacactttctggccatttctagtttagattctcttcgttactgaaacttttgagaaatattacctgtggattaattttgcacaatgttctattctcataatgacttacaaattaaactaggtttttattgaactacctcacactaattttctatgctttcccaagtaagctgttgccctgttagatctttactgagtgaattataaatgtgtgttaaatactttctagccaatgttgacacaataccagtaagtatgtaaagtatataccttacatcagtaagagacacgtgtaaaatctttgactgtatgtcttgcaaaattgtgctcgttgacattattactgtttttgtaagtagaaacctgctcgtgatatcggtccatttacattttacaaaaggagtaaatcttagtaaaaattttacgaagaaataaattacttttgtaggcccaatatttggtatatttttgagaagctgttaatcttttagctgaataatgaagttagactgaattacgtgtctccctggactgtgacatctattttctcattacagtttatcctggtcagcagggtgtcacacctggaaacctgagtatgatagctgacatttgcttttctccctctgcgatgtcattcctcctccattcctctccttccctgtgttccgttccctctcctttcctctagacaaaacaaaatggggcactttttagggaatgctgagatcattattgtggtttttcatcattcatgccctagtcattaaacatgcaccactggaatgtaaacaatgttatctagtatgtcaattggttataatattttaaataaaaaagaaaaaagtggtatgaaaattatgaaa

SEQ ID NO: 335894 - DNA, 1155 bp, Artificial Sequence
  derived and/or modified sequence
atgagtcggtcgaagcgagacaacaatttctattcagtggaaatcggcgattccacctttacagtcctcaaacgataccagaacttgaagcccattggctcgggcgctcagggcatcgtgtgtgccgcttatgatgcaatcctggagcggaatgtcgcaatcaagaaactgtcgcggccatttcaaaatcagacccacgccaagcgcgcataccgtgagttggtgcttatgaagtgcgtaaaccataaaaatatcatcggcctgctgaatgtgtttacccctcaaaaaagcctagaggagttccaagatgtgtacatcgtcatggaactcatggatgcaaatctgtgccaggtcatccagatggagctcgatcacgaacggatgtcttatttgttgtaccaaatgttatgcggaattaagcacctgcacagcgccggaataatacacagggaccttaagcccagcaatattgtggtgaagagcgactgcacgttaaagatccttgacttcggactcgcgcgaacagcagggacttcttttatgatgactccctacgtggtgacgagatactatcgggctcctgaagtgatcctcggcatgggctataaggagaatgtggacctctggtctgtgggctgcattatgggagagatggtctgtcacaagatactgttcccgggacgggactatatagaccagtggaataaagttattgaacagttgggcacaccctgtcccgagttcatgaaaaaattgcaacccaccgtgcgcacgtacgtcgagaatcgtcccaagtatgcagggtattcctttgagaaattgtttccggatgtgttgttccccgcagacagcgagcacaacaaactgaaagcctcccaagccagggaccttcttagtaaaatgctggtcattgacgcttccaagcgcatttccgtcgacgaagctctgcagcacccctatatcaatgtttggtacgacccaagcgaggccgaggcccctccacccaaaattcctgacaagcaactagacgaacgagaacacacaatcgaagagtggaaggaactgatctacaaagaagtcatggacctagaggagcgcaccaagaacggggtgattcgcggacaaccctcccccctggctcaagtgcagcaatag

SEQ ID NO: 335895 - protein, 1075 aa, Artificial Sequence
  derived and/or modified sequence
MSVKSPFNVMSRNNLEAPPCKMTEPFNFEKNENKLPPHESLRSPGTLPNHPNFRLKSSENGNKKNNFLLCEQTKQYLASQEDNSVSSNPNGINGEVVGSKGDRKKLPAGNSVSPPSAESNSPPKEVNIKPGNNVRPAKSKKLNKLVENSLSISNPGLFTSLGPPLRSTTCHRCGLFGSLRCSQCKQTYYCSTACQRRDWSAHSIVCRPVQPNFHKLENKSSIETKDVEVNNKSDCPLGVTKEIAIWAERIMFSDLRSLQLKKTMEIKGTVTEFKHPGDFYVQLYSSEVLEYMNQLSASLKETYANVHEKDYIPVKGEVCIAKYTVDQTWNRAIIQNVDVQQKKAHVLYIDYGNEEIIPLNRIYHLNRNIDLFPPCAIKCFVANVIPAEGNWSSDCIKATKPLLMEQYCSIKIVDILEEEVVTFAVEVELPNSGKLLDHVLIEMGYGLKPSGQDSKKENADQSDPEDVGKMTTENNIVVDKSDLIPKVLTLNVGDEFCGVVAHIQTPEDFFCQQLQSGRKLAELQASLSKYCDQLPPRSDFYPAIGDICCAQFSGVKPSLGIWTPEAICLMKKLVQNKIITVKVVDKLENSSLVELIDKSETPHVSVSKVLLDAGFAVGEQSMVTDKPSDVKETSVPLGVEGKVNPLEWTWVELGVDQTVDVVVCVIYSPGEFYCHVLKEDALKKLNDLNKSLAEHCQQKLPNGFKAEIGQPCCAFFADIQSRNKHWSEEAITRFQMCVAGIKLQARVVEVTENGIGVELTDLSTCYPRIISDVLIDEHLVLKSASPHKDLPNDRLVNKHELQVHVQGLQATSSAEQWKTIELPVDKTIQANVLEIISPNLFYALPKGMPENQEKLCMLTAELLEYCNAPKSRPPYRPRIGDACCAKYTSDDFWYRAVVLGTSDTDVEVLYADYGNIETLPLCRVQPITSSHLALPFQIIRCSLEGLMELNGSSSQLIIMLLKNFMLNQNVMLSVKGITKNVHTVSVEKCSENGTVDVADKLVTFGLAKNITPQRQSALNTEKMYRMNCCCTELQKQVEKHEHILLFLLNNSTNQNKFIEMKKLLKKTASLGGKPL

SEQ ID NO: 335896 - DNA, 3228 bp, Artificial Sequence
  derived and/or modified sequence
atgagcgtgaagagccccttcaacgtgatgagcagaaacaacctggaggcccccccctgcaagatgaccgagcccttcaacttcgagaagaacgagaacaagctgcccccccacgagagcctgagaagccccggcaccctgcccaaccaccccaacttcagactgaagagcagcgagaacggcaacaagaagaacaacttcctgctgtgcgagcagaccaagcagtacctggccagccaggaggacaacagcgtgagcagcaaccccaacggcatcaacggcgaggtggtgggcagcaagggcgacagaaagaagctgcccgccggcaacagcgtgagcccccccagcgccgagagcaacagcccccccaaggaggtgaacatcaagcccggcaacaacgtgagacccgccaagagcaagaagctgaacaagctggtggagaacagcctgagcatcagcaaccccggcctgttcaccagcctgggcccccccctgagaagcaccacctgccacagatgcggcctgttcggcagcctgagatgcagccagtgcaagcagacctactactgcagcaccgcctgccagagaagagactggagcgcccacagcatcgtgtgcagacccgtgcagcccaacttccacaagctggagaacaagagcagcatcgagaccaaggacgtggaggtgaacaacaagagcgactgccccctgggcgtgaccaaggagatcgccatctgggccgagagaatcatgttcagcgacctgagaagcctgcagctgaagaagaccatggagatcaagggcaccgtgaccgagttcaagcaccccggcgacttctacgtgcagctgtacagcagcgaggtgctggagtacatgaaccagctgagcgccagcctgaaggagacctacgccaacgtgcacgagaaggactacatccccgtgaagggcgaggtgtgcatcgccaagtacaccgtggaccagacctggaacagagccatcatccagaacgtggacgtgcagcagaagaaggcccacgtgctgtacatcgactacggcaacgaggagatcatccccctgaacagaatctaccacctgaacagaaacatcgacctgttccccccctgcgccatcaagtgcttcgtggccaacgtgatccccgccgagggcaactggagcagcgactgcatcaaggccaccaagcccctgctgatggagcagtactgcagcatcaagatcgtggacatcctggaggaggaggtggtgaccttcgccgtggaggtggagctgcccaacagcggcaagctgctggaccacgtgctgatcgagatgggctacggcctgaagcccagcggccaggacagcaagaaggagaacgccgaccagagcgaccccgaggacgtgggcaagatgaccaccgagaacaacatcgtggtggacaagagcgacctgatccccaaggtgctgaccctgaacgtgggcgacgagttctgcggcgtggtggcccacatccagacccccgaggacttcttctgccagcagctgcagagcggcagaaagctggccgagctgcaggccagcctgagcaagtactgcgaccagctgccccccagaagcgacttctaccccgccatcggcgacatctgctgcgcccagttcagcggcgtgaagcccagcctgggcatctggacccccgaggccatctgcctgatgaagaagctggtgcagaacaagatcatcaccgtgaaggtggtggacaagctggagaacagcagcctggtggagctgatcgacaagagcgagaccccccacgtgagcgtgagcaaggtgctgctggacgccggcttcgccgtgggcgagcagagcatggtgaccgacaagcccagcgacgtgaaggagaccagcgtgcccctgggcgtggagggcaaggtgaaccccctggagtggacctgggtggagctgggcgtggaccagaccgtggacgtggtggtgtgcgtgatctacagccccggcgagttctactgccacgtgctgaaggaggacgccctgaagaagctgaacgacctgaacaagagcctggccgagcactgccagcagaagctgcccaacggcttcaaggccgagatcggccagccctgctgcgccttcttcgccgacatccagagcagaaacaagcactggagcgaggaggccatcaccagattccagatgtgcgtggccggcatcaagctgcaggccagagtggtggaggtgaccgagaacggcatcggcgtggagctgaccgacctgagcacctgctaccccagaatcatcagcgacgtgctgatcgacgagcacctggtgctgaagagcgccagcccccacaaggacctgcccaacgacagactggtgaacaagcacgagctgcaggtgcacgtgcagggcctgcaggccaccagcagcgccgagcagtggaagaccatcgagctgcccgtggacaagaccatccaggccaacgtgctggagatcatcagccccaacctgttctacgccctgcccaagggcatgcccgagaaccaggagaagctgtgcatgctgaccgccgagctgctggagtactgcaacgcccccaagagcagacccccctacagacccagaatcggcgacgcctgctgcgccaagtacaccagcgacgacttctggtacagagccgtggtgctgggcaccagcgacaccgacgtggaggtgctgtacgccgactacggcaacatcgagaccctgcccctgtgcagagtgcagcccatcaccagcagccacctggccctgcccttccagatcatcagatgcagcctggagggcctgatggagctgaacggcagcagcagccagctgatcatcatgctgctgaagaacttcatgctgaaccagaacgtgatgctgagcgtgaagggcatcaccaagaacgtgcacaccgtgagcgtggagaagtgcagcgagaacggcaccgtggacgtggccgacaagctggtgaccttcggcctggccaagaacatcaccccccagagacagagcgccctgaacaccgagaagatgtacagaatgaactgctgctgcaccgagctgcagaagcaggtggagaagcacgagcacatcctgctgttcctgctgaacaacagcaccaaccagaacaagttcatcgagatgaagaagctgctgaagaagaccgccagcctgggcggcaagcccctgtag

SEQ ID NO: 335897 - DNA, 3228 bp, Artificial Sequence
  derived and/or modified sequence
atgtccgtgaagtcccccttcaacgtcatgagtagaaataacctcgaggccccaccttgcaagatgacggagccatttaactttgaaaagaacgaaaacaagctcccgccccacgaaagtctgcggtcgcccggtaccctgccgaaccacccaaacttccgattaaaaagctcagaaaacggcaacaaaaaaaacaactttttgttgtgcgagcagacaaagcaatacttagccagccaggaagataactcagtatcaagcaaccctaacgggatcaacggtgaggttgtgggttctaaaggagatcggaagaagctgccagcgggaaatagcgtcagcccaccttctgctgagagtaactcgccaccaaaggaggtcaatattaaaccaggtaacaatgtgcgtccagccaagtccaagaagttaaataagctggtagagaactccctgtccataagtaatccagggctgtttacttcgttgggccccccattgagaagcaccacctgccacaggtgtggcctctttggcagtcttcggtgttctcaatgcaagcagacctactattgttccacagcttgccagcggcgggactggagcgcccacagcatcgtctgccggccagtgcagcctaactttcacaagctggagaataagagcagcattgagactaaggacgtcgaggtgaacaacaagtccgattgtccgctgggcgtcaccaaggaaatcgcgatctgggccgagaggatcatgttcagcgatttaagatcacttcagctgaaaaaaaccatggagattaagggaacagtcaccgaattcaagcaccctggcgatttctacgtacaactgtatagtagtgaagtgttagagtacatgaaccagctgagcgccagtttgaaggagacatatgccaatgtgcatgagaaggactacattccagtgaagggggaggtatgtattgcgaaatacactgtggatcagacatggaacagagctatcatccagaacgtggatgtgcagcagaaaaaggcccatgtgctctacatcgactacggaaatgaggaaataataccactgaacaggatctatcatctgaaccggaacatagatctcttccccccctgcgcgatcaagtgcttcgtagccaatgttatccccgcagaaggcaactggtcttcagactgcataaaggcaactaaacctctgttaatggaacaatactgctccatcaagattgtagatatccttgaagaagaagtcgtgaccttcgccgtcgaggtggagttacccaattcagggaagcttttagaccacgtcctcatcgagatgggatatggcctcaagccatcaggacaggactctaagaaggagaatgctgatcaaagcgatccagaggatgttggcaaaatgactaccgaaaataacatcgtggtggataaaagtgatctcattccaaaggtacttactctgaatgtcggcgatgaattctgcggagtagtggcccacatccagacgcctgaggacttcttttgccagcagctccagtcaggccgcaaattggccgaactgcaggcttctctatctaaatactgtgatcagcttccccctcgctctgacttctatcccgcaatcggtgacatttgttgtgcgcagtttagtggagtcaagccctcgctagggatttggacgcccgaagctatctgcctgatgaaaaaactcgtgcagaataagatcatcactgtgaaggtggtggacaagctcgaaaactcctctttagtcgaactcattgacaaatcagaaacccctcacgtcagtgttagtaaggtgctcctcgacgccgggttcgccgtgggagagcagtctatggttacagacaagccgagcgacgtaaaggagacctcagtgccattgggagttgaggggaaagtgaaccctcttgaatggacctgggtcgagcttggggtggaccaaacagtggacgtggttgtctgtgtaatttacagcccaggagaattttactgccatgtattaaaggaagacgctctcaagaagctgaatgatctgaacaagagtctggcagaacactgtcagcagaagttacctaacgggtttaaggccgaaatcggccaaccttgttgcgcatttttcgccgacatccaatctaggaacaagcattggtctgaagaagcgattacccgatttcagatgtgtgtggccgggattaagctgcaagcgcgcgtggtggaagtgactgaaaatggcataggcgtggagctgactgatctaagcacctgctaccctcggattatctcggatgtcctgatagatgaacacctggttcttaagagtgcttctcctcataaagatctacctaatgaccgtctggtcaacaagcatgaattgcaagtccacgtccagggtttgcaggccactagctcagcggagcagtggaaaaccatcgagctccccgtagataagactatacaagcgaatgtgctcgagatcatttcgcctaatctgttttatgccctacccaaaggaatgcctgagaatcaggagaaactgtgtatgctgacagcagaactccttgagtactgcaacgcccccaaaagccggcctccatatcgaccacgcattggcgatgcctgttgtgctaagtacacttccgacgacttctggtacagagcagtggtgttaggaacttcagacacagatgttgaggttctgtatgcagactacgggaatatagagaccttacccctgtgccgggttcagccaattacttccagccacctggcattaccttttcagataattcgatgctctctggaggggttgatggaactgaacgggtcatcctctcagctgatcatcatgttattaaaaaactttatgttgaaccaaaacgttatgttgtccgttaaagggatcactaaaaatgttcacacagtgtctgtcgagaagtgcagcgagaatggaacagtggacgtcgcggataagctcgtgacttttgggttggccaaaaacattactccgcaacgtcagtccgccctaaacacagaaaagatgtaccgcatgaactgctgttgtaccgagctccagaagcaggtggaaaaacatgaacacattctcctctttttactgaacaatagcaccaatcagaacaagtttatagaaatgaaaaagctgcttaaaaagactgcaagcctgggcgggaagccactctag

SEQ ID NO: 335898 - DNA, 3228 bp, Artificial Sequence
  derived and/or modified sequence
atgtctgtgaagagccccttcaacgtgatgagcaggaacaacctggaggccccaccctgcaagatgacagagcccttcaactttgagaagaatgaaaacaagctgccccctcatgagagcctgcggagccctggcaccctgcccaaccaccccaacttccggctgaagagcagtgaaaatggaaacaagaagaacaacttcctgctgtgtgagcagaccaagcagtacctggccagccaggaggacaacagcgtgagcagcaaccccaacggcatcaatggagaggtggtgggcagcaagggggacaggaagaagctgcctgctggcaacagcgtgagcccccccagcgctgagagcaacagcccccccaaggaggtgaacatcaagccaggcaacaacgtgcggcctgccaagagcaagaagctgaacaagctggtggagaacagcctgagcatcagcaaccctggcctcttcaccagcctgggcccccccctgcggagcaccacctgccaccgctgtggcctgtttggcagcctgcgctgcagccagtgcaagcagacctactactgcagcacagcctgccagaggcgggactggagcgcccacagcatcgtgtgcaggcctgtgcagcccaacttccacaagctggagaacaagagcagcattgagaccaaggatgtggaggtgaacaacaagagtgactgccccctgggcgtgaccaaggagatcgccatctgggccgagcgcatcatgttcagtgacctgcggagcctgcagctgaagaagaccatggagatcaagggcaccgtgacagagttcaagcaccctggggacttctacgtgcagctgtacagcagcgaggtgctggagtacatgaaccagctgagcgccagcctgaaggagacctacgccaacgtgcatgagaaggactacatccctgtgaagggggaggtgtgcatcgccaagtacacagtggaccagacctggaacagagccatcatccagaatgtggatgtgcagcagaagaaggcccacgtgctgtacattgattatggaaatgaggagatcatccccctgaaccgcatctaccacctgaacagaaatattgacctcttccccccctgtgccatcaagtgctttgtggccaacgtcatcccagctgagggcaactggagcagtgactgcatcaaggccaccaagcccctgctgatggagcagtactgcagcatcaagatcgtggacatcctggaggaggaggtggtgacctttgctgtggaggtggagctgcccaacagcggcaagctgctggaccacgtgctgattgagatgggctacggcctgaagcccagcggccaggacagcaagaaggaaaatgctgaccagagcgaccctgaagatgtgggcaagatgaccacagagaacaacatcgtggtggacaagagtgacctgatccccaaggtgctgaccctgaatgtgggagatgagttctgtggggtggtggcccacatccagaccccagaggacttcttctgccagcagctgcagagcggcaggaagctggccgagctgcaggccagcctgagcaagtactgtgaccagctgcccccaagaagtgacttctacccagccatcggggacatctgctgtgcccagttctctggagtgaagcccagcctgggcatctggaccccagaggccatctgcctgatgaagaagctggtgcagaacaagatcatcaccgtgaaggtggtggacaagctggagaacagcagcctggtggagctgattgacaagtctgagacccctcatgtgtctgtgtccaaggtgctgctggatgctggctttgctgtgggggagcagagcatggtgacagacaagcccagtgatgtgaaggagacctctgtgcccctgggcgtggagggcaaggtgaaccccctggagtggacctgggtggagctgggcgtggaccagacagtggatgtggtggtgtgtgtgatctacagccctggagagttctactgccacgtgctgaaggaggatgccctgaagaagctgaatgacctgaacaagagcctggccgagcactgccagcagaagctgcccaacggcttcaaggccgagatcggccagccctgctgtgccttctttgctgacatccagagcaggaacaagcactggagcgaggaggccatcacccgcttccagatgtgtgtggccggcatcaagctgcaggcccgggtggtggaggtgacagaaaatggaattggagtggagctgacagacctgagcacctgctacccccgcatcatcagtgatgtgctgattgatgagcacctggtgctgaagagcgccagcccccacaaggacctgcccaatgaccggctggtgaacaagcatgagctgcaggtgcacgtgcagggcctgcaggccaccagcagcgctgagcagtggaagaccatcgagctgcctgtggacaagaccatccaggccaacgtgctggagatcatcagccccaacctcttctacgccctgcccaagggcatgcctgagaaccaggagaagctgtgcatgctgacagctgagctgctggagtactgcaatgcccccaagagcaggcctccctaccggcccagaattggagatgcctgctgtgccaagtacaccagtgatgacttctggtacagagctgtggtgctgggcaccagtgacacagatgtggaggtgctgtatgctgactatggcaacatcgagaccctgcccctgtgccgggtgcagcccatcaccagcagccacctggccctgcccttccagatcatccgctgcagcctggagggcctgatggagctgaatggcagcagcagccagctgatcatcatgctgctgaagaacttcatgctgaaccagaatgtgatgctgtctgtgaagggcatcaccaagaatgtgcacacagtgtctgtggagaagtgcagtgaaaatggcaccgtggatgtggccgacaagctggtgaccttcggcctggccaagaacatcaccccccagaggcagagcgccctgaacacagagaagatgtacaggatgaactgctgctgcacagagctgcagaagcaggtggagaagcatgagcacatcctgctcttcctgctgaacaacagcaccaaccagaacaagttcatcgagatgaagaagctgctgaagaagacagccagcctgggcggcaagcccctgtag

SEQ ID NO: 335899 - DNA, 3228 bp, Artificial Sequence
  derived and/or modified sequence
atgagcgtgaagagccccttcaacgtgatgagccggaacaacctggaggccccaccatgcaagatgacagagcccttcaacttcgagaagaacgagaataaactgcccccacacgagagcctccgatcaccaggcactctgcctaaccaccccaacttccgtctgaaaagttcggaaaacggcaacaaaaaaaataattttctcctgtgcgaacaaactaaacagtatttggcaagccaggaggataactctgtgagttctaatccaaacggtatcaacggagaggttgtcggctctaagggcgaccgcaagaagctgccagccgggaacagcgtgagtcccccttctgccgaatcaaattctcccccaaaggaggtgaatattaagccaggtaataatgtgcgaccagccaaaagtaagaagttgaacaagcttgtcgaaaactcactgagtatctccaatcccgggctcttcacctccctgggtcctccgttgaggtccacgacgtgccaccgttgcggactttttggctctctgaggtgcagtcagtgtaaacagacctattattgcagcaccgcatgtcaaagaagggactggagtgcgcacagcatcgtttgcagacctgttcaaccaaacttccataagcttgagaataagtctagcatcgaaacaaaggatgtcgaagtcaataataagtcagactgcccactcggagttacaaaagagatcgccatctgggctgagaggatcatgtttagtgatcttagaagtctgcaactaaaaaagaccatggagatcaaagggaccgtgactgaatttaagcaccccggggatttttatgtgcagctgtacagcagcgaggtgctggagtacatgaatcaactttcagctagcctgaaagagacctatgctaacgtgcacgagaaagactatattccagtgaaaggagaggtctgcatcgctaagtacacggttgatcagacttggaaccgcgcaattattcagaacgtggatgtacagcaaaagaaggctcacgttttatatattgactatgggaatgaggaaataatacctctgaatcgcatctatcacctgaaccgaaacattgacttgttccccccgtgtgccattaaatgctttgttgcaaatgtgatccccgcagaaggaaattggtccagcgactgtatcaaagctacaaaacctctgttaatggaacagtactgctctattaagattgtggacatcctcgaggaggaggttgtcacgtttgcggtggaggtagagcttccaaactcaggaaagctcctggaccatgttctcatagagatgggctatggcctcaagccctctggccaggatagcaagaaggaaaacgcagaccagagcgacccagaagatgtcggcaagatgactacggagaacaacattgtcgttgacaagagtgatctgatacctaaagttctgacattgaatgtcggcgatgagttttgcggagtggttgcacatattcagacccccgaggacttcttttgtcaacagctccagagtggccgtaagctcgcagaactgcaagcttccttgtccaagtactgtgatcagctcccacctagatcggacttctaccctgcaattggagacatttgttgcgcacagttctcaggagtcaaaccatccctcgggatttggactcccgaagcaatttgtctcatgaagaaactggtgcagaataagatcatcaccgtcaaagtggttgataaactcgaaaattcttctctcgtagagctcattgacaaatcggaaacaccccatgtcagtgtgtctaaggtgcttctggacgccggctttgcagtgggggaacagtcaatggtaaccgataagcctagcgacgttaaggaaaccagcgtgcccctcggagtagagggaaaagtcaaccctctggagtggacctgggtggagctgggtgtggaccagacagtagacgtggtcgtttgtgtcatttactcccctggcgaattttattgtcacgtgctgaaagaggacgctctcaagaaactgaacgacctaaataaatcacttgctgagcattgccaacagaaactgcccaacggcttcaaagccgagatcggacagccgtgctgtgcgttttttgccgacatccaatcacggaacaagcattggagcgaggaagccattacaaggttccaaatgtgcgtcgcagggatcaagctgcaggcccgggtcgtggaagtcacagaaaatggcatcggtgtggaactgaccgatttaagcacctgttacccaaggatcatctccgatgtattgatagacgagcacttggtccttaaatctgcaagtccacataaagacctgcctaacgatcggctggtcaacaagcacgaactgcaggtccacgtccagggactccaggccacctcttcagcagaacagtggaagacaatcgaactgcctgttgacaagacaatccaggctaacgttctggagatcatttcaccaaatcttttctacgcattacccaagggaatgccggagaaccaagagaagttatgtatgctcaccgccgaactgctggagtattgcaatgcacctaaatcccgtcccccctatcgcccacggatcggggacgcttgttgtgcaaagtacactagcgatgatttttggtaccgtgcagttgtcctgggaactagcgatacggacgtggaggtcttgtacgcagactatggtaacatcgagactcttcccctctgccgggtccagcctatcacaagcagtcatctggcactgccattccagatcatcagatgctcgctcgagggcctcatggagctcaatggcagctcaagccagttaattattatgcttctaaaaaacttcatgctcaaccagaatgtgatgctgagtgtaaagggtatcacaaagaacgtgcatacagtctccgttgagaaatgctccgagaatggcacagtggatgtcgccgacaagcttgtgaccttcggactagccaagaatatcacaccgcaaaggcagtccgctcttaataccgagaagatgtaccgcatgaactgctgctgtacggagctgcagaaacaggtcgagaaacacgaacatattctgctgttcctgctcaataactctacaaatcagaacaagttcatcgaaatgaagaagttgctgaagaagaccgcctcattgggagggaaaccactctag

SEQ ID NO: 335900 - DNA, 3228 bp, Artificial Sequence
  derived and/or modified sequence
atgagcgtgaagtccccttttaacgtcatgagccgaaacaatttggaagccccaccgtgcaagatgaccgaacccttcaactttgagaaaaacgagaacaagttgcccccacacgaatctctcagaagtcctgggactctgccgaaccaccctaattttaggctgaaaagcagcgagaacgggaacaaaaagaacaacttcctgctgtgcgaacaaaccaaacagtatctggccagccaagaggataattccgtgtccagcaatcccaatggaatcaacggtgaagtcgtgggttctaaaggcgatcggaagaaattgcccgcagggaacagcgtgtctcctccttccgccgaaagcaatagcccacccaaggaggttaatatcaaaccagggaataatgtccgtccagccaagtcaaagaagctcaacaagctggtcgaaaattcgctcagcatcagcaaccctggcctcttcacaagccttggccctccgttgcggagtactacctgtcaccgttgtggtctgtttggatctctgcgctgttcacaatgcaagcagacatattattgtagcaccgcctgtcagagacgcgattggtccgcacattcaatcgtttgtcggcctgttcagccgaacttccacaagctggagaacaaatcaagtatcgaaaccaaggacgttgaggtcaataataagtctgattgtcccctgggcgtgacaaaagagatcgccatctgggcagagaggattatgttcagcgacttgcggagccttcagctgaaaaagacgatggaaatcaagggaactgtgaccgaattcaagcatcccggagacttttatgtgcaactgtactcaagcgaagtgctggagtacatgaaccagctctctgctagtctcaaggaaacgtatgctaatgttcatgagaaagactacatccctgtcaaaggagaggtgtgcattgctaaatatacggttgaccagacttggaacagagctatcatccaaaacgtagatgtgcaacagaagaaagcacacgtgctctacattgactatggaaacgaggaaattattccactcaacaggatctatcatctcaaccgaaacatagacctctttccaccttgtgctattaagtgtttcgtggctaatgtaattcctgctgaggggaactggagtagcgactgtatcaaagccacaaagccgctgctaatggaacagtattgttctatcaagattgtggatattctggaggaagaggtggtgacattcgctgtggaggtggagctccccaattccggaaaactgctggaccacgtcttaatcgaaatgggctacggcctgaagcctagcggccaagatagcaaaaaggaaaacgccgatcagagcgatccggaagacgtaggtaagatgactaccgagaataacatagtagtggacaagagcgacctaataccaaaggtgctcactctgaatgtcggcgacgaattctgtggcgtcgtagcccacatccagactccagaggattttttctgtcaacagctacagtctgggaggaaactggcagaactgcaggctagtctgtccaagtactgtgaccagctacctccacgtagcgatttctaccccgcaatcggggacatctgctgcgcacagttctctggggtgaaaccttcactaggcatatggactcctgaggctatatgcctcatgaagaagctggtgcagaataaaatcataacagtgaaagtagtggacaaactggaaaactcaagcctcgtggaattaattgacaagtccgaaaccccccatgtgagtgtttctaaggtgttacttgacgcaggcttcgctgtcggagagcagtccatggtgactgataagcccagcgatgtcaaggagacttcggtccctctgggcgtagagggcaaggtgaatcccctggagtggacttgggtggaattgggggtcgaccaaacagtcgatgtggtggtttgtgtgatttattcaccgggagagttctactgtcacgtcctgaaggaggatgctctgaagaagttgaacgatttgaataagtctttggctgagcattgtcagcagaaactccctaatgggtttaaagccgaaatcggacaaccctgctgcgctttctttgccgacatacaatctagaaacaagcattggtccgaagaggcaatcacaagatttcagatgtgtgttgccggtatcaaacttcaggcaagagtggttgaggtcaccgaaaacgggatcggagtggagttgactgatctgagcacttgttatccaagaattatcagtgacgttttgattgatgagcatctggtcctgaagtctgcctcaccccacaaagaccttcccaatgatcgcctggtgaacaagcacgagcttcaggtccatgtgcaaggcctgcaggccaccagctccgctgagcagtggaaaacgattgagttaccagtggacaaaactatccaggccaatgtcctggagattattagtccaaatcttttttacgcgctgcccaagggcatgccagagaaccaggaaaagctgtgtatgctaacagccgaactgctggagtattgtaacgccccaaagtcaagacctccgtataggccacggattggcgacgcttgctgtgccaagtatacatccgacgacttttggtaccgcgcagtggttctggggacatctgataccgatgtggaggttctgtatgcggactatggaaacatcgaaactcttcccttatgtcgggtgcagcctattacaagctctcacttagccttacctttccagatcattagatgttctctggagggtctgatggagctgaatggctcaagctcgcagcttatcattatgctgctgaagaacttcatgctcaatcagaacgttatgctctcagtgaagggaataacaaagaatgtccacacggtaagcgtagagaaatgttccgagaacgggaccgtggacgtcgccgataagctcgtgacattcgggctggcaaagaatataacgccccagcgacagagcgctctgaataccgagaaaatgtatcgtatgaattgttgttgcacggaattgcagaagcaggtcgaaaagcatgaacatatcctgctattcctcctgaataatagtacaaaccaaaacaagtttatcgaaatgaaaaagcttcttaagaagactgcttccctcggtgggaaacctttgtag

SEQ ID NO: 335901 - DNA, 4168 bp, Artificial Sequence
  derived and/or modified sequence
gctgaggccaggagggcgcactggggattggaggcgagggaagtgcagggcgcatcccaggcggcagggctcccagcatcggcagtcgccatcaccgccagaccgcagagacaggttcggatccgcggtcctcttgcctctttccaggcctcgatgagtgttaaatcgccatttaatgtgatgtcaagaaataatttggaagcacctccttgtaagatgacagagccatttaattttgagaaaaatgaaaacaagcttccaccacatgagtctttaagaagtcctggaacacttcctaaccaccctaatttcaggctgaaaagctcagagaatggaaataaaaagaacaattttttgctttgtgagcaaaccaaacaatatttggctagtcaggaagacaattcagtttcttcaaacccgaatggcatcaacggagaagtagttggctccaaaggagacaggaaaaaattgccagcaggaaactcagtgtcaccaccaagtgctgaaagtaattcaccacccaaagaagtgaatattaagcctggaaataatgtacgtcctgcaaaatcaaaaaaactaaacaagttggtcgagaattccttgtccataagtaatccagggctcttcacctccttaggacctcctcttcggtccacaacttgccatcgctgtggcctatttggatcgctgaggtgctctcagtgcaagcagacctactattgctccacagcatgtcaaagaagagactggtctgcacacagcatcgtgtgcaggcctgttcagccaaatttccacaaacttgaaaataaatcatctattgaaacaaaggatgtggaggtaaacaataagagtgactgtccacttggagttactaaggaaatagccatttgggctgagagaataatgttttctgatttgagaagtctacaactcaagaaaaccatggaaataaagggtacggttaccgaattcaaacacccaggggacttctacgtgcagttatattcttcagaagttttagaatacatgaaccaactctctgccagcttaaaagaaacatatgcaaatgtgcatgaaaaagactatattcctgttaagggggaagtttgtattgccaagtacactgttgatcagacctggaacagagcaatcatacaaaacgttgatgtgcagcaaaagaaggcacatgtcttatatattgattatggaaatgaagaaataattccattaaacagaatttaccacctcaacaggaacattgacttgtttcctccttgtgccataaagtgctttgtagccaatgttatcccagcagaagggaattggagcagtgattgtatcaaagctactaaaccactgttaatggagcagtactgctccataaagattgtcgacatcttggaagaggaagtggttacctttgctgtagaagttgagctgccaaattcaggaaaacttttagaccatgtgcttatagaaatgggatatggcttgaaacccagtggacaagattctaagaaggaaaatgcagatcaaagtgatcctgaagatgttggaaaaatgacaactgaaaacaacattgtcgtagacaaaagtgacctaatcccaaaagtgttaactttgaatgtaggtgatgagttttgtggtgtggttgcccacattcaaacaccagaagacttcttttgtcaacaactgcaaagtggccgaaagcttgctgaacttcaggcatcccttagcaagtactgtgatcagttgcctccacgctctgatttttatccagccattggtgatatatgttgtgctcagttctcaggagtaaagccatcattaggaatttggactccagaagctatttgtctcatgaaaaaacttgtacagaacaaaataatcacagtgaaagtggtggacaagttggaaaacagttccctggtggagcttattgataaatccgagacgcctcatgtcagtgttagcaaagttctcctagatgcaggctttgctgtgggagaacagagtatggtgacagataaacccagtgacgtgaaagaaaccagtgttcccttgggtgtggaaggaaaagtaaatccattggagtggacatgggttgaacttggtgttgaccaaacagtagatgttgtggtctgtgtgatatatagtcctggagaattttattgccatgtgcttaaagaggatgctttaaagaaactcaatgatttgaacaagtcattagcagaacactgccagcagaagttacctaatggtttcaaggcagagataggacaaccttgttgtgctttttttgcagatatacagtctagaaacaaacattggtctgaagaagccataacaagattccagatgtgtgttgctgggataaaattgcaagccagagtggttgaagtcactgaaaatgggataggagttgaactcaccgatctctccacttgttatcccagaataattagtgatgttctgattgatgaacatctggttttaaaatctgcttcaccacataaagacttaccaaatgacagacttgttaataaacatgagcttcaagttcatgtacagggacttcaagctacctcttcagctgagcaatggaagacgatagaattgccagtggataaaactatacaagcaaatgtattagaaatcataagcccaaacttgttttatgctctaccaaaagggatgccagaaaatcaggaaaagctgtgcatgttgacagctgaattattagaatactgcaatgctccgaaaagtcgaccaccctatagaccaagaattggagacgcatgctgtgccaaatacacaagtgatgatttttggtatcgtgcagttgttctggggacatcagacactgatgtggaagtgctctatgcagactatggaaacattgaaaccctgcctctttgcagagtgcaaccaatcacctctagccacctggcgcttcctttccaaattattagatgttcacttgaaggattaatggaattgaatggaagctcttctcaattaataataatgctattaaaaaatttcatgttgaatcagaatgtaatgctttctgtgaaaggaattacaaagaatgtccatacagtgtcagttgagaaatgttctgagaatgggactgtcgatgtagctgataagctagtgacatttggtctggcaaaaaacatcacacctcaaaggcagagtgctttaaatacagaaaagatgtataggatgaattgctgctgcacagagttacagaaacaagttgaaaaacatgaacatattcttctcttcctcttaaacaattcaaccaatcaaaataaatttattgaaatgaaaaaactgttaaaaaaaacagcatctcttggaggtaaacccttatgagacaggaaacagcaaaggctagctttaggagagaaagtacagcacctggtgtttttatttatgagaaccttttctttgtccactttctctgtaatgaccttctatccctccgtttttgcctgcctgccattctcctattaggttggtggtttttattttcctctaagttccttccaccaaataaatattacgtaaaaaattcataccaaatcaatgagaatactggcaaggaatacatagggactttctgctatatatgtaactttttattacttaaaggtaccgaaggaaggccaggtgcagtggctcacgcccagcactttgggaggctgaggtgggaggatcccttgaggccaggagttcaaggttacagtgagctatgatagtgccactgcactccagcctgggtgacagattttgtcttaaaaaaaaaaaaaaaaaagttgatatgagttttattttctgtccgtttgaaatattttgtaatattccctgcattctctgtcgtctgcctcttccacataatgtcctttgctttcatgtttgttatcttctttttctgttcactcagaggtcatcaatttctttctctccgtccttaattggattatttttcttttggcctttgggcacagagtctgacctctggaccactctaactggagaaggaactttatgttccctctcctgctgtgtccacaaccttagaaatctgtagctagatttttgttgttatagatagaatttactgtttctgaaacccaaatacagttatcagtttaaggtt

SEQ ID NO: 335902 - protein, 717 aa, Artificial Sequence
  derived and/or modified sequence
MNQLSASLKETYANVHEKDYIPVKGEVCIAKYTVDQAIKCFVANVIPAEGNWSSDCIKATKPLLMEQYCSIKIVDILEEEVVTFAVEVELPNSGKLLDHVLIEMGYGLKPSGQDSKKENADQSDPEDVGKMTTENNIVVDKSDLIPKVLTLNVGDEFCGVVAHIQTPEDFFCQQLQSGRKLAELQASLSKYCDQLPPRSDFYPAIGDICCAQFSGVKPSLGIWTPEAICLMKKLVQNKIITVKVVDKLENSSLVELIDKSETPHVSVSKVLLDAGFAVGEQSMVTDKPSDVKETSVPLGVEGKVNPLEWTWVELGVDQTVDVVVCVIYSPGEFYCHVLKEDALKKLNDLNKSLAEHCQQKLPNGFKAEIGQPCCAFFAGDGSWYRALVKEILPNGHVKVHFVDYGNIEEVTADELRMISSTFLNLPFQGIRCQLADIQSRNKHWSEEAITRFQMCVAGIKLQARVVEVTENGIGVELTDLSTCYPRIISDVLIDEHLVLKSASPHKDLPNDRLVNKHELQVHVQGLQATSSAEQWKTIELPVDKTIQANVLEIISPNLFYALPKGMPENQEKLCMLTAELLEYCNAPKSRPPYRPRIGDACCAKYTSDDFWYRAVVLGTSDTDVEVLYADYGNIETLPLCRVQPITSSHLALPFQIIRCSLEEKMYRMNCCCTELQKQVEKHEHILLFLLNNSTNQNKFIEMKKLLKKTASLGGKPL

SEQ ID NO: 335903 - DNA, 2154 bp, Artificial Sequence
  derived and/or modified sequence
atgaaccagctgagcgccagcctgaaggagacctacgccaacgtgcacgagaaggactacatccccgtgaagggcgaggtgtgcatcgccaagtacaccgtggaccaggccatcaagtgcttcgtggccaacgtgatccccgccgagggcaactggagcagcgactgcatcaaggccaccaagcccctgctgatggagcagtactgcagcatcaagatcgtggacatcctggaggaggaggtggtgaccttcgccgtggaggtggagctgcccaacagcggcaagctgctggaccacgtgctgatcgagatgggctacggcctgaagcccagcggccaggacagcaagaaggagaacgccgaccagagcgaccccgaggacgtgggcaagatgaccaccgagaacaacatcgtggtggacaagagcgacctgatccccaaggtgctgaccctgaacgtgggcgacgagttctgcggcgtggtggcccacatccagacccccgaggacttcttctgccagcagctgcagagcggcagaaagctggccgagctgcaggccagcctgagcaagtactgcgaccagctgccccccagaagcgacttctaccccgccatcggcgacatctgctgcgcccagttcagcggcgtgaagcccagcctgggcatctggacccccgaggccatctgcctgatgaagaagctggtgcagaacaagatcatcaccgtgaaggtggtggacaagctggagaacagcagcctggtggagctgatcgacaagagcgagaccccccacgtgagcgtgagcaaggtgctgctggacgccggcttcgccgtgggcgagcagagcatggtgaccgacaagcccagcgacgtgaaggagaccagcgtgcccctgggcgtggagggcaaggtgaaccccctggagtggacctgggtggagctgggcgtggaccagaccgtggacgtggtggtgtgcgtgatctacagccccggcgagttctactgccacgtgctgaaggaggacgccctgaagaagctgaacgacctgaacaagagcctggccgagcactgccagcagaagctgcccaacggcttcaaggccgagatcggccagccctgctgcgccttcttcgccggcgacggcagctggtacagagccctggtgaaggagatcctgcccaacggccacgtgaaggtgcacttcgtggactacggcaacatcgaggaggtgaccgccgacgagctgagaatgatcagcagcaccttcctgaacctgcccttccagggcatcagatgccagctggccgacatccagagcagaaacaagcactggagcgaggaggccatcaccagattccagatgtgcgtggccggcatcaagctgcaggccagagtggtggaggtgaccgagaacggcatcggcgtggagctgaccgacctgagcacctgctaccccagaatcatcagcgacgtgctgatcgacgagcacctggtgctgaagagcgccagcccccacaaggacctgcccaacgacagactggtgaacaagcacgagctgcaggtgcacgtgcagggcctgcaggccaccagcagcgccgagcagtggaagaccatcgagctgcccgtggacaagaccatccaggccaacgtgctggagatcatcagccccaacctgttctacgccctgcccaagggcatgcccgagaaccaggagaagctgtgcatgctgaccgccgagctgctggagtactgcaacgcccccaagagcagacccccctacagacccagaatcggcgacgcctgctgcgccaagtacaccagcgacgacttctggtacagagccgtggtgctgggcaccagcgacaccgacgtggaggtgctgtacgccgactacggcaacatcgagaccctgcccctgtgcagagtgcagcccatcaccagcagccacctggccctgcccttccagatcatcagatgcagcctggaggagaagatgtacagaatgaactgctgctgcaccgagctgcagaagcaggtggagaagcacgagcacatcctgctgttcctgctgaacaacagcaccaaccagaacaagttcatcgagatgaagaagctgctgaagaagaccgccagcctgggcggcaagcccctgtag

SEQ ID NO: 335904 - DNA, 2154 bp, Artificial Sequence
  derived and/or modified sequence
atgaaccagcttagtgcctctttgaaagaaacttatgcaaatgtgcatgaaaaagactatattccagtcaagggggaggtctgtatcgccaaatacaccgtcgatcaggccatcaagtgttttgttgcgaacgtcatccccgctgaaggaaactggtctagcgactgcatcaaagcaaccaagcccctgttaatggagcagtactgttcaatcaagatcgttgatatcctagaagaggaagttgtgacattcgcagtggaggtcgagctgcccaattccgggaagttactagaccatgtactaattgagatgggctacggactgaagccctctggtcaggacagtaaaaaagagaacgctgatcagagtgaccctgaggacgttggcaaaatgaccaccgagaacaatatcgtggtcgataagagcgaccttatccccaaagttctcactctgaacgtgggcgacgagttctgtggtgtggtagcgcacatccagactccggaagactttttctgccagcagctccagtcaggacgtaagctggccgaactgcaggcctcactgagcaagtactgtgaccagctgccccctaggagcgatttctacccagcaatcggggatatttgctgcgcccagttctctggcgtgaaaccttcccttggcatttggactccggaagcaatttgtcttatgaagaaactggtgcagaataagattatcaccgtgaaagtggtcgacaaactagaaaactccagtctggtggagctgatcgacaagtccgagactcctcacgttagcgtatctaaagtcctgctggatgctggtttcgccgtgggtgaacagagtatggtgaccgacaagccaagtgatgtaaaagaaacctctgtcccgctcggagtcgaaggcaaagtcaacccgcttgagtggacatgggttgaactcggtgttgaccagacggtggacgtggtagtttgtgtgatttactcccctggagaattttattgccatgtcctcaaggaggatgccctgaagaaattgaacgatcttaataaatccctggcagagcactgccaacagaaactccccaacggcttcaaagcagaaatcggacaaccgtgttgtgcttttttcgccggcgacggctcttggtacagagcactggtgaaggagatactgccaaatggccacgtgaaagttcacttcgtggattatggtaatatagaggaagttacagccgatgagctccgaatgatttcatcgaccttcctcaatttgccctttcaggggatcaggtgtcagctggcggacatacagagcaggaacaagcattggagtgaggaggcaattacaagattccagatgtgcgtggcgggtatcaaattgcaggccagagtggtggaggtcaccgaaaacggaataggagtcgagctgaccgatctgtcaacgtgttacccccggattatctccgatgtgctgattgacgaacatctggtgctcaagagtgcttctccacacaaagatcttcccaacgacaggctggtcaataaacatgaactgcaagtacatgttcaaggacttcaggccacaagttcagctgaacaatggaagaccatagagctgcctgtggacaaaacgattcaggccaatgttctcgaaattatatcccccaacctattttacgccttgcccaagggcatgccagagaatcaggagaaactgtgcatgctgacagccgaactactcgagtactgcaacgcacctaagtcgaggcctccttaccggcctaggatcggagatgcctgttgtgctaagtacacttccgacgacttttggtacagagccgtcgttcttggcacctctgacaccgatgttgaggtcctgtacgccgattacggaaacattgagacacttcccctatgccgggtgcaaccgatcacgagcagtcacctggcgctgcccttccagattatcagatgctccctcgaggaaaagatgtatcgcatgaactgttgttgtaccgaattacagaaacaagttgagaagcatgagcacatccttctgttcttgcttaataacagtaccaaccaaaacaagttcatcgaaatgaaaaagcttctgaaaaaaacggcaagcctcggcggtaagccgctctag

SEQ ID NO: 335905 - DNA, 2154 bp, Artificial Sequence
  derived and/or modified sequence
atgaaccagctgagcgccagcctgaaggagacctacgccaacgtgcatgagaaggactacatccctgtgaagggggaggtgtgcatcgccaagtacacagtggaccaggccatcaagtgctttgtggccaacgtcatcccagctgagggcaactggagcagtgactgcatcaaggccaccaagcccctgctgatggagcagtactgcagcatcaagatcgtggacatcctggaggaggaggtggtgacctttgctgtggaggtggagctgcccaacagcggcaagctgctggaccacgtgctgattgagatgggctacggcctgaagcccagcggccaggacagcaagaaggaaaatgctgaccagagcgaccctgaagatgtgggcaagatgaccacagagaacaacatcgtggtggacaagagtgacctgatccccaaggtgctgaccctgaatgtgggagatgagttctgtggggtggtggcccacatccagaccccagaggacttcttctgccagcagctgcagagcggcaggaagctggccgagctgcaggccagcctgagcaagtactgtgaccagctgccccccaggagtgacttctacccagccatcggggacatctgctgtgcccagttcagcggcgtgaagcccagcctgggcatctggaccccagaggccatctgcctgatgaagaagctggtgcagaacaagatcatcaccgtgaaggtggtggacaagctggagaacagcagcctggtggagctgattgacaagtctgagaccccccacgtgtctgtgtccaaggtgctgctggatgctggctttgctgtgggggagcagagcatggtgacagacaagcccagtgatgtgaaggagacctctgtgcccctgggcgtggagggcaaggtgaaccccctggagtggacctgggtggagctgggcgtggaccagacagtggatgtggtggtgtgtgtgatctacagccctggagagttctactgccacgtgctgaaggaggatgccctgaagaagctgaatgacctgaacaagagcctggccgagcactgccagcagaagctgcccaacggcttcaaggccgagatcggccagccctgctgtgccttctttgctggagatggctcctggtaccgggccctggtgaaggagatcctgcccaacggccacgtgaaggtgcactttgtggactatggcaacatcgaggaggtgacagcagatgagctgaggatgatcagcagcaccttcctgaacctgcccttccagggcatccgctgccagctggccgacatccagagcaggaacaagcactggagcgaggaggccatcacccgcttccagatgtgtgtggccggcatcaagctgcaggcccgggtggtggaggtgacagaaaatggaattggagtggagctgacagacctgagcacctgctacccccgcatcatcagtgatgtgctgattgatgagcacctggtgctgaagagcgccagcccccacaaggacctgcccaatgaccggctggtgaacaagcatgagctgcaggtgcacgtgcagggcctgcaggccaccagcagcgctgagcagtggaagaccatcgagctgcctgtggacaagaccatccaggccaacgtgctggagatcatcagccccaacctcttctacgccctgcccaagggcatgcctgagaaccaggagaagctgtgcatgctgacagctgagctgctggagtactgcaatgcccccaagagcaggcctccctaccggcccagaattggagatgcctgctgtgccaagtacaccagtgatgacttctggtacagagctgtggtgctgggcaccagtgacacagatgtggaggtgctgtatgctgactatggcaacatcgagaccctgcccctgtgccgggtgcagcccatcaccagcagccacctggccctgcccttccagatcatccgctgcagcctggaggagaagatgtacaggatgaactgctgctgcacagagctgcagaagcaggtggagaagcatgagcacatcctgctcttcctgctgaacaacagcaccaaccagaacaagttcatcgagatgaagaagctgctgaagaagacagccagcctgggcggcaagcccctgtag

SEQ ID NO: 335906 - DNA, 2154 bp, Artificial Sequence
  derived and/or modified sequence
atgaaccagctgagcgccagcctgaaggagacctacgccaacgtgcacgagaaggactatattcctgtcaaaggggaggtgtgtattgccaagtataccgtcgatcaggccatcaaatgctttgttgcaaacgtgatccctgccgagggaaattggagcagcgattgtatcaaggctactaagccactgcttatggaacagtattgctccataaagatcgtggacattctggaagaagaggtggttaccttcgctgtggaagtggagctgcctaattctggcaagctgctggatcacgtgctgatagaaatgggttacgggctgaaaccctctggccaggacagtaaaaaagaaaacgccgaccagtcagaccccgaggatgttggcaaaatgaccaccgagaataacatcgtagtggataaatccgatcttatacccaaggtactgacgttgaacgttggcgacgaattttgcggcgttgtcgcccatattcagacgccagaggatttcttctgtcagcagttgcaaagcggtcgaaaacttgcggagctccaggcctccttgtccaagtattgcgaccaactgccacccagaagtgacttttatcccgccatcggtgatatatgttgcgctcagttcagcggggtgaagccatcgctgggaatttggactccagaagccatatgtctgatgaaaaagcttgtccagaataagatcatcaccgtgaaagtagttgataagctcgaaaacagttctcttgtcgagctaatcgataagtccgaaacaccacacgtcagcgtcagtaaagtccttctagacgcagggttcgctgtgggagaacagtccatggttacggacaaaccttcagatgtgaaggaaacaagcgtgcctctcggcgtggagggcaaggtgaatcctttagaatggacatgggtagagttgggcgtggaccaaacagtcgatgtggttgtttgtgtcatatactcaccaggagagttctactgtcatgtcctgaaagaagacgccctcaagaagcttaatgacctgaataagagcctcgcggaacactgtcagcagaaactcccgaatggctttaaagccgaaatcggtcagccatgctgtgccttttttgctggggacgggtcttggtacagggcccttgtaaaagagattctgcctaatggtcatgtcaaagtgcattttgttgattatgggaacatcgaagaggtaactgccgacgaactccggatgattagttcgacctttctgaacctgcctttccagggaatacggtgccagttggccgacatccagtcccgcaacaagcactggagcgaggaagcgataactcggttccagatgtgtgtggctggtattaaacttcaggctagggtggtagaggtgacagaaaacggcatcggcgttgagctaacggatctgtcgacttgttacccacggatcatcagcgatgtactgattgacgagcatcttgtgctaaaaagtgcctctccccataaagacttacccaatgaccgattggtcaataagcatgaactgcaggtgcacgtgcagggacttcaggccactagctccgcagagcagtggaagacaattgaattaccagttgataaaacaattcaagcaaatgttctggagataattagtcccaacctcttctacgcattgcctaaaggaatgcccgagaatcaggaaaagctgtgcatgctgaccgccgaactgttagagtactgtaacgcccccaagtcccggccaccttaccgaccgaggattggggatgcctgctgtgctaagtatacgagtgacgacttttggtatagggccgtcgtcttggggactagcgatacggacgtggaggtcctttacgctgattacgggaacatcgagaccctaccactgtgcagggtccagccgatcacctcaagtcacctggccttgcccttccagataatccgctgcagtttggaggaaaagatgtataggatgaactgctgttgcactgagcttcagaagcaagtggagaaacacgagcacattttacttttcctcctaaacaactcaacaaaccagaataagttcatagagatgaagaaactcctcaagaagacagcgtccctgggcggtaagccgctgtag

SEQ ID NO: 335907 - DNA, 2154 bp, Artificial Sequence
  derived and/or modified sequence
atgaatcagttaagtgcgtccttaaaagaaacctatgccaatgtccatgagaaggattatatcccggtgaagggggaagtgtgtatcgccaagtacacagttgatcaggctataaaatgtttcgtggcaaatgtcatccccgcagagggaaactggtctagcgactgcatcaaagccaccaagccgctcctgatggaacagtactgttccattaagatagttgatattttagaagaggaggtagtgacctttgccgtggaggttgagttgcctaatagcggaaaactgttggaccacgtgctgatcgagatgggctacggcttgaagccaagcgggcaggacagtaagaaggaaaacgctgatcaaagtgatccagaggatgttggcaagatgaccacagagaacaacatcgtggtggacaagagcgacctgattccgaaggtcctcaccctgaatgtcggcgacgaattctgtggagtggtggctcatattcaaactcccgaggattttttttgtcagcaactgcagagcggtagaaagctggccgagctccaagcaagcttatctaaatactgcgaccagctgcctcccaggtccgacttctacccggcaatcggggatatctgctgtgctcagttttcaggtgtgaaaccttccttagggatatggaccccagaggctatttgcctgatgaagaagttggtgcagaacaagattatcacagtgaaggtggtggacaaacttgaaaacagctctttagtggagctaattgacaagagcgagacccctcacgtgtccgtgtccaaagtattgttggacgccggattcgccgtgggtgagcagagcatggtcaccgataaaccgtcggacgtgaaggaaacgagcgtgccacttggagtggagggcaaggtgaatcccttggagtggacatgggtggagttgggtgtcgaccagaccgtggatgtggtcgtgtgcgtgatctattctcccggagaattttattgccacgtgcttaaggaggatgcgcttaagaagctgaacgacctgaataagagtctggctgagcactgtcaacaaaagcttcccaatgggttcaaggctgaaattgggcaaccttgttgtgccttttttgctggcgacggatcttggtaccgcgctttagtgaaggagatactcccgaacggccatgtcaaggtccacttcgtcgattacggaaatatcgaggaagtcactgcagacgagctcaggatgatcagctcaacattcctgaatttgccttttcaggggattcgctgccaactcgccgatatacagagtcggaataaacattggagtgaagaggctatcactcgtttccagatgtgcgttgcgggtatcaaactgcaagcgagggtcgtcgaggtcaccgagaatggtattggagtggagctaaccgacctctccacatgctaccctaggataattagcgacgttctcatcgacgaacatcttgtacttaagtccgccagtccccacaaagatctgccaaacgacagactggtcaataaacacgagctacaggttcacgttcaggggctccaggccacatcatccgcagaacagtggaagacaatcgagcttcctgtcgataaaacaatccaggcaaacgtactcgagatcatttcacccaatctgttttacgcactgccaaagggaatgccggagaatcaggaaaagctctgcatgctgacagcagaactactggaatattgcaatgcgcctaagagtcggcctccttataggcccagaatcggcgacgcctgttgcgcaaagtacacatccgatgatttctggtatcgcgctgtggtgttaggtacctcggatactgacgttgaagtcttatacgccgattatgggaacattgaaaccctccccctctgccgagtccagcctattacatcctcacaccttgccctgccatttcagatcattcggtgcagtctggaagagaaaatgtatcggatgaattgttgctgcactgaacttcagaaacaggtcgaaaagcatgaacacattttgctattcttgttgaacaactccaccaaccaaaacaaattcatagagatgaagaagctgctaaaaaaaaccgcgtcactgggcggaaagccgctgtag

SEQ ID NO: 335908 - DNA, 3967 bp, Artificial Sequence
  derived and/or modified sequence
gctgaggccaggagggcgcactggggattggaggcgagggaagtgcagggcgcatcccaggcggcagggctcccagcatcggcagtcgccatcaccgccagaccgcagagacaggttcggatccgcggtcctcttgcctctttccaggcctcgatgagtgttaaatcgccatttaatgtgatgtcaagaaataatttggaagcacctccttgtaagatgacagagccatttaattttgagaaaaatgaaaacaagcttccaccacatgagtctttaagaagtcctggaacacttcctaaccaccctaatttcaggctgaaaagctcagagaatggaaataaaaagaacaattttttgctttgtgagcaaaccaaacaatatttggctagtcaggaagacaattcagtttcttcaaacccgaatggcatcaacggagaagtagttggctccaaaggagacaggaaaaaattgccagcaggaaactcagtgtcaccaccaagtgctgaaagtaattcaccacccaaagaagtgaatattaagcctggaaataatgtacgtcctgcaaaatcaaaaaaactaaacaagttggtcgagaattccttgtccataagtaatccagggctcttcacctccttaggacctcctcttcggtccacaacttgccatcgctgtggcctatttggatcgctgaggtgctctcagtgcaagcagacctactattgctccacagcatgtcaaagaagagactggtctgcacacagcatcgtgtgcaggcctgttcagccaaatttccacaaacttgaaaataaatcatctattgaaacaaaggatgtggaggtaaacaataagagtgactgtccacttggagttactaaggaaatagccatttgggctgagagaataatgttttctgatttgagaagtctacaactcaagaaaaccatggaaataaagggtacggttaccgaattcaaacacccaggggacttctacgtgcagttatattcttcagaagttttagaatacatgaaccaactctctgccagcttaaaagaaacatatgcaaatgtgcatgaaaaagactatattcctgttaagggggaagtttgtattgccaagtacactgttgatcaggccataaagtgctttgtagccaatgttatcccagcagaagggaattggagcagtgattgtatcaaagctactaaaccactgttaatggagcagtactgctccataaagattgtcgacatcttggaagaggaagtggttacctttgctgtagaagttgagctgccaaattcaggaaaacttttagaccatgtgcttatagaaatgggatatggcttgaaacccagtggacaagattctaagaaggaaaatgcagatcaaagtgatcctgaagatgttggaaaaatgacaactgaaaacaacattgtcgtagacaaaagtgacctaatcccaaaagtgttaactttgaatgtaggtgatgagttttgtggtgtggttgcccacattcaaacaccagaagacttcttttgtcaacaactgcaaagtggccgaaagcttgctgaacttcaggcatcccttagcaagtactgtgatcagttgcctccacgctctgatttttatccagccattggtgatatatgttgtgctcagttctcaggagtaaagccatcattaggaatttggactccagaagctatttgtctcatgaaaaaacttgtacagaacaaaataatcacagtgaaagtggtggacaagttggaaaacagttccctggtggagcttattgataaatccgagacgcctcatgtcagtgttagcaaagttctcctagatgcaggctttgctgtgggagaacagagtatggtgacagataaacccagtgacgtgaaagaaaccagtgttcccttgggtgtggaaggaaaagtaaatccattggagtggacatgggttgaacttggtgttgaccaaacagtagatgttgtggtctgtgtgatatatagtcctggagaattttattgccatgtgcttaaagaggatgctttaaagaaactcaatgatttgaacaagtcattagcagaacactgccagcagaagttacctaatggtttcaaggcagagataggacaaccttgttgtgctttttttgcaggtgatggtagttggtatcgtgctttagtcaaggaaatcttaccaaatggacatgttaaagtacattttgtggattatggaaacatcgaagaagttactgcagatgaactccgaatgatatcatcaacatttttaaaccttccctttcagggaatacggtgccagttagcagatatacagtctagaaacaaacattggtctgaagaagccataacaagattccagatgtgtgttgctgggataaaattgcaagccagagtggttgaagtcactgaaaatgggataggagttgaactcaccgatctctccacttgttatcccagaataattagtgatgttctgattgatgaacatctggttttaaaatctgcttcaccacataaagacttaccaaatgacagacttgttaataaacatgagcttcaagttcatgtacagggacttcaagctacctcttcagctgagcaatggaagacgatagaattgccagtggataaaactatacaagcaaatgtattagaaatcataagcccaaacttgttttatgctctaccaaaagggatgccagaaaatcaggaaaagctgtgcatgttgacagctgaattattagaatactgcaatgctccgaaaagtcgaccaccctatagaccaagaattggagacgcatgctgtgccaaatacacaagtgatgatttttggtatcgtgcagttgttctggggacatcagacactgatgtggaagtgctctatgcagactatggaaacattgaaaccctgcctctttgcagagtgcaaccaatcacctctagccacctggcgcttcctttccaaattattagatgttcacttgaagaaaagatgtataggatgaattgctgctgcacagagttacagaaacaagttgaaaaacatgaacatattcttctcttcctcttaaacaattcaaccaatcaaaataaatttattgaaatgaaaaaactgttaaaaaaaacagcatctcttggaggtaaacccttatgagacaggaaacagcaaaggctagctttaggagagaaagtacagcacctggtgtttttatttatgagaaccttttctttgtccactttctctgtaatgaccttctatccctccgtttttgcctgcctgccattctcctattaggttggtggtttttattttcctctaagttccttccaccaaataaatattacgtaaaaaattcataccaaatcaatgagaatactggcaaggaatacatagggactttctgctatatatgtaactttttattacttaaaggtaccgaaggaaggccaggtgcagtggctcacgcccagcactttgggaggctgaggtgggaggatcccttgaggccaggagttcaaggttacagtgagctatgatagtgccactgcactccagcctgggtgacagattttgtcttaaaaaaaaaaaaaaaaaagttgatatgagttttattttctgtccgtttgaaatattttgtaatattccctgcattctctgtcgtctgcctcttccacataatgtcctttgctttcatgtttgttatcttctttttctgttcactcagaggtcatcaatttctttctctccgtccttaattggattatttttcttttggcctttgggcacagagtctgacctctggaccactctaactggagaaggaactttatgttccctctcctgctgtgtccacaaccttagaaatctgtagctagatttttgttgttatagatagaatttactgtttctgaaacccaaatacagttatcagtttaaggtt

SEQ ID NO: 335909 - protein, 780 aa, Artificial Sequence
  derived and/or modified sequence
MAKRTFSNLETFLIFLLVMMSAITVALLSLLFITSGTIENHKDLGGHFFSTTQSPPATQGSTAAQRSTATQHSTATQSSTATQTSPVPLTPESPLFQNFSGYHIGVGRADCTGQVADINLMGYGKSGQNAQGILTRLYSRAFIMAEPDGSNRTVFVSIDIGMVSQRLRLEVLNRLQSKYGSLYRRDNVILSGTHTHSGPAGYFQYTVFVIASEGFSNQTFQHMVTGILKSIDIAHTNMKPGKIFINKGNVDGVQINRSPYSYLQNPQSERARYSSNTDKEMIVLKMVDLNGDDLGLISWFAIHPVSMNNSNHLVNSDNVGYASYLLEQEKNKGYLPGQGPFVAAFASSNLGDVSPNILGPRCINTGESCDNANSTCPIGGPSMCIAKGPGQDMFDSTQIIGRAMYQRAKELYASASQEVTGPLASAHQWVDMTDVTVWLNSTHASKTCKPALGYSFAAGTIDGVGGLNFTQGKTEGDPFWDTIRDQILGKPSEEIKECHKPKPILLHTGELSKPHPWHPDIVDVQIITLGSLAITAIPGEFTTMSGRRLREAVQAEFASHGMQNMTVVISGLCNVYTHYITTYEEYQAQRYEAASTIYGPHTLSAYIQLFRNLAKAIATDTVANLSRGPEPPFFKQLIVPLIPSIVDRAPKGRTFGDVLQPAKPEYRVGEVAEVIFVGANPKNSVQNQTHQTFLTVEKYEATSTSWQIVCNDASWETRFYWHKGLLGLSNATVEWHIPDTAQPGIYRIRYFGHNRKQDILKPAVILSFEGTSPAFEVVTI

SEQ ID NO: 335910 - protein, 622 aa, Artificial Sequence
  derived and/or modified sequence
MDSEKSSEWRSDVLNRLQSKYGSLYRRDNVILSGTHTHSGPAGYFQYTVFVIASEGFSNQTFQHMVTGILKSIDIAHTNMKPGKIFINKGNVDGVQINRSPYSYLQNPQSERARYSSNTDKEMIVLKMVDLNGDDLGLISWFAIHPVSMNNSNHLVNSDNVGYASYLLEQEKNKGYLPGQGPFVAAFASSNLGDVSPNILGPRCINTGESCDNANSTCPIGGPSMCIAKGPGQDMFDSTQIIGRAMYQRAKELYASASQEVTGPLASAHQWVDMTDVTVWLNSTHASKTCKPALGYSFAAGTIDGVGGLNFTQGKTEGDPFWDTIRDQILGKPSEEIKECHKPKPILLHTGELSKPHPWHPDIVDVQIITLGSLAITAIPGEFTTMSGRRLREAVQAEFASHGMQNMTVVISGLCNVYTHYITTYEEYQAQRYEAASTIYGPHTLSAYIQLFRNLAKAIATDTVANLSRGPEPPFFKQLIVPLIPSIVDRAPKGRTFGDVLQPAKPEYRVGEVAEVIFVGANPKNSVQNQTHQTFLTVEKYEATSTSWQIVCNDASWETRFYWHKGLLGLSNATVEWHIPDTAQPGIYRIRYFGHNRKQDILKPAVILSFEGTSPAFEVVTI

SEQ ID NO: 335911 - protein, 160 aa, Artificial Sequence
  derived and/or modified sequence
MVANLSRGPEPPFFKQLIVPLIPSIVDRAPKGRTFGDVLQPAKPEYRVGEVAEVIFVGANPKNSVQNQTHQTFLTVEKYEATSTSWQIVCNDASWETRFYWHKGLLGLSNATVEWHIPDTAQPGIYRIRYFGHNRKQDILKPAVILSFEGTSPAFEVVTI

SEQ ID NO: 335912 - protein, 610 aa, Artificial Sequence
  derived and/or modified sequence
VLNRLQSKYGSLYRRDNVILSGTHTHSGPAGYFQYTVFVIASEGFSNQTFQHMVTGILKSIDIAHTNMKPGKIFINKGNVDGVQINRSPYSYLQNPQSERARYSSNTDKEMIVLKMVDLNGDDLGLISWFAIHPVSMNNSNHLVNSDNVGYASYLLEQEKNKGYLPGQGPFVAAFSSSNLGDVSPNILGPRCINTGESCDNANSTCPIGGPSMCIAKGPGQDMFDSTQIIGRAMYQRAKELYASASQEVTGPLASAHQWVDMTDVTVWLNSTHASKTCKPALGYSFAAGTIDGVGGLNFTQGKTEGDPFWDTIRDQILGKPSEEIKECHKPKPILLHTGELSKPHPWHPDIVDVQIITLGSLAITAIPGEFTTMSGRRLREAVQAEFASHGMQNMTVVISGLCNVYTHYITTYEEYQAQRYEAASTIYGPHTLSAYIQLFRNLAKAIATDTVANLSRGPEPPFFKQLIVPLIPSIVDRAPKGRTFGDVLQPAKPEYRVGEVAEVIFVGANPKNSVQNQNHQTFLTVEKYEATSTSWQIVCNDASWETRFYWHKGLLGLSNATVEWHIPDTAQPGIYRIRYFGHNRKQDILKPAVILSFEGTSPAFEVVTI

SEQ ID NO: 335913 - protein, 622 aa, Artificial Sequence
  derived and/or modified sequence
MDSEKSSEWRSDVLNRLQSKYGSLYRRDNVILSGTHTHSGPAGYFQYTVFVIASEGFSNQTFQHMVTGILKSIDIAHTNMKPGKIFINKGNVDGVQINRSPYSYLQNPQSERARYSSNTDKEMIVLKMVDLNGDDLGLISWFAIHPVSMNNSNHLVNSDNVGYASYLLEQEKNKGYLPGQGPFVAAFSSSNLGDVSPNILGPRCINTGESCDNANSTCPIGGPSMCIAKGPGQDMFDSTQIIGRAMYQRAKELYASASQEVTGPLASAHQWVDMTDVTVWLNSTHASKTCKPALGYSFAAGTIDGVGGLNFTQGKTEGDPFWDTIRDQILGKPSEEIKECHKPKPILLHTGELSKPHPWHPDIVDVQIITLGSLAITAIPGEFTTMSGRRLREAVQAEFASHGMQNMTVVISGLCNVYTHYITTYEEYQAQRYEAASTIYGPHTLSAYIQLFRNLAKAIATDTVANLSRGPEPPFFKQLIVPLIPSIVDRAPKGRTFGDVLQPAKPEYRVGEVAEVIFVGANPKNSVQNQNHQTFLTVEKYEATSTSWQIVCNDASWETRFYWHKGLLGLSNATVEWHIPDTAQPGIYRIRYFGHNRKQDILKPAVILSFEGTSPAFEVVTI

SEQ ID NO: 335914 - DNA, 2343 bp, Artificial Sequence
  derived and/or modified sequence
atggccaagagaaccttcagcaacctggagaccttcctgatcttcctgctggtgatgatgagcgccatcaccgtggccctgctgagcctgctgttcatcaccagcggcaccatcgagaaccacaaggacctgggcggccacttcttcagcaccacccagagcccccccgccacccagggcagcaccgccgcccagagaagcaccgccacccagcacagcaccgccacccagagcagcaccgccacccagaccagccccgtgcccctgacccccgagagccccctgttccagaacttcagcggctaccacatcggcgtgggcagagccgactgcaccggccaggtggccgacatcaacctgatgggctacggcaagagcggccagaacgcccagggcatcctgaccagactgtacagcagagccttcatcatggccgagcccgacggcagcaacagaaccgtgttcgtgagcatcgacatcggcatggtgagccagagactgagactggaggtgctgaacagactgcagagcaagtacggcagcctgtacagaagagacaacgtgatcctgagcggcacccacacccacagcggccccgccggctacttccagtacaccgtgttcgtgatcgccagcgagggcttcagcaaccagaccttccagcacatggtgaccggcatcctgaagagcatcgacatcgcccacaccaacatgaagcccggcaagatcttcatcaacaagggcaacgtggacggcgtgcagatcaacagaagcccctacagctacctgcagaacccccagagcgagagagccagatacagcagcaacaccgacaaggagatgatcgtgctgaagatggtggacctgaacggcgacgacctgggcctgatcagctggttcgccatccaccccgtgagcatgaacaacagcaaccacctggtgaacagcgacaacgtgggctacgccagctacctgctggagcaggagaagaacaagggctacctgcccggccagggccccttcgtggccgccttcgccagcagcaacctgggcgacgtgagccccaacatcctgggccccagatgcatcaacaccggcgagagctgcgacaacgccaacagcacctgccccatcggcggccccagcatgtgcatcgccaagggccccggccaggacatgttcgacagcacccagatcatcggcagagccatgtaccagagagccaaggagctgtacgccagcgccagccaggaggtgaccggccccctggccagcgcccaccagtgggtggacatgaccgacgtgaccgtgtggctgaacagcacccacgccagcaagacctgcaagcccgccctgggctacagcttcgccgccggcaccatcgacggcgtgggcggcctgaacttcacccagggcaagaccgagggcgaccccttctgggacaccatcagagaccagatcctgggcaagcccagcgaggagatcaaggagtgccacaagcccaagcccatcctgctgcacaccggcgagctgagcaagccccacccctggcaccccgacatcgtggacgtgcagatcatcaccctgggcagcctggccatcaccgccatccccggcgagttcaccaccatgagcggcagaagactgagagaggccgtgcaggccgagttcgccagccacggcatgcagaacatgaccgtggtgatcagcggcctgtgcaacgtgtacacccactacatcaccacctacgaggagtaccaggcccagagatacgaggccgccagcaccatctacggcccccacaccctgagcgcctacatccagctgttcagaaacctggccaaggccatcgccaccgacaccgtggccaacctgagcagaggccccgagccccccttcttcaagcagctgatcgtgcccctgatccccagcatcgtggacagagcccccaagggcagaaccttcggcgacgtgctgcagcccgccaagcccgagtacagagtgggcgaggtggccgaggtgatcttcgtgggcgccaaccccaagaacagcgtgcagaaccagacccaccagaccttcctgaccgtggagaagtacgaggccaccagcaccagctggcagatcgtgtgcaacgacgccagctgggagaccagattctactggcacaagggcctgctgggcctgagcaacgccaccgtggagtggcacatccccgacaccgcccagcccggcatctacagaatcagatacttcggccacaacagaaagcaggacatcctgaagcccgccgtgatcctgagcttcgagggcaccagccccgccttcgaggtggtgaccatctag

SEQ ID NO: 335915 - DNA, 1869 bp, Artificial Sequence
  derived and/or modified sequence
atggacagcgagaagagcagcgagtggagaagcgacgtgctgaacagactgcagagcaagtacggcagcctgtacagaagagacaacgtgatcctgagcggcacccacacccacagcggccccgccggctacttccagtacaccgtgttcgtgatcgccagcgagggcttcagcaaccagaccttccagcacatggtgaccggcatcctgaagagcatcgacatcgcccacaccaacatgaagcccggcaagatcttcatcaacaagggcaacgtggacggcgtgcagatcaacagaagcccctacagctacctgcagaacccccagagcgagagagccagatacagcagcaacaccgacaaggagatgatcgtgctgaagatggtggacctgaacggcgacgacctgggcctgatcagctggttcgccatccaccccgtgagcatgaacaacagcaaccacctggtgaacagcgacaacgtgggctacgccagctacctgctggagcaggagaagaacaagggctacctgcccggccagggccccttcgtggccgccttcgccagcagcaacctgggcgacgtgagccccaacatcctgggccccagatgcatcaacaccggcgagagctgcgacaacgccaacagcacctgccccatcggcggccccagcatgtgcatcgccaagggccccggccaggacatgttcgacagcacccagatcatcggcagagccatgtaccagagagccaaggagctgtacgccagcgccagccaggaggtgaccggccccctggccagcgcccaccagtgggtggacatgaccgacgtgaccgtgtggctgaacagcacccacgccagcaagacctgcaagcccgccctgggctacagcttcgccgccggcaccatcgacggcgtgggcggcctgaacttcacccagggcaagaccgagggcgaccccttctgggacaccatcagagaccagatcctgggcaagcccagcgaggagatcaaggagtgccacaagcccaagcccatcctgctgcacaccggcgagctgagcaagccccacccctggcaccccgacatcgtggacgtgcagatcatcaccctgggcagcctggccatcaccgccatccccggcgagttcaccaccatgagcggcagaagactgagagaggccgtgcaggccgagttcgccagccacggcatgcagaacatgaccgtggtgatcagcggcctgtgcaacgtgtacacccactacatcaccacctacgaggagtaccaggcccagagatacgaggccgccagcaccatctacggcccccacaccctgagcgcctacatccagctgttcagaaacctggccaaggccatcgccaccgacaccgtggccaacctgagcagaggccccgagccccccttcttcaagcagctgatcgtgcccctgatccccagcatcgtggacagagcccccaagggcagaaccttcggcgacgtgctgcagcccgccaagcccgagtacagagtgggcgaggtggccgaggtgatcttcgtgggcgccaaccccaagaacagcgtgcagaaccagacccaccagaccttcctgaccgtggagaagtacgaggccaccagcaccagctggcagatcgtgtgcaacgacgccagctgggagaccagattctactggcacaagggcctgctgggcctgagcaacgccaccgtggagtggcacatccccgacaccgcccagcccggcatctacagaatcagatacttcggccacaacagaaagcaggacatcctgaagcccgccgtgatcctgagcttcgagggcaccagccccgccttcgaggtggtgaccatctag

SEQ ID NO: 335916 - DNA, 2343 bp, Artificial Sequence
  derived and/or modified sequence
atggcaaagcgcaccttttccaatctggaaaccttcctgatttttctgctcgtgatgatgagcgccatcaccgtggcacttctcagcttactcttcataacctccggtaccatcgagaatcataaagatctaggggggcattttttctccactacacagtcaccccctgctactcagggatctactgcagcccagagatccacggccacgcagcatagtaccgcaacccagtcctcaaccgctacccaaacgtctccagtccccctgacgccggaatctcccctcttccagaacttctccggctatcacatcggtgtgggaagggccgactgcacagggcaggtggcggacataaacttgatgggctatggtaagagcggccaaaatgcacagggaatcctaacacggctttacagcagagcattcatcatggctgaacccgacggatcaaacagaactgtctttgtctcaatagacattgggatggtatcacagagactgcggctagaagttctcaataggctgcagtccaagtacggaagcctttatcgcagagacaatgtgattctctcaggcacacacacacattctgggcccgccggctatttccaatacaccgtattcgtgatcgcctccgaaggattctcgaaccaaacatttcagcacatggttacaggcatcctcaaatcaatcgatattgcacacactaatatgaagccagggaagatctttattaacaaagggaacgtggacggcgtgcagatcaataggtctccgtatagctacctgcagaacccccagtctgagagggctagatactcaagtaacacagataaggaaatgattgttctgaagatggtagatcttaacggcgatgacctgggactgatcagctggttcgccatccaccctgtgtccatgaataattcaaaccacctggtgaatagcgacaatgttgggtacgcgtcataccttctcgagcaggagaaaaacaagggctatcttccaggacaggggccatttgtggcggctttcgcctcatccaacctgggggacgtctcacccaacatactgggtcctaggtgcataaacaccggcgaatcctgtgataatgctaacagcacctgccccatcggaggtccttctatgtgcatcgccaaagggccgggacaggatatgtttgacagcactcaaataatcggtcgtgccatgtaccagcgtgccaaagagttgtacgcttccgcctcacaagaagtgacaggcccgctggcaagtgctcaccagtgggtcgacatgaccgacgtgactgtgtggctaaactccacacacgcctctaaaacatgcaagccagccctagggtattctttcgcagcaggtacaattgacggagtgggaggtctgaatttcacccaaggcaagaccgaaggcgatcctttctgggacaccatccgggaccagatcctgggaaagcctagcgaggaaattaaagagtgtcacaagccgaagcctattctgcttcacactggcgagctttcaaaacctcatccctggcaccctgatatcgtggacgtccaaataattaccctcggctccttagcaattacagcaattccaggcgagtttacgacaatgtctgggaggcgtcttcgcgaggccgtgcaggctgagtttgcaagtcatggaatgcagaacatgacagttgtcatcagcggtctctgtaacgtgtatactcattacatcaccacgtacgaggagtaccaggcgcaaaggtacgaagctgcctcaacaatctacggcccccataccttgtcagcttacatacagttatttcggaatctggctaaggccattgctaccgacaccgtggctaatctttcacggggccccgaaccacctttctttaagcaactgatcgtccccctgatcccaagcatcgtggatcgagctcctaagggcagaacctttggagacgtgctccagcctgctaagccagaataccgggtgggcgaagtagctgaggtgatatttgtgggcgctaatccgaaaaattccgtgcagaatcaaacacatcaaaccttcttaaccgtcgagaagtatgaggctacgtccacaagttggcagatcgtgtgtaacgatgctagttgggaaacaagattctattggcacaagggactgttgggccttagcaatgctactgttgaatggcacatccccgatacagcacagcccgggatataccgtatcagatactttggacataaccgcaagcaggatattctcaagcctgcggtgatcctttcttttgaaggcaccagtccggccttcgaggtagtgaccatctag

SEQ ID NO: 335917 - DNA, 1869 bp, Artificial Sequence
  derived and/or modified sequence
atggattccgaaaagtcgagcgaatggagatcagatgtgcttaaccgcctccaaagcaaatacgggagcctgtatagaagagataatgtgatcttgtctggcacacatacccacagtggaccagctggatacttccaatacacagtgttcgtaattgcctcagaagggttctcaaaccagacgtttcagcacatggtgaccggaattttgaagtcaatcgatattgcgcacacaaacatgaaacctggaaaaatctttatcaacaaaggaaacgtcgatggcgtgcagatcaacaggagtccttacagctacctccaaaatccacagagcgaaagggcccgctattccagtaacactgataaagaaatgatagtgttgaagatggtggacctgaatggggacgatctgggcttaatatcctggttcgcgatccacccagtgagcatgaacaacagcaatcatctagtgaatagcgacaacgtgggctacgcatcctatctcctcgaacaggagaagaacaaggggtaccttcccgggcaaggccctttcgtggcggctttcgcctcgtccaatcttggcgatgtatctcccaacattctcggccctcggtgcatcaacaccggggaatcatgcgataatgcaaactcgacatgccccattggagggccctccatgtgcattgctaagggtcccgggcaggacatgtttgatagcacccaaattattgggcgagcaatgtaccagagggctaaagaactatatgcctctgcctcgcaagaagtgacaggccctctagccagcgcacatcaatgggttgatatgactgatgtaaccgtctggcttaacagcacccatgccagtaaaacatgtaagcccgctcttgggtactcattcgccgccgggactatcgatggcgttggcggtctgaatttcactcaaggaaagacggaaggggatccgttctgggataccataagggatcagatattagggaaaccatccgaggagataaaggaatgccacaagccaaagcccatcctgcttcacacaggtgagctgtcaaagcctcacccctggcatccagacattgtggatgtccagattatcacgctggggagcctcgcaatcaccgcaattccgggcgaattcacaaccatgtctggacgtaggctgcgcgaagcagtgcaggcggaatttgcgtctcatgggatgcagaatatgacggtagttattagtgggctgtgtaatgtctatacccactacataaccacatacgaggaatatcaggcccaaaggtacgaagccgcttcaacaatttacgggccgcacactctgtccgcctacatccagttattccgcaacctggccaaagcaatcgccaccgatacagtagccaacctctcgaggggccctgaaccaccgtttttcaagcagctgattgtgcctctgatcccttccatagtggatcgtgcccccaagggtaggacattcggagatgttctgcagccagccaaaccggaatatcgagtgggagaggtcgccgaagtaatctttgtgggcgccaacccaaagaactccgtgcagaatcagactcaccagacttttctgacggtagagaagtacgaggccacttccacgtcatggcagattgtgtgtaatgatgcttcctgggaaacccgcttttactggcacaaggggctgctgggtctgagcaatgccaccgtagaatggcatatccctgataccgcccaacccgggatctataggatcaggtattttgggcacaatcgaaagcaggatatactgaaacccgctgtcatcctgagctttgagggaaccagccctgccttcgaagtcgtgacaatttag

SEQ ID NO: 335918 - DNA, 2343 bp, Artificial Sequence
  derived and/or modified sequence
atggccaagaggaccttcagcaacctggagaccttcctgatcttcctgctggtgatgatgtctgccatcaccgtggccctgctgagcctgctcttcatcaccagcggcaccatcgagaaccacaaggacctgggcggccacttcttcagcaccacccagagccccccagccacccagggcagcacagctgcccagaggagcacagccacccagcacagcacagccacccagagcagcacagccacccagaccagccctgtgcccctgaccccagagagccccctcttccagaacttcagcggctaccacatcggcgtgggccgggctgactgcaccggccaggtggccgacatcaacctgatgggctacggcaagagcggccagaatgcccagggcatcctgacccggctgtacagccgggccttcatcatggccgagccagatggcagcaacagaacagtgtttgtgtccattgacatcggcatggtgtcccagaggctgcggctggaggtgctgaaccggctgcagagcaaatatggcagcctgtaccgccgggacaacgtcatcctgagcggcacccacacccacagcggccctgctggctacttccagtacacagtgtttgtgattgccagcgagggcttcagcaaccagaccttccagcacatggtgacaggcatcctgaagagcattgatattgcccacaccaacatgaagccaggcaagatcttcatcaacaagggaaatgtggatggagtgcagatcaacagaagcccctacagctacctgcagaacccccagagcgagcgggcccgctacagcagcaacacagacaaggagatgattgtgctgaagatggtggacctgaatggagatgacctgggcctcatctcctggtttgccatccaccctgtgtccatgaacaacagcaaccacctggtgaacagcgacaacgtgggctacgccagctacctgctggagcaggagaagaacaagggctacctgcccggccagggcccctttgtggccgcctttgccagcagcaacctgggagatgtgagccccaacatcctgggcccccgctgcatcaacacaggagagagctgtgacaatgccaacagcacctgccccatcggcggccccagcatgtgcatcgccaagggccctggccaggacatgtttgacagcacccagatcatcggccgggccatgtaccagagggccaaggagctgtatgccagcgccagccaggaggtgacaggccccctggccagcgcccaccagtgggtggacatgacagatgtgacagtgtggctgaacagcacccacgccagcaagacctgcaagccagccctgggctacagctttgctgctggcaccattgatggagtgggcggcctgaacttcacccagggcaagacagaaggagaccccttctgggacaccatccgggaccagatcctgggcaagcccagcgaggagatcaaggagtgccacaagcccaagcccatcctgctgcacactggagagctgagcaagccccacccctggcacccagacatcgtggatgtgcagatcatcaccctgggcagcctggccatcacagccatccctggagagttcaccaccatgtctggaagaaggctgcgggaggccgtgcaggccgagtttgccagccacggcatgcagaacatgacagtggtgatcagcggcctgtgcaatgtgtacacccactacatcaccacctatgaggagtaccaggcccagagatatgaagctgccagcaccatctacggcccccacaccctgagcgcctacatccagctgttcaggaacctggccaaggccatcgccacagacacagtggccaacctgagccggggccctgagccccccttcttcaagcagctgattgtgcccctcatccccagcatcgtggaccgggcccccaagggccgcacctttggagatgtgctgcagcctgccaagccagagtacagagtgggggaggtggccgaggtgatctttgtgggcgccaaccccaagaacagcgtgcagaaccagacccaccagaccttcctgactgtggagaagtatgaggccaccagcacctcctggcagatcgtgtgcaatgatgcctcctgggagacccgcttctactggcacaagggcctgctgggcctgagcaatgccaccgtggagtggcacatcccagacacagcccagcccggcatctaccgcatccgctacttcggccacaacaggaagcaggacatcctgaagccagctgtgatcctgagctttgagggcaccagccctgcctttgaggtggtgaccatctag

SEQ ID NO: 335919 - DNA, 1869 bp, Artificial Sequence
  derived and/or modified sequence
atggattctgagaagagcagcgagtggaggagtgatgtgctgaaccggctgcagagcaaatatggcagcctgtaccgccgggacaacgtcatcctgagcggcacccacacccacagcggccctgctggctacttccagtacacagtgtttgtgattgccagcgagggcttcagcaaccagaccttccagcacatggtgacaggcatcctgaagagcattgatattgcccacaccaacatgaagccaggcaagatcttcatcaacaagggaaatgtggatggagtgcagatcaacagaagcccctacagctacctgcagaacccccagagcgagcgggcccgctacagcagcaacacagacaaggagatgattgtgctgaagatggtggacctgaatggagatgacctgggcctcatctcctggtttgccatccaccctgtgtccatgaacaacagcaaccacctggtgaacagcgacaacgtgggctacgccagctacctgctggagcaggagaagaacaagggctacctgcccggccagggcccctttgtggccgcctttgccagcagcaacctgggagatgtgagccccaacatcctgggcccccgctgcatcaacacaggagagagctgtgacaatgccaacagcacctgccccatcggcggccccagcatgtgcatcgccaagggccctggccaggacatgtttgacagcacccagatcatcggccgggccatgtaccagagggccaaggagctgtatgccagcgccagccaggaggtgacaggccccctggccagcgcccaccagtgggtggacatgacagatgtgacagtgtggctgaacagcacccacgccagcaagacctgcaagccagccctgggctacagctttgctgctggcaccattgatggagtgggcggcctgaacttcacccagggcaagacagaaggagaccccttctgggacaccatccgggaccagatcctgggcaagcccagcgaggagatcaaggagtgccacaagcccaagcccatcctgctgcacactggagagctgagcaagccccacccctggcacccagacatcgtggatgtgcagatcatcaccctgggcagcctggccatcacagccatccctggagagttcaccaccatgtctggaagaaggctgcgggaggccgtgcaggccgagtttgccagccacggcatgcagaacatgacagtggtgatcagcggcctgtgcaatgtgtacacccactacatcaccacctatgaggagtaccaggcccagagatatgaagctgccagcaccatctacggcccccacaccctgagcgcctacatccagctgttcaggaacctggccaaggccatcgccacagacacagtggccaacctgagccggggccctgagccccccttcttcaagcagctgattgtgcccctcatccccagcatcgtggaccgggcccccaagggccgcacctttggagatgtgctgcagcctgccaagccagagtacagagtgggggaggtggccgaggtgatctttgtgggcgccaaccccaagaacagcgtgcagaaccagacccaccagaccttcctgactgtggagaagtatgaggccaccagcacctcctggcagatcgtgtgcaatgatgcctcctgggagacccgcttctactggcacaagggcctgctgggcctgagcaatgccaccgtggagtggcacatcccagacacagcccagcccggcatctaccgcatccgctacttcggccacaacaggaagcaggacatcctgaagccagctgtgatcctgagctttgagggcaccagccctgcctttgaggtggtgaccatctag

SEQ ID NO: 335920 - DNA, 4797 bp, Artificial Sequence
  derived and/or modified sequence
atggccaaacgcaccttctctaacttggagacattcctgattttcctccttgtaatgatgagtgccatcacagtggcccttctcagcctcttgtttatcaccagtgggaccattgaaaaccacaaagatttaggaggccattttttttcaaccacccaaagccctccagccacccagggctccacagctgcccaacgctccacagccacccagcattccacagccacccagagctccacagccactcaaacttctccagtgcctttaaccccagagtctcctctatttcagaacttcagtggctaccatattggtgttggacgagctgactgcacaggacaagtagcagatatcaatttgatgggctatggcaaatccggccagaatgcacagggcatcctcaccaggctatacagtcgtgccttcatcatggcagaacctgatgggtccaatcgaacagtgtttgtcagcatcgacataggcatggtatcacaaaggctcaggctggaggtcctgaacagactgcagagtaaatatggctccctgtacagaagagataatgtcatcctgagtggcactcacactcattcaggtcctgcaggatatttccagtataccgtgtttgtaattgccagtgaaggatttagcaatcaaacttttcagcacatggtcactggtatcttgaagagcattgacatagcacacacaaatatgaaaccaggcaaaatcttcatcaataaaggaaatgtggatggtgtgcagatcaacagaagtccgtattcttaccttcaaaatccgcagtcagagagagcaaggtattcttcaaatacagacaaggaaatgatagttttgaaaatggtagatttgaatggagatgacttgggccttatcagctggtttgccatccacccggtcagcatgaacaacagtaaccatcttgtaaacagtgacaatgtgggctatgcatcttacctgcttgagcaagagaagaacaaaggatatctacctggacaggggccatttgtagcagcctttgcttcatcaaacctaggagatgtgtcccccaacattcttggaccacgttgcatcaacacaggagagtcctgtgataacgccaatagcacttgtcccattggtgggcctagcatgtgcattgctaagggacctggacaggatatgtttgacagcacacaaattataggacgggccatgtatcagagagcaaaggaactctatgcctctgcctcccaggaggtaacaggaccactggcttcagcacaccagtgggtggatatgacagatgtgactgtctggctcaattccacacatgcatcaaaaacatgtaaaccagcattgggctacagttttgcagctggcactattgatggagttggaggcctcaattttacacaggggaaaacagaaggggatccattttgggacaccattcgggaccagatcctgggaaagccatctgaagaaattaaagaatgtcataaaccaaagcccatccttcttcacaccggagaactatcaaaacctcacccctggcatccagacattgttgatgttcagattattacccttgggtccttggccataactgccatccccggggagtttacgaccatgtctggacgaagacttcgagaggcagttcaagcagaatttgcatctcatgggatgcagaacatgactgttgttatttcaggtctatgcaacgtctatacacattacattaccacttatgaagaataccaggctcagcgatatgaggcagcatcgacaatttatggaccgcacacattatctgcttacattcagctcttcagaaaccttgctaaggctattgctacggacacggtagccaacctgagcagaggtccagaacctccctttttcaaacaattaatagttccattaattcctagtattgtggatagagcaccaaaaggcagaactttcggggatgtcctgcagccagcaaaacctgaatacagagtgggggaagttgctgaagttatatttgtaggtgctaacccgaagaattcagtacaaaaccagacccatcagaccttcctcactgtggagaaatatgaggctacttcaacatcgtggcagatagtgtgtaatgatgcctcctgggagactcgtttttattggcacaagggactcctgggtctgagtaatgcaacagtggaatggcatattccagacactgcccagcctggaatctacagaataagatattttggacacaatcggaagcaggacattctgaagcctgctgtcatactttcatttgaaggcacttccccggcttttgaagttgtaactatttagtgaaaagttgatagatcatttaaagaacagctttactctctacacattatataagtgatttcaaatgaatgtgaactagtgaactaccatgttgacttctataatcgtccctgtttggggacagatagtttactgctaatggggtggaggggtgtgtgtgtgtgtgtgtgtgtgtgtgtgtgtgtgtgtgtgtgtgagagagagagagagagagagagagagagagagaggtttgtcccatatatcttgctccagcagccatatatcttgtggtctacagcctaaagcatgatttcccttgaagtcttggggttgtttaaaggagagtcccttcaatataaaacctctgaaatattagtgagaatggctcactaatgtgaacaatgtttaaattatttatttatatatagaattactgaatattagtactgggaaaatttatagaaatcatctagtcttacccttcatcttacatataagaaaaatggtcttttcttctaatcacatttacaaaatatgatataaaccttgaccatgaatgtatgagcctaattagagaaacagaaaatcagcatgtcagttttccttcattcaaaataacatagtctttctaagcagtcattctggagttaacatgcctagttcagagccgctgtggatgctcaaatcatttctggaattgccttcaggacacaattatgagaaagtcagacttccaatattttgatcatgccttgtgttttcctaagtgtccttatcccactggattgtgtctcttactcccaagacttattccaaatgattttttgactcttttcattaatcaaattcaccccaaaccagaaagttttgccattagtgtagatattaaaaatattactggctgggaaagcactcctcaaagcagaggttctaaattaatttatctgttcttttaccatttgctcactcactcactcatggacccattcaatcatagaatatttaagatttatatgcccagaattataatagtgcctaggccttgataattagtgaatttgtacttggggtgaatgtgtaagtgtcaaaaggtaactattatgaaggagaaaataatcgatttaatatgtaaattctggggaagcatttaaaaaatcagtaatcttcaagttatatcttgtgtatcatctgtgttggatactctaatttggggggaaagaggctccagacagtttgctaaatactattttgaaagttatttttgggcattgtaaaataccttgcttcataccccaaagaataagatatgacagtctgacatcgattgtctgaaagtactaattgcatttaaaattctttaagttaactacaacctcccagactgcaaagcaaatttccaaaccccaggtcatacttttgtatgtatgtaaaagctttagcattttagggaaaaaaatcaatctgtattttaaaaataaactttgaggtttgaaaataataacaatattcataatggtagtattaacatctattatgtataacttaatctcaacataatttattgaattagaatgaacctggaacactttttgatgaattggtatcctagaggctgtttccttgggcattaactgctggaggattaggtaatcagggattccaagtgttgtgatcttttttctgatgatgccacagtcttcagtgtaaaagttcagaagcctaaaagaacaagtgatcctgaaagtagctgattccagacaagaaaattatattagaacttatgatatggttttttaaagtatttgttattactcagaagggttcatgaatcagtttccactacctctattccttctattgaagctttcctcaaatctacttgtgattcctgatagctcactggcaactgtaccaaggtggccactgtatcatctactgatcctactgcacctagcactcttggctccagataacgcacagaaacctattttctcaccagctgtcatttcttctagggcatgcagttctatgttcgcagttcatgtgtaaaaataaaaccaaattcctggattatcaatatcagttctttacctgtgcataaaagaatatcatgaagtaattgaacttatctgttgatataaaaacacagatccaattcatgtctgtggatgctgcagggactggctcactggagccaaaccatgtggcagaaactcctgaaattggtggaaaaagtggaatatggcagattgggtaggtaggagaacaattttggagattttgtttctcatgttaaaatgtctgcattttatttgctgtaccctgcctactctggttttaaggattttttgacttctttgaaaagcactgaataatctcttttccaggtctagattttttgatgagtactgtgtaaaattgtcaatattcaatggattatttaataataaattaagaattacactcataaaa

SEQ ID NO: 335921 - DNA, 1942 bp, Artificial Sequence
  derived and/or modified sequence
atggactctgagaaatcttctgagtggcggagtgatgtcctgaacagactgcagagtaaatatggctccctgtacagaagagataatgtcatcctgagtggcactcacactcattcaggtcctgcaggatatttccagtataccgtgtttgtaattgccagtgaaggatttagcaatcaaacttttcagcacatggtcactggtatcttgaagagcattgacatagcacacacaaatatgaaaccaggcaaaatcttcatcaataaaggaaatgtggatggtgtgcagatcaacagaagtccgtattcttaccttcaaaatccgcagtcagagagagcaaggtattcttcaaatacagacaaggaaatgatagttttgaaaatggtagatttgaatggagatgacttgggccttatcagctggtttgccatccacccggtcagcatgaacaacagtaaccatcttgtaaacagtgacaatgtgggctatgcatcttacctgcttgagcaagagaagaacaaaggatatctacctggacaggggccatttgtagcagcctttgcttcatcaaacctaggagatgtgtcccccaacattcttggaccacgttgcatcaacacaggagagtcctgtgataacgccaatagcacttgtcccattggtgggcctagcatgtgcattgctaagggacctggacaggatatgtttgacagcacacaaattataggacgggccatgtatcagagagcaaaggaactctatgcctctgcctcccaggaggtaacaggaccactggcttcagcacaccagtgggtggatatgacagatgtgactgtctggctcaattccacacatgcatcaaaaacatgtaaaccagcattgggctacagttttgcagctggcactattgatggagttggaggcctcaattttacacaggggaaaacagaaggggatccattttgggacaccattcgggaccagatcctgggaaagccatctgaagaaattaaagaatgtcataaaccaaagcccatccttcttcacaccggagaactatcaaaacctcacccctggcatccagacattgttgatgttcagattattacccttgggtccttggccataactgccatccccggggagtttacgaccatgtctggacgaagacttcgagaggcagttcaagcagaatttgcatctcatgggatgcagaacatgactgttgttatttcaggtctatgcaacgtctatacacattacattaccacttatgaagaataccaggctcagcgatatgaggcagcatcgacaatttatggaccgcacacattatctgcttacattcagctcttcagaaaccttgctaaggctattgctacggacacggtagccaacctgagcagaggtccagaacctccctttttcaaacaattaatagttccattaattcctagtattgtggatagagcaccaaaaggcagaactttcggggatgtcctgcagccagcaaaacctgaatacagagtgggggaagttgctgaagttatatttgtaggtgctaacccgaagaattcagtacaaaaccagacccatcagaccttcctcactgtggagaaatatgaggctacttcaacatcgtggcagatagtgtgtaatgatgcctcctgggagactcgtttttattggcacaagggactcctgggtctgagtaatgcaacagtggaatggcatattccagacactgcccagcctggaatctacagaataagatattttggacacaatcggaagcaggacattctgaagcctgctgtcatactttcatttgaaggcacttccccggcttttgaagttgtaactatttagtgaaaagttgatagatcatttaaagaacagctttactctctacacattatataagtgatttcaaatgaatgtg

SEQ ID NO: 335922 - DNA, 2343 bp, Artificial Sequence
  derived and/or modified sequence
atggccaagcggaccttcagcaacctggagaccttcctgatcttcctgcttgtgatgatgtccgccatcactgtggctctgctgagccttctgttcatcaccagcggtaccattgagaaccataaagacctgggaggccactttttctccacgacacaatctcctccagcgacccaagggtctacggctgctcaacggagcactgcgacccagcattcaactgcaacccaatcatccacagcgacccagacgagtcctgtgccactgacaccagaatcacccctattccagaacttcagcggttatcatattggcgtgggcagagcggactgtacaggtcaggtggccgacatcaatcttatgggatatggcaagagcggccagaacgcgcaaggcattttgacacggctgtactctagagcttttatcatggctgaacccgacggcagcaatagaaccgtgtttgtctccattgacattggtatggtgagccagaggctgagactggaagtgctgaaccgactacagagcaagtacggatcactgtacagacgcgacaacgtaatcctgtccggcacacacacacacagtggtcctgcaggctattttcagtacacggtcttcgtgatcgcaagtgagggcttttcaaaccaaaccttccagcacatggtgacggggattctgaagtccatcgatatcgcccatactaatatgaagcctggaaagatctttattaataaaggtaacgttgacggagtccaaatcaatcgctcgccatactcatacctgcagaatccacagtcagagcgagctcgctactcttctaacaccgacaaggagatgatcgttttgaaaatggtagatctgaatggggacgacctgggattgatctcgtggttcgccattcaccctgtatcaatgaacaactccaatcatttagttaactcagacaatgtcggctacgcatcttacctgctggaacaagagaagaataaagggtatcttcctgggcagggaccctttgttgccgcatttgcgtcttccaacctgggtgacgtgagtcccaatattctgggtcctcggtgtataaatacaggcgagtcttgcgataacgccaacagcacatgcccaatcgggggcccctctatgtgtatcgccaagggtccaggccaagacatgttcgattccactcagattatcggcagagctatgtaccagagagcgaaggaattgtacgccagcgcctcacaagaggtcacgggaccactggcaagcgctcatcaatgggtggacatgaccgatgttaccgtgtggctaaattcgactcacgctagcaaaacctgtaagcccgccctgggttattcttttgcggctggcacgattgacggcgtgggcggcctcaattttactcagggcaagacagaaggggatcccttttgggataccattagagatcaaattctcggcaagccctcggaagaaattaaggagtgccacaagccgaaacccatactgcttcatactggtgaactctccaaaccccacccctggcatccagacatcgtggacgtgcagattattactctgggcagccttgccattacagcaataccgggcgagtttacaacaatgagcggtcggagactccgggaagctgtacaggccgagttcgctagtcatggcatgcaaaacatgaccgtcgtcatatccgggctttgcaatgtctatacccattacataactacatacgaggaataccaagcacaaaggtatgaggcggcttcgacgatatacggccctcataccttgagcgcttacatccagctcttccgcaacctggccaaggcaatcgcaaccgataccgtcgctaatctcagccgtggaccagaaccccctttcttcaagcagctcattgtgccactcatcccttcaattgtagaccgcgcgcccaagggtaggacattcggagacgtcctgcagcccgccaagcccgaatacagagtgggcgaggtggccgaagtcatcttcgttggcgctaatcccaagaatagcgtgcaaaaccagacccaccagactttcttgaccgttgaaaaatacgaggccacaagcactagctggcagatcgtatgcaatgacgcttcatgggaaacccgattctactggcataagggcctgctggggttatcaaatgctaccgtcgagtggcacatacctgatactgctcagcccggtatctatcggatcaggtacttcggccacaatcgcaaacaggacattctcaagcccgccgtgattctatctttcgagggtacctcccccgcctttgaggtagtgaccatctag

SEQ ID NO: 335923 - DNA, 1869 bp, Artificial Sequence
  derived and/or modified sequence
atggacagcgagaagagcagcgagtggcggagcgacgtgctgaaccgccttcaaagcaagtacggctcgctctaccggagagacaatgtaattctttccggaacccatacccattcaggcccagctggttattttcaatacactgtattcgttattgcatccgaagggttctctaatcaaacttttcaacatatggtgacagggatacttaagtccatcgacatcgcacacaccaatatgaaacctggaaaaatcttcatcaataagggcaatgttgatggagttcagattaaccgctcaccttacagctacctgcaaaatcctcagtctgagcgggctcgctattcctccaataccgacaaagaaatgattgtactgaagatggtcgacctaaatggcgatgacttagggctgatctcttggttcgccatccacccagtctcaatgaacaatagcaatcacttggtaaattccgataatgtcggctacgccagctacttactggagcaggagaaaaataaaggatatctgcccgggcaaggtccattcgtcgccgccttcgcttcaagcaatctaggcgacgtgtctccgaatatcctgggaccacgttgtatcaatactggagaatcatgcgacaacgctaactccacttgcccaattgggggtccaagcatgtgcatcgctaagggacccgggcaggatatgtttgattctactcagataataggccgcgctatgtaccaaagggctaaggaattatacgcctcggcatctcaggaggtcacaggtcccctggcaagcgctcaccagtgggtcgatatgacagatgtgaccgtgtggttgaattcgactcacgcctccaaaacttgtaaaccagcacttggctactctttcgcggcaggaaccatcgacggagtggggggcctcaatttcacgcagggaaaaacggagggtgacccattctgggacactattagagatcaaattctcggcaagccctccgaggagattaaagagtgccataagcctaagcctattttactgcacactggtgaactgtctaaaccccacccctggcatcccgacattgttgacgtgcagattataaccctcgggagtctggccatcaccgcaatcccaggggaattcactaccatgtcaggaagacgcttgcgtgaggctgtacaggccgaattcgcatcacacggaatgcagaacatgacggtcgtcatctctggtttatgtaatgtttatacgcactacattactacatatgaggagtaccaagcccagcgctacgaagccgcaagcacaatttatggccctcacacacttagtgcatatatccagctgtttagaaaccttgcaaaggccattgcaaccgatactgtggccaacctgtcccggggcccagagccaccgtttttcaagcagttgatagtccccctgataccttcaatcgtggaccgtgctcccaagggacggacctttggcgacgtacttcaacctgccaaacctgagtatcgagttggcgaggtagcggaggtgatttttgtcggggccaaccccaagaactctgtgcagaaccagactcaccagacctttttgactgtggaaaaatacgaagcgacttctacatcttggcagatcgtgtgcaacgatgcaagttgggaaactaggttctactggcacaagggcctactcgggctgagtaacgcaactgtggagtggcatattcctgataccgctcagcccggcatttaccggattcggtatttcgggcacaacaggaagcaggatattctgaagccagcagtgatcctgagcttcgagggcacaagtcctgcatttgaggttgtgaccatttag

SEQ ID NO: 335924 - DNA, 2343 bp, Artificial Sequence
  derived and/or modified sequence
atggccaagcggactttcagcaatctagaaacattcctgatcttcctgctggtcatgatgagcgccataactgtcgctctccttagcttgctgttcatcacctcgggaaccatcgaaaatcataaagacctgggaggtcactttttttccactacccagagtccacccgctacgcagggctccacagccgcacaaagaagtactgccacacagcattccacggctactcaatccagtactgcaacccagacatcccctgtgccgttaaccccggaatctcctttatttcagaatttctccgggtaccacattggcgttggccgtgccgattgcaccggtcaagtggctgatataaatttaatgggctacggcaagtccgggcagaatgcccagggtatactgaccaggctttattccagggcctttataatggctgaacccgacggatctaatcggaccgtgttcgtctctattgacattgggatggtatcgcagagactgagactcgaggttctaaacagattacagagcaagtacggcagtctctaccgtcgcgacaatgtcattcttagcggaacacacactcactccggccctgccggttactttcagtacactgtattcgtgatcgcctcagagggtttttcaaaccagacgtttcaacacatggttaccggcattctcaagtctattgatatagcacacaccaatatgaaaccagggaagatttttatcaataaggggaacgtagacggggtccagattaaccgatctccctatagttacctgcagaacccgcaatctgagcgagcccgatatagttctaacacagacaaagaaatgattgtgttgaagatggtggacctcaatggcgacgacctcggactgatttcctggtttgccattcatcccgtgtcaatgaacaatagtaaccatctcgtcaatagtgataacgtgggatacgccagctacttgctcgaacaggagaagaataaagggtacctgccgggacagggtccctttgtggccgcttttgccagcagtaacctgggcgacgtcagcccaaatatactggggcctagatgtataaacaccggagaaagctgtgataatgcgaatagtacttgtcccattggcggacctagcatgtgtattgcaaagggtccaggccaggacatgtttgactccacgcagattatcggacgcgcaatgtaccagcgggctaaagaactatatgcttctgcttctcaagaagtcactgggccactggcttctgcccaccagtgggttgacatgacagacgtgacagtgtggctgaatagtacacatgctagtaagacttgtaagcccgcattgggttattcatttgctgcgggtactattgatggagtcgggggactgaactttacccaggggaagaccgagggcgatccattttgggacacaattagggatcagattctggggaagccttccgaggagatcaaggaatgtcataagcctaaaccgatcctactgcatactggggagttgagtaaaccacatccatggcaccccgacatcgtcgacgtgcaaataatcactctcggatctcttgccatcactgccattcctggagaattcacaacaatgagcggacgtcgactgcgggaagccgtgcaggccgaatttgcatcgcatggtatgcaaaatatgacagtggtgatctctgggctctgcaacgtatacactcattatattactacctatgaagagtaccaggctcaacgctatgaggccgcatcaactatctatggaccccatacactctctgcttacattcagttgtttcgcaacctcgcgaaggctattgcgactgacacggtggccaaccttagccggggtcctgaaccacccttcttcaaacagttgattgtccccctgattccatcaattgttgacagagcaccgaagggtagaacttttggcgacgtgctgcagcctgcgaaaccagaatacagagtgggcgaagtcgcagaggtcatcttcgttggcgctaatcccaaaaactcagtgcagaatcagacccaccaaaccttcctcaccgttgaaaagtacgaggctacctcgacttcctggcagatcgtctgcaacgacgcatcctgggagacacgattttattggcataaggggcttctgggcctgtccaatgccactgtagagtggcacatccctgacaccgcacagccgggaatttaccggatcaggtatttcggacacaacaggaagcaggatatcttaaagccagctgttattctatctttcgaaggcacttcacccgctttcgaagtagtaacaatctag

SEQ ID NO: 335925 - DNA, 1869 bp, Artificial Sequence
  derived and/or modified sequence
atggattcagagaaatcaagtgaatggagaagcgatgtcttgaatcggcttcagtctaagtacgggtcactgtatcgcagggacaacgtcatcctgtccggtacccacacccatagtgggccagccggttactttcagtacactgtgtttgttatcgcctcagaaggattttcgaaccagaccttccaacatatggtcaccgggatcttgaagtctatagatattgcacataccaacatgaagcccggaaagatattcatcaataaagggaacgtcgatggagtccaaatcaatcggtccccatattcctacctccagaatccacaatctgagagagcgcgttactcttctaataccgacaaagagatgatagtgctcaagatggtggacttgaacggcgacgatctgggactgatcagttggttcgcaatacatcccgtatctatgaacaattccaaccatcttgtcaactctgacaacgtgggctacgccagctatctactggaacaggagaaaaataaagggtacctgcccggacagggaccatttgtggcagcatttgcttcatccaacttgggggacgtctctccaaacatcttgggacccaggtgtatcaacaccggagagagttgtgacaacgctaacagtacgtgccctattgggggtccgtcgatgtgcattgcgaaaggccctgggcaggacatgttcgactcgacccagatcattggcagggctatgtaccaacgagcgaaggagttgtacgcctcagcctctcaggaggtgaccggtccgttggccagcgcccaccagtgggtcgatatgacggacgtcacagtgtggctaaattctacacacgccagcaagacctgtaaaccggcactcggatattcttttgccgctggcaccatagatggcgtgggcggtctcaatttcacccagggtaagaccgagggggatcccttttgggacactatacgcgatcagatcttaggaaagccttccgaggaaataaaggagtgtcataagcccaaaccgattctgctacacaccggggagctctcaaaaccccacccatggcacccagacatagtcgatgtccagattattacactcgggtctctagccatcaccgccatacctggggagtttaccactatgtcagggaggagactccgcgaagccgtccaggctgagttcgcctcacatggcatgcagaacatgaccgtggttattagtgggctgtgtaacgtgtatacgcattatatcacaacatatgaagaatatcaggcccagcggtatgaagcagcaagcactatttacggcccacacaccctctctgcgtatatccagctgttccggaacctagcgaaggcaatcgctactgacacggtggcaaacctctctagaggccctgaacctcctttcttcaaacaattgatcgtgcctcttatcccatccatcgttgacagggcccctaagggcaggactttcggagatgtgctgcagccagcaaaacccgaataccgggttggcgaagtggccgaagttatctttgtgggcgctaatccaaagaacagtgtgcagaaccaaactcaccagacctttctgacggtagagaaatatgaagcgacctccacttcttggcaaattgtgtgcaatgacgccagttgggagacaaggttctattggcacaagggactgctgggcctgtccaacgccacagtggaatggcatattccggatactgctcagccagggatttataggattaggtacttcgggcacaacaggaagcaggacatcttgaaacctgccgtaattctgagcttcgagggcaccagcccagcattcgaagtggtgacaatatag

SEQ ID NO: 335926 - DNA, 1833 bp, Artificial Sequence
  derived and/or modified sequence
gtactgaatcgcctacagtcgaaatacggatctctgtatcggcgcgataatgtgatattgtccggtacacatacacactcaggacctgccggatatttccagtacacagtcttcgtcatcgcttccgaaggcttttcaaatcaaaccttccagcacatggtgacagggattctcaagtccatagacatcgcccacaccaacatgaagcccggcaaaatcttcattaataaaggcaatgtggacggcgtgcaaattaaccgtagcccttatagttatttgcagaatccacaaagtgaaagggcgagatactctagcaacactgacaaggagatgatcgtcctgaagatggttgacttgaacggggacgatttgggccttatcagttggtttgcaatccacccggttagtatgaataattctaatcacctcgtaaactctgacaacgtggggtacgcgtcctatctcctggagcaggaaaaaaataaggggtacttgcctggtcagggccctttcgtggccgcctttagctctagtaatctcggtgacgtcagtccaaacatcctcggccccagatgcattaatacgggagaatcgtgtgataacgccaacagcacctgccctataggtgggcctagcatgtgcattgccaaggggcccgggcaggacatgtttgatagtacacagatcattggccgggctatgtaccagagagccaaagaattgtacgctagcgctagtcaagaggtgacagggcctctcgcgtccgcacaccagtgggtggacatgaccgatgtgacagtgtggctcaacagtacccacgcatcaaagacatgcaaaccggccttggggtactccttcgccgccggcaccattgacggcgtcggcggtttgaattttactcagggcaaaactgaaggcgaccccttctgggatacgattcgggatcagatcctgggtaaaccttccgaggagattaaggaatgtcataagccgaagcccatcctcctgcacaccggcgaattgtccaaacctcacccctggcaccctgatatcgttgacgtacagatcatcacgctggggagtttggctatcaccgcgattccaggcgaattcactactatgtcaggaagacgactgagagaggccgtgcaagccgagtttgccagccatggcatgcagaatatgacagtcgtaatcagcggactatgtaacgtgtatacccattacatcaccacatacgaagagtatcaggcccagcgctatgaggccgccagtacgatttacgggccgcacaccctgagcgcctatatccagttgtttcggaacttagccaaagcgatcgcaactgatacagtggcgaatctgagtagaggccccgagccccccttcttcaaacagttaattgtccccttgataccttccatcgttgatcgcgcccctaagggacgaacatttggcgacgtgctccaacccgcaaagcctgagtaccgagtaggagaagttgccgaagtaatcttcgtcggtgccaatcccaagaattcagtgcagaaccagaatcaccagacctttctgaccgtggagaagtacgaggctacctccacctcgtggcagatcgtgtgcaatgatgcgtcttgggagaccaggttttactggcacaagggactgcttggcctgtccaacgccactgtagaatggcacatccctgacacagcacagcctggcatctacaggatccggtacttcgggcacaaccgcaagcaagacatactaaagcccgccgttattctgtccttcgaaggaacaagccctgccttcgaagtggttaccatatag

SEQ ID NO: 335927 - DNA, 1869 bp, Artificial Sequence
  derived and/or modified sequence
atggactcagagaagtcctccgagtggcgctccgacgttctaaatcgattgcagtccaaatacggaagcctctaccgtcgagacaacgttattctgagcggcacgcatacccactctggcccggccggttactttcagtacacggtatttgtcattgcctctgagggcttttccaaccaaacatttcagcacatggttacagggattctcaagagcatcgacattgcgcatacgaacatgaagcctggaaaaatttttataaataagggcaatgttgacggggtacagatcaaccgcagcccatactcgtacttgcagaaccctcagtctgaaagggctagatactcctcaaataccgacaaggaaatgatcgtgttgaagatggtagatttaaatggggatgatcttggcctgatttcatggttcgcaattcaccctgtgtctatgaataacagcaaccacctggtgaattctgacaatgtagggtatgcatcatatctgctggaacaggaaaagaataaaggttaccttcctggccaaggaccatttgttgccgcattctcaagcagtaacttgggggacgtgtcacctaacatcctgggccccagatgtatcaacacaggtgagtcttgtgacaacgcaaacagcacttgtcccatcggaggtccttctatgtgcatcgccaagggcccaggccaggatatgttcgacagtacacagatcatcggccgggcaatgtatcagagggctaaggaactctatgcttccgccagccaagaggtgaccggacctcttgcgagcgcacaccaatgggtggacatgacagatgttactgtttggctgaactccacccatgctagcaaaacatgcaagccagcactcggctactcattcgcggccggtaccattgacggcgtcggcggattaaattttacccaggggaagacggagggggacccattttgggataccatcagggaccagatactaggaaagcccagtgaagagatcaaggagtgtcataagccaaagcctatcttgttacataccggcgaactgtctaagccacacccctggcatcctgacatagttgatgttcaaattatcactttaggatcattggcaataactgccatcccaggtgagttcaccacaatgagcggaaggcgcctcagagaagccgtgcaggctgaattcgcctcacacggaatgcagaacatgactgtggtgatttcgggtttgtgcaatgtctatacgcactatatcaccacctacgaggagtaccaggcccagagatacgaggccgctagtactatatacggtccacacaccttatccgcttacatccaactcttccgaaacttggccaaagctattgccacagatactgtggctaatctgtcgcgtggaccagagccacctttctttaaacagctgattgtgccgcttatccctagcatcgtggaccgagcccctaaaggtaggacgttcggagatgttctccagcctgctaagcccgaataccgggtgggagaggtggcagaagtcatcttcgtcggtgctaatcccaagaactcagtgcagaaccagaaccaccagacctttcttactgtcgaaaaatatgaagccacctctacctcctggcagatcgtatgcaatgatgcctcatgggagacccggttctactggcataaaggattattgggactgtctaatgccaccgtggaatggcacatacctgacaccgcccaacccggaatctaccgcatccggtattttggccataatcgtaagcaggacattctaaagcctgccgtcatcttaagttttgaggggacatctccagctttcgaggtggtgacaatatag

SEQ ID NO: 335928 - DNA, 1833 bp, Artificial Sequence
  derived and/or modified sequence
gtgctgaaccggctgcagagcaaatatggcagcctgtaccgccgggacaacgtcatcctgagcggcacccacacccacagcggccctgctggctacttccagtacacagtgtttgtgattgccagcgagggcttcagcaaccagaccttccagcacatggtgacaggcatcctgaagagcattgatattgcccacaccaacatgaagccaggcaagatcttcatcaacaagggaaatgtggatggagtgcagatcaacagaagcccctacagctacctgcagaacccccagagcgagcgggcccgctacagcagcaacacagacaaggagatgattgtgctgaagatggtggacctgaatggagatgacctgggcctcatctcctggtttgccatccaccctgtgtccatgaacaacagcaaccacctggtgaacagcgacaacgtgggctacgccagctacctgctggagcaggagaagaacaagggctacctgcccggccagggcccctttgtggccgccttcagcagcagcaacctgggagatgtgagccccaacatcctgggcccccgctgcatcaacacaggagagagctgtgacaatgccaacagcacctgccccatcggcggccccagcatgtgcatcgccaagggccctggccaggacatgtttgacagcacccagatcatcggccgggccatgtaccagagggccaaggagctgtatgccagcgccagccaggaggtgacaggccccctggccagcgcccaccagtgggtggacatgacagatgtgacagtgtggctgaacagcacccacgccagcaagacctgcaagccagccctgggctacagctttgctgctggcaccattgatggagtgggcggcctgaacttcacccagggcaagacagaaggagaccccttctgggacaccatccgggaccagatcctgggcaagcccagcgaggagatcaaggagtgccacaagcccaagcccatcctgctgcacactggagagctgagcaagccccacccctggcacccagacatcgtggatgtgcagatcatcaccctgggcagcctggccatcacagccatccctggagagttcaccaccatgtctggaagaaggctgcgggaggccgtgcaggccgagtttgccagccacggcatgcagaacatgacagtggtgatcagcggcctgtgcaatgtgtacacccactacatcaccacctatgaggagtaccaggcccagagatatgaagctgccagcaccatctacggcccccacaccctgagcgcctacatccagctgttcaggaacctggccaaggccatcgccacagacacagtggccaacctgagccggggccctgagccccccttcttcaagcagctgattgtgcccctcatccccagcatcgtggaccgggcccccaagggccgcacctttggagatgtgctgcagcctgccaagccagagtacagagtgggggaggtggccgaggtgatctttgtgggcgccaaccccaagaacagcgtgcagaaccagaaccaccagaccttcctgactgtggagaagtatgaggccaccagcacctcctggcagatcgtgtgcaatgatgcctcctgggagacccgcttctactggcacaagggcctgctgggcctgagcaatgccaccgtggagtggcacatcccagacacagcccagcccggcatctaccgcatccgctacttcggccacaacaggaagcaggacatcctgaagccagctgtgatcctgagctttgagggcaccagccctgcctttgaggtggtgaccatctag

SEQ ID NO: 335929 - DNA, 1869 bp, Artificial Sequence
  derived and/or modified sequence
atggattctgagaagagcagcgagtggaggagtgatgtgctgaaccggctgcagagcaaatatggcagcctgtaccgccgggacaacgtcatcctgagcggcacccacacccacagcggccctgctggctacttccagtacacagtgtttgtgattgccagcgagggcttcagcaaccagaccttccagcacatggtgacaggcatcctgaagagcattgatattgcccacaccaacatgaagccaggcaagatcttcatcaacaagggaaatgtggatggagtgcagatcaacagaagcccctacagctacctgcagaacccccagagcgagcgggcccgctacagcagcaacacagacaaggagatgattgtgctgaagatggtggacctgaatggagatgacctgggcctcatctcctggtttgccatccaccctgtgtccatgaacaacagcaaccacctggtgaacagcgacaacgtgggctacgccagctacctgctggagcaggagaagaacaagggctacctgcccggccagggcccctttgtggccgccttcagcagcagcaacctgggagatgtgagccccaacatcctgggcccccgctgcatcaacacaggagagagctgtgacaatgccaacagcacctgccccatcggcggccccagcatgtgcatcgccaagggccctggccaggacatgtttgacagcacccagatcatcggccgggccatgtaccagagggccaaggagctgtatgccagcgccagccaggaggtgacaggccccctggccagcgcccaccagtgggtggacatgacagatgtgacagtgtggctgaacagcacccacgccagcaagacctgcaagccagccctgggctacagctttgctgctggcaccattgatggagtgggcggcctgaacttcacccagggcaagacagaaggagaccccttctgggacaccatccgggaccagatcctgggcaagcccagcgaggagatcaaggagtgccacaagcccaagcccatcctgctgcacactggagagctgagcaagccccacccctggcacccagacatcgtggatgtgcagatcatcaccctgggcagcctggccatcacagccatccctggagagttcaccaccatgtctggaagaaggctgcgggaggccgtgcaggccgagtttgccagccacggcatgcagaacatgacagtggtgatcagcggcctgtgcaatgtgtacacccactacatcaccacctatgaggagtaccaggcccagagatatgaagctgccagcaccatctacggcccccacaccctgagcgcctacatccagctgttcaggaacctggccaaggccatcgccacagacacagtggccaacctgagccggggccctgagccccccttcttcaagcagctgattgtgcccctcatccccagcatcgtggaccgggcccccaagggccgcacctttggagatgtgctgcagcctgccaagccagagtacagagtgggggaggtggccgaggtgatctttgtgggcgccaaccccaagaacagcgtgcagaaccagaaccaccagaccttcctgactgtggagaagtatgaggccaccagcacctcctggcagatcgtgtgcaatgatgcctcctgggagacccgcttctactggcacaagggcctgctgggcctgagcaatgccaccgtggagtggcacatcccagacacagcccagcccggcatctaccgcatccgctacttcggccacaacaggaagcaggacatcctgaagccagctgtgatcctgagctttgagggcaccagccctgcctttgaggtggtgaccatctag

SEQ ID NO: 335930 - DNA, 4293 bp, Artificial Sequence
  derived and/or modified sequence
gtcctgaacagactgcagagtaaatatggctccctgtacagaagagataatgtcatcctgagtggcactcacactcattcaggtcctgcaggatatttccagtataccgtgtttgtaattgccagtgaaggatttagcaatcaaacttttcagcacatggtcactggtatcttgaagagcattgacatagcacacacaaatatgaaaccaggcaaaatcttcatcaataaaggaaatgtggatggtgtgcagatcaacagaagtccgtattcttaccttcaaaatccgcagtcagagagagcaaggtattcttcaaatacagacaaggaaatgatagttttgaaaatggtagatttgaatggagatgacttgggccttatcagctggtttgccatccacccggtcagcatgaacaacagtaaccatcttgtaaacagtgacaatgtgggctatgcatcttacctgcttgagcaagagaagaacaaaggatatctacctggacaggggccatttgtagcagccttttcttcatcaaacctaggagatgtgtcccccaacattcttggaccacgttgcatcaacacaggagagtcctgtgataacgccaatagcacttgtcccattggtgggcctagcatgtgcattgctaagggacctggacaggatatgtttgacagcacacaaattataggacgggccatgtatcagagagcaaaggaactctatgcctctgcctcccaggaggtaacaggaccactggcttcagcacaccagtgggtggatatgacagatgtgactgtctggctcaattccacacatgcatcaaaaacatgtaaaccagcattgggctacagttttgcggctggcactattgatggagttggaggcctcaattttacacaggggaaaacagaaggggatccattttgggacaccattcgggaccagatcctgggaaagccatctgaagaaattaaagaatgtcataaaccaaagcccatccttcttcacaccggagaactatcaaaacctcacccctggcatccagacattgttgatgttcagattattacccttgggtccttggccataactgccatccccggggagtttacgaccatgtctggacgaagacttcgagaggcagttcaagcagaatttgcatctcatgggatgcagaacatgactgttgttatttcaggtctatgcaacgtctatacacattacattaccacttatgaagaataccaggctcagcgatatgaggcagcatcgacaatttatggaccgcacacattatctgcttacattcagctcttcagaaaccttgctaaggctattgctacggacacggtagccaacctgagcagaggtccagaacctccctttttcaaacaattaatagttccattaattcctagtattgtggatagagcaccaaaaggcagaactttcggggatgtcctgcagccagcaaaacctgaatacagagtgggggaagttgctgaagttatatttgtaggtgctaacccgaagaattcagtacaaaaccagaaccatcagaccttcctcactgtggagaaatatgaggctacttcaacatcgtggcagatagtgtgtaatgatgcctcctgggagactcgtttttattggcacaagggactcctgggtctgagtaatgcaacagtggaatggcatattccagacactgcccagcctggaatctacagaataagatattttggacacaatcggaagcaggacattctgaagcctgctgtcatactttcatttgaaggcacttccccggcttttgaagttgtaactatttagtgaaaagttgatagatcatttaaagaacagctttactctctacacattatataagtgatttcaaatgaatgtgaactagtgaactaccatgttgacttctataatcgtccctgtttggggacagatagtttactgctaatggggtggaggggtgtgtgtgtgtgtgtgtgtgtgtgtgtgtgagagagagagagagagagagagagagagagagagagagagagagagagagagaggtttgtcccgtatatcttgctccagcagccatatatcttgtggtctacagcctaaagcatgatttcccttgaagtcttggggttgtttaaaggagagtcccttcaatataaaacctctgaaatattagtgagaatggctcactaatgtgaacaatgtttaaattatttatttatatatagaattactgaatattagtactgggaaaatttatagaaatcatctagtcttacccttcatcttacatataagaaaaatggtcttttcttctaatcacatttacaaaatatgatataaaccttgaccatgaatgtatgagcctaattagagaaacagaaaatcagcatgtcagttttccttcattcaaaataacatagtctttctaagcagtcattctggagttaacatgcctagttcagagccgctgtggatgctcaaatcatttctggaattgccttcaggacacaattatgagaaagtcagacttccaatattttgatcatgccttgtgttttcctaagtgtccttatcccactggattgtgtctcttactcccaagacttattccaaatgattttttgagtcttttcattaatcaaattcaccccaaaccagaaagttttgccattagcgtagatattaaaaatattactggctgggaaagcactcctcaaagcagaggttctaaattaatttatctgttcttttaccatttgctcactcactcactcatggacccattcaatcatagaatatttaagatttatatgcccagaattataatagtgcctaggccttgataattagtgaatttgtacttggggtgaatgtgtaagtgtcaaaaggtaactattatgaaggagaaaataatcgatttaatatgtaaattctggggaggcatttaaaaaatcagtaatcttcaagttatatcttgtgtatcatctgtgttggatactctaatttggggggaaagaggctccagacagtttgctaaatactattttgaaagttatttttgggcattgtaaaataccttgcttcataccccaaagaataagatatgacagtctgacatcgattgtctgaaagtactaattgcatttaaaattctttaagttaactacaagctcccagactgcaaagcaaatttccaaaccccaggtcatacttttgtatgtatgtaaaagctttagcattttagggaaaaaaatcaatctgtattttaaaaataaactttgaggtttgaaaataataacaatattcataatggtagtattaacatctattatgtataacttaatctcaacataatttattgaattagaatgaacctggaacactttttgatgaattggtatcctagaggctgtttccttgggcattaactgctggaggattaggtaatcagggattccaagtgttgtgatcttttttctaatgacgccacagtcttcagtgtaaaagttcagaagcctaaaagaacaagtgatcctgaaagtagctgattccagacaagaaaattatattagaactcatgatatggttttttaaagtatttgttattactcagaagggttcatgaatcagtttccactacctctattccttctattgaagctttcctcaaatctacttgtgattcctgatagctcactggcaactgtaccaaggtggccactgtatcatctactgatccttctgcacctagcactcttggctccagataacgcacagaaacctattttctcaccagctgtcatttcttctagggcatgcagttctatgttcgcagttcatgtgtaaaaacaaaaccaaattcctggattatcaatatcagttctttacctgtgcataaaagaatatcatgaagtaattgaacttatctgttgatataaaaacacagatccaattcatgtctgtggatgctgcagggactggctcactggagccaaaccatgtggcagaaactcctgaaattggtggaaaaagtggaatatggcagattgggtaggtaggagaacaattttggagattttgtttctcatgttaaaatgtctgcattttatttgctgtaccctgcctactctggttttaaggattttttgacttctttgaaaagcactgaataatctcttttccaggtctagattttttgatgagtactgtgtaaaattgtcaatattcaatggattatttaataataaattaagaattacactcataaaa

SEQ ID NO: 335931 - DNA, 2050 bp, Artificial Sequence
  derived and/or modified sequence
atggactctgagaaatcttctgagtggcggagtgatgtcctgaacagactgcagagtaaatatggctccctgtacagaagagataatgtcatcctgagtggcactcacactcattcaggtcctgcaggatatttccagtataccgtgtttgtaattgccagtgaaggatttagcaatcaaacttttcagcacatggtcactggtatcttgaagagcattgacatagcacacacaaatatgaaaccaggcaaaatcttcatcaataaaggaaatgtggatggtgtgcagatcaacagaagtccgtattcttaccttcaaaatccgcagtcagagagagcaaggtattcttcaaatacagacaaggaaatgatagttttgaaaatggtagatttgaatggagatgacttgggccttatcagctggtttgccatccacccggtcagcatgaacaacagtaaccatcttgtaaacagtgacaatgtgggctatgcatcttacctgcttgagcaagagaagaacaaaggatatctacctggacaggggccatttgtagcagccttttcttcatcaaacctaggagatgtgtcccccaacattcttggaccacgttgcatcaacacaggagagtcctgtgataacgccaatagcacttgtcccattggtgggcctagcatgtgcattgctaagggacctggacaggatatgtttgacagcacacaaattataggacgggccatgtatcagagagcaaaggaactctatgcctctgcctcccaggaggtaacaggaccactggcttcagcacaccagtgggtggatatgacagatgtgactgtctggctcaattccacacatgcatcaaaaacatgtaaaccagcattgggctacagttttgcggctggcactattgatggagttggaggcctcaattttacacaggggaaaacagaaggggatccattttgggacaccattcgggaccagatcctgggaaagccatctgaagaaattaaagaatgtcataaaccaaagcccatccttcttcacaccggagaactatcaaaacctcacccctggcatccagacattgttgatgttcagattattacccttgggtccttggccataactgccatccccggggagtttacgaccatgtctggacgaagacttcgagaggcagttcaagcagaatttgcatctcatgggatgcagaacatgactgttgttatttcaggtctatgcaacgtctatacacattacattaccacttatgaagaataccaggctcagcgatatgaggcagcatcgacaatttatggaccgcacacattatctgcttacattcagctcttcagaaaccttgctaaggctattgctacggacacggtagccaacctgagcagaggtccagaacctccctttttcaaacaattaatagttccattaattcctagtattgtggatagagcaccaaaaggcagaactttcggggatgtcctgcagccagcaaaacctgaatacagagtgggggaagttgctgaagttatatttgtaggtgctaacccgaagaattcagtacaaaaccagaaccatcagaccttcctcactgtggagaaatatgaggctacttcaacatcgtggcagatagtgtgtaatgatgcctcctgggagactcgtttttattggcacaagggactcctgggtctgagtaatgcaacagtggaatggcatattccagacactgcccagcctggaatctacagaataagatattttggacacaatcggaagcaggacattctgaagcctgctgtcatactttcatttgaaggcacttccccggcttttgaagttgtaactatttagtgaaaagttgatagatcatttaaagaacagctttactctctacacattatataagtgatttcaaatgaatgtgaactagtgaactaccatgttgacttctataatcgtccctgtttggggacagatagtttactgctaatggggtggaggggtgtgtgtgtgtgtgtgtgtgtgtgtgtgt

SEQ ID NO: 335932 - DNA, 1833 bp, Artificial Sequence
  derived and/or modified sequence
gtgctgaaccggctgcagagcaagtacggcagcctgtaccggcgggacaatgtgatactgtcaggaacccacacccatagtggcccggccggttacttccagtacaccgtatttgttattgcaagcgaagggttctccaatcaaacttttcagcatatggtcacaggaatcctgaagagcattgacatcgcccataccaatatgaaacccggcaagatctttatcaacaagggaaacgtcgatggcgtccaaataaacaggtctccttactcgtatctacaaaaccctcaaagcgagcgcgcccgatattctagcaacacggacaaggaaatgatcgtgctaaagatggtggatcttaacggggacgacctaggcttgatcagttggttcgctatccatcccgttagtatgaacaatagtaatcacctggtgaacagtgataacgtgggctacgcatcttatctgctggagcaggagaagaataagggatacttgcctggccaaggtcctttcgtggccgccttttccagcagtaatctaggcgacgtgagccccaacattctcggaccgagatgtatcaacacaggggaatcgtgcgacaacgcgaatagcacctgtcctatcggcggtccgagtatgtgcattgccaaggggcctggccaggacatgtttgatagcacgcaaattattgggagagctatgtatcaacgagctaaggagctgtatgccagcgcctctcaggaggtgaccggccctctcgcatctgcccatcagtgggtcgacatgactgacgtgaccgtttggctgaacagcacacacgcttcaaagacctgcaagccagctctaggctattcattcgcagccggaactatagatggagtaggtggactaaacttcacacagggtaagactgagggggacccgttttgggacactatccgcgaccagattctgggaaagccgagcgaggagattaaggaatgccacaagccaaaaccgattttactgcacaccggcgagttgtcgaaaccacacccctggcaccccgatatcgtcgacgtgcaaataatcactctgggatcgctggcaatcactgctatccccggcgaatttacgaccatgtctggcaggagactcagggaggcggtgcaagccgagttcgcgagccacggtatgcagaatatgactgtggtgatctcagggctgtgtaatgtgtatacccactatataacaacatacgaagagtatcaggcccaaagatacgaagctgcatccacaatctacggtccacacacacttagcgcatacatccagctgtttcggaatctggccaaagcaatcgcaacagatacagtcgctaatctgagtaggggcccggaaccgccgttctttaaacaactgatcgtaccattaatcccaagtattgtggatagggcgcccaaaggcaggacgtttggtgatgtactgcagcctgccaagcctgaatatcgcgtaggggaggtcgccgaagtgattttcgtgggagcaaatccaaaaaactcagtccagaatcagaatcatcaaactttcctaactgtggagaaatacgaggccaccagtacaagttggcagattgtgtgtaacgatgccagttgggagaccagattttactggcataagggcctgctcggactgagcaacgctacagtggagtggcatattccggatacagctcagcccggaatctaccggattcgatactttggacacaataggaagcaagatatcctcaaacctgctgtcatcctatctttcgaagggacgtcgcctgcatttgaggtggtcaccatctag

SEQ ID NO: 335933 - DNA, 1869 bp, Artificial Sequence
  derived and/or modified sequence
atggacagcgagaagagcagcgagtggcggagcgacgtgctgaacagattacagtccaagtatggatcactgtatcggagagataacgtgattctgtctggaacccacactcactcaggcccagctggatactttcagtacactgttttcgttatagcctcagagggcttctccaatcaaactttccaacatatggttacaggcattttgaaaagcatagacattgcccacactaacatgaagcctgggaaaattttcatcaacaaagggaacgtggatggtgtgcaaatcaataggtctccctactcttacttacaaaatccacagtcagagcgggcccgctactcttctaacacagacaaggagatgattgtcctgaagatggtggacctcaacggtgatgacctggggctaatcagttggttcgccatacatccggtgagcatgaataacagcaatcatctcgttaattccgacaacgtggggtatgcgtcatatctcctggagcaggaaaagaacaagggctacttgccaggccagggcccattcgtcgccgccttttcctcctccaatctgggagatgtctcacccaatatcctgggaccacgttgcatcaacactggggaatcctgcgataatgcaaactccacttgccccattggcggcccatccatgtgtatcgcaaagggccccggccaggacatgttcgatagcacccagataatagggcgggcaatgtaccagcgtgccaaagagctgtatgctagtgcatcgcaagaggtgactgggcctcttgccagcgcgcaccaatgggtcgatatgacagacgtaacggtgtggctcaactctactcacgcatccaagacctgcaagcctgcacttgggtattccttcgctgccgggacaattgatggggtaggcgggcttaacttcacacaaggtaaaaccgagggggatcccttctgggacaccatcagggatcagatcctgggcaagccatccgaggaaatcaaggaatgtcacaagccgaagcccatactgcttcacaccggcgagctgagtaaaccacacccttggcatcctgatattgttgacgtgcagattatcaccctgggatcactggccatcacagcaatcccgggagagttcacaacaatgtccggccgtcggttacgggaagccgtccaggccgagtttgcctcccacggcatgcaaaacatgacagtagtgatatccggactctgtaatgtgtacacacattacattactacatatgaagagtatcaagctcagagatatgaggcggcaagcaccatctacggaccccatactctgtccgcctacatccagctctttcgcaacctggcgaaagctatcgccaccgacacagtggctaatctttccaggggcccggagcctcctttctttaagcagctcatcgtgcccctgatcccgagtatcgtggatcgggccccaaaggggcgcacattcggggatgtcctgcagccggccaagcctgaatatcgtgtaggcgaagttgcggaggtcatctttgtgggggcaaaccctaaaaacagcgtccagaaccagaatcaccagacttttttgaccgtcgaaaagtacgaggctacttcaacatcatggcagatcgtctgcaacgacgcttcatgggagacccgcttctattggcacaaagggctattgggcctgtcaaatgcaaccgtagaatggcatattccggacactgcgcagcctggtatctaccgaattcggtattttggtcataaccgcaaacaggatatactgaagcctgccgtcattctttccttcgaaggaacctcaccagcgtttgaggtcgtcaccatctag

SEQ ID NO: 335934 - DNA, 1833 bp, Artificial Sequence
  derived and/or modified sequence
gtgctgaatcgcttacagagcaagtatggctctctgtacaggagagataacgttatcctctccggaacgcacacccactctggcccagccggttattttcagtatacggtatttgttattgccagcgaagggttcagtaaccaaacgttccagcacatggtgacaggcattctgaagagtatcgatatagcccacactaatatgaaacccggaaaaatcttcataaacaaagggaatgtggatggggtgcagatcaatcgtagcccgtacagctacctgcagaaccctcagtctgagcgcgctagatatagctctaacactgataaggagatgatcgtcctgaagatggtcgacctgaatggcgacgatttgggtttaatttcctggttcgcaatccaccctgtgagcatgaataactctaatcatctggtcaatagtgataacgtgggctacgcctcttacctgcttgaacaggagaagaacaaaggatatctccccggacaaggcccattcgtggcagcctttagctcttcaaacctgggagatgtgtcaccaaacatcctcgggccacggtgtatcaacacaggcgagtcttgtgataatgctaattcaacgtgccccatagggggaccctctatgtgtatcgcaaagggacccggacaagatatgttcgattccacccagatcatcggtcgagctatgtaccagcgagccaaagagttgtacgcttcagccagccaggaagtgacagggccactggcttctgcccaccaatgggtggacatgactgacgtcaccgtgtggctgaattccacacatgcttcgaagacctgcaaaccagcactggggtactcatttgcagctggaacaatcgacggcgtggggggtcttaattttacgcagggcaagaccgaaggtgatccattctgggatacgatcagggaccagatattagggaagccgagcgaggaaatcaaagagtgtcataagccgaagcctatcctcctgcacacgggagagttaagtaagccccatccctggcacccagacatcgttgatgtgcagataatcaccttgggcagtctggctataactgccatcccaggagagtttaccaccatgagtggtagacggctgagggaggccgttcaagccgaatttgctagtcacgggatgcaaaacatgacagtcgttatctccgggctgtgtaatgtgtacacacattatataaccacatacgaggagtaccaggcacaaaggtacgaggcagcatctactatctacgggccacataccttgtccgcctacatacagttgttcagaaatctcgcaaaggcaattgccaccgacacagtggcaaacttgagccgcggacccgaacctcccttttttaagcaactcattgtgcccctgattccttctatcgttgacagggctcccaagggcagaaccttcggcgacgtcctgcagccggcaaaacccgaatacagagtcggtgaagttgccgaagtaatatttgtgggcgctaatcctaaaaacagcgtgcagaaccaaaatcatcagaccttccttactgtggagaagtatgaagcaactagcacatcctggcaaatcgtgtgcaacgatgccagttgggagaccagattctactggcataagggtctcttgggcctcagcaatgccaccgtggagtggcacatcccagatacagcccagccgggtatctatcgaatcaggtacttcggccataatcgaaaacaggacatcttaaaacccgctgtaattctttcattcgaggggaccagtccggctttcgaggtagtcaccatctag

SEQ ID NO: 335935 - DNA, 1869 bp, Artificial Sequence
  derived and/or modified sequence
atggatagtgagaagtcatctgaatggcgatctgatgtgctgaaccggctccaatcaaagtatggcagtctgtacagaagggataacgtgatactgtcaggcacccacacccactcgggccctgcgggatatttccagtataccgttttcgttatcgccagcgagggattttcaaatcaaacatttcagcatatggttacaggcatattgaaaagcattgacatcgctcacacaaacatgaagcctggaaagatcttcatcaacaaaggtaacgtcgatggcgtacagattaaccgctcaccctattcttacctccaaaacccacaatccgagagagcaagatatagcagcaatactgacaaggagatgatcgtcctgaagatggtggatttaaatggagatgatttaggtctgatcagttggttcgccatccatcctgtctcaatgaacaacagcaatcatctggtgaactcagataacgtaggttacgccagctatttacttgagcaggaaaagaataaggggtacctacctgggcaaggcccattcgtcgccgctttctcgtcatcaaacctgggtgacgtcagccccaacatcctcggaccccgttgtattaacactggagagtcttgcgacaatgcaaacagcacttgccccataggcggaccgagtatgtgtatcgctaagggtcccggacaagatatgttcgactccacacagataatcggcagggcaatgtaccagcgcgctaaggaactttacgcgtcagcctcacaggaagtgacgggccctctggctagcgcccaccagtgggtggacatgaccgacgtaacagtgtggttgaacagcacccacgcctctaaaacctgtaaaccagccctgggttactcctttgctgcgggtacaatagatggagtgggcggtctcaactttactcaaggaaagacagaaggggatccgttctgggacacaatcagggatcagattcttgggaaacctagtgaagaaatcaaagagtgccataaacccaaacccattctcttgcatacaggcgaattgtcaaaaccacatccttggcaccccgatattgtcgatgtgcagattatcactctgggctcgctcgcaatcactgctatccccggagaatttacaacgatgtccgggagacgcctgcgggaggctgtgcaggccgaattcgcaagccacgggatgcagaacatgaccgtggtcatcagtggcctgtgtaatgtttatacacactacattactacatacgaggagtatcaggcccagcgctacgaggcagcaagcacaatttacggaccgcacaccctgtcagcgtacattcagctcttccggaacctcgccaaggctatcgccacggataccgtggcaaatctgtcccggggacccgagccccctttttttaaacaactgatcgtgcccctgattccctccatagtcgatcgcgcaccaaagggccgaacttttggcgatgtgctgcagcctgccaaacctgaatacagagtgggggaggtggctgaggtaatctttgttggtgccaatccgaagaattccgtacagaatcagaatcaccagacctttctgaccgtcgaaaaatacgaggcaacttcaactagctggcaaatcgtctgtaacgatgccagttgggagactcgattttattggcacaagggcctgctcggactgtcaaatgcgactgtcgagtggcacattcccgacaccgcccagcctgggatataccgaattcggtacttcgggcataacagaaaacaagacattttgaaacctgcagtcattctttctttcgagggtacgtctccagcattcgaagtggtgactatctag

SEQ ID NO: 335936 - DNA, 1833 bp, Artificial Sequence
  derived and/or modified sequence
gtgctgaacagactgcagagcaagtacggcagcctgtacagaagagacaacgtgatcctgagcggcacccacacccacagcggccccgccggctacttccagtacaccgtgttcgtgatcgccagcgagggcttcagcaaccagaccttccagcacatggtgaccggcatcctgaagagcatcgacatcgcccacaccaacatgaagcccggcaagatcttcatcaacaagggcaacgtggacggcgtgcagatcaacagaagcccctacagctacctgcagaacccccagagcgagagagccagatacagcagcaacaccgacaaggagatgatcgtgctgaagatggtggacctgaacggcgacgacctgggcctgatcagctggttcgccatccaccccgtgagcatgaacaacagcaaccacctggtgaacagcgacaacgtgggctacgccagctacctgctggagcaggagaagaacaagggctacctgcccggccagggccccttcgtggccgccttcagcagcagcaacctgggcgacgtgagccccaacatcctgggccccagatgcatcaacaccggcgagagctgcgacaacgccaacagcacctgccccatcggcggccccagcatgtgcatcgccaagggccccggccaggacatgttcgacagcacccagatcatcggcagagccatgtaccagagagccaaggagctgtacgccagcgccagccaggaggtgaccggccccctggccagcgcccaccagtgggtggacatgaccgacgtgaccgtgtggctgaacagcacccacgccagcaagacctgcaagcccgccctgggctacagcttcgccgccggcaccatcgacggcgtgggcggcctgaacttcacccagggcaagaccgagggcgaccccttctgggacaccatcagagaccagatcctgggcaagcccagcgaggagatcaaggagtgccacaagcccaagcccatcctgctgcacaccggcgagctgagcaagccccacccctggcaccccgacatcgtggacgtgcagatcatcaccctgggcagcctggccatcaccgccatccccggcgagttcaccaccatgagcggcagaagactgagagaggccgtgcaggccgagttcgccagccacggcatgcagaacatgaccgtggtgatcagcggcctgtgcaacgtgtacacccactacatcaccacctacgaggagtaccaggcccagagatacgaggccgccagcaccatctacggcccccacaccctgagcgcctacatccagctgttcagaaacctggccaaggccatcgccaccgacaccgtggccaacctgagcagaggccccgagccccccttcttcaagcagctgatcgtgcccctgatccccagcatcgtggacagagcccccaagggcagaaccttcggcgacgtgctgcagcccgccaagcccgagtacagagtgggcgaggtggccgaggtgatcttcgtgggcgccaaccccaagaacagcgtgcagaaccagaaccaccagaccttcctgaccgtggagaagtacgaggccaccagcaccagctggcagatcgtgtgcaacgacgccagctgggagaccagattctactggcacaagggcctgctgggcctgagcaacgccaccgtggagtggcacatccccgacaccgcccagcccggcatctacagaatcagatacttcggccacaacagaaagcaggacatcctgaagcccgccgtgatcctgagcttcgagggcaccagccccgccttcgaggtggtgaccatctag

SEQ ID NO: 335937 - DNA, 1869 bp, Artificial Sequence
  derived and/or modified sequence
atggacagcgagaagagcagcgagtggagaagcgacgtgctgaacagactgcagagcaagtacggcagcctgtacagaagagacaacgtgatcctgagcggcacccacacccacagcggccccgccggctacttccagtacaccgtgttcgtgatcgccagcgagggcttcagcaaccagaccttccagcacatggtgaccggcatcctgaagagcatcgacatcgcccacaccaacatgaagcccggcaagatcttcatcaacaagggcaacgtggacggcgtgcagatcaacagaagcccctacagctacctgcagaacccccagagcgagagagccagatacagcagcaacaccgacaaggagatgatcgtgctgaagatggtggacctgaacggcgacgacctgggcctgatcagctggttcgccatccaccccgtgagcatgaacaacagcaaccacctggtgaacagcgacaacgtgggctacgccagctacctgctggagcaggagaagaacaagggctacctgcccggccagggccccttcgtggccgccttcagcagcagcaacctgggcgacgtgagccccaacatcctgggccccagatgcatcaacaccggcgagagctgcgacaacgccaacagcacctgccccatcggcggccccagcatgtgcatcgccaagggccccggccaggacatgttcgacagcacccagatcatcggcagagccatgtaccagagagccaaggagctgtacgccagcgccagccaggaggtgaccggccccctggccagcgcccaccagtgggtggacatgaccgacgtgaccgtgtggctgaacagcacccacgccagcaagacctgcaagcccgccctgggctacagcttcgccgccggcaccatcgacggcgtgggcggcctgaacttcacccagggcaagaccgagggcgaccccttctgggacaccatcagagaccagatcctgggcaagcccagcgaggagatcaaggagtgccacaagcccaagcccatcctgctgcacaccggcgagctgagcaagccccacccctggcaccccgacatcgtggacgtgcagatcatcaccctgggcagcctggccatcaccgccatccccggcgagttcaccaccatgagcggcagaagactgagagaggccgtgcaggccgagttcgccagccacggcatgcagaacatgaccgtggtgatcagcggcctgtgcaacgtgtacacccactacatcaccacctacgaggagtaccaggcccagagatacgaggccgccagcaccatctacggcccccacaccctgagcgcctacatccagctgttcagaaacctggccaaggccatcgccaccgacaccgtggccaacctgagcagaggccccgagccccccttcttcaagcagctgatcgtgcccctgatccccagcatcgtggacagagcccccaagggcagaaccttcggcgacgtgctgcagcccgccaagcccgagtacagagtgggcgaggtggccgaggtgatcttcgtgggcgccaaccccaagaacagcgtgcagaaccagaaccaccagaccttcctgaccgtggagaagtacgaggccaccagcaccagctggcagatcgtgtgcaacgacgccagctgggagaccagattctactggcacaagggcctgctgggcctgagcaacgccaccgtggagtggcacatccccgacaccgcccagcccggcatctacagaatcagatacttcggccacaacagaaagcaggacatcctgaagcccgccgtgatcctgagcttcgagggcaccagccccgccttcgaggtggtgaccatctag

SEQ ID NO: 335938 - protein, 240 aa, Artificial Sequence [sequence omitted]

SEQ ID NO: 335939 - DNA, 723 bp, Artificial Sequence
  derived and/or modified sequence
atgagcggcagaagactgagagaggccgtgcaggccgagttcgccagccacggcatgcagaacatgaccgtggtgatcagcggcctgtgcaacgtgtacacccactacatcaccacctacgaggagtaccaggcccagagatacgaggccgccagcaccatctacggcccccacaccctgagcgcctacatccagctgttcagaaacctggccaaggccatcgccaccgacaccgtggccaacctgagcagaggccccgagccccccttcttcaagcagctgatcgtgcccctgatccccagcatcgtggacagagcccccaagggcagaaccttcggcgacgtgctgcagcccgccaagcccgagtacagagtgggcgaggtggccgaggtgatcttcgtgggcgccaaccccaagaacagcgtgcagaaccagacccaccagaccttcctgaccgtggagaagtacgaggccaccagcaccagctggcagatcgtgtgcaacgacgccagctgggagaccagattctactggcacaagggcctgctgggcctgagcaacgccaccgtggagtggcacatccccgacaccgcccagcccggcatctacagaatcagatacttcggccacaacagaaagcaggacatcctgaagcccgccgtgatcctgagcttcgagggcaccagccccgccttcgaggtgcccaacagcggcctgcactag

SEQ ID NO: 335940 - DNA, 723 bp, Artificial Sequence
  derived and/or modified sequence
atgtccggtcggcggttacgtgaggcggtccaagccgagtttgcctcacacgggatgcagaatatgacagtcgtgatatctggactgtgcaacgtttacacccattatatcaccacctacgaggagtaccaagcccagcgctatgaagccgcttctacaatctatgggccgcatacactcagtgcctatatccagctcttccggaacttagcgaaggccatcgccacggatacagtagccaatctctcccgcggcccagaacctcccttcttcaagcagttgatcgttccccttatcccgagcatcgttgacagagctccaaaggggagaaccttcggagatgtgcttcagccggcaaaacctgagtaccgtgttggagaagtagccgaagttatctttgtcggcgcaaaccccaaaaactccgtacagaatcagacacatcaaacatttctgacggtggagaagtacgaggcaacgagcacatcctggcagatcgtgtgtaacgacgcatcctgggaaacacgattctactggcacaagggattgttgggacttagcaatgctaccgttgagtggcacatccctgatacagctcagcctgggatttatagaatccggtatttcggacataatagaaaacaggacatcctgaaaccagccgtcattttaagctttgaaggcactagcccagcattcgaagtccctaactctgggctccactag

SEQ ID NO: 335941 - DNA, 723 bp, Artificial Sequence
  derived and/or modified sequence
atgagcggccggcggctgcgggaggccgtgcaggccgagtttgccagccacggcatgcagaacatgacagtggtgatcagcggcctgtgcaatgtgtacacccactacatcaccacctatgaggagtaccaggcccagagatatgaggccgccagcaccatctacggcccccacaccctgagcgcctacatccagctgttcaggaacctggccaaggccatcgccacagacacagtggccaacctgagccggggccctgagccccccttcttcaagcagctgattgtgcccctcatccccagcatcgtggaccgggcccccaagggccgcacctttggagatgtgctgcagcctgccaagccagagtacagagtgggggaggtggccgaggtgatctttgtgggcgccaaccccaagaacagcgtgcagaaccagacccaccagaccttcctgactgtggagaagtatgaggccaccagcacctcctggcagatcgtgtgcaatgatgcctcctgggagacccgcttctactggcacaagggcctgctgggcctgagcaatgccaccgtggagtggcacatcccagacacagcccagcccggcatctaccgcatccgctacttcggccacaacaggaagcaggacatcctgaagccagctgtgatcctgagctttgagggcaccagccctgcctttgaggtgcccaacagcggcctgcactag

SEQ ID NO: 335942 - DNA, 1379 bp, Artificial Sequence
  derived and/or modified sequence
atcagcaggctcagcagaggtgtgtcctgccctgcgcatgagtcagcacataagtagttaagctggcgaggcttgggcttccctggttagagtgtccagcctcccagagttaacctgcagcactgctcagaagagcaggggcagaggataccaaagcgtcccagcactctggcttgcaggggaaagccatctgaagaaattaaagaatgtcataaaccaaagcccatccttcttcacaccggagaactatcaaaacctcacccctggcatccagacattgttgatgttcagattattacccttgggtccttggccataactgccatccccggggagtttacgaccatgtctggacgaagacttcgagaggcagttcaagcagaatttgcatctcatgggatgcagaacatgactgttgttatttcaggtctatgcaacgtctatacacattacattaccacttatgaagaataccaggctcagcgatatgaggcagcatcgacaatttatggaccgcacacattatctgcttacattcagctcttcagaaaccttgctaaggctattgctacggacacggtagccaacctgagcagaggtccagaacctccctttttcaaacaattaatagttccattaattcctagtattgtggatagagcaccaaaaggcagaactttcggggatgtcctgcagccagcaaaacctgaatacagagtgggggaagttgctgaagttatatttgtaggtgctaacccgaagaattcagtacaaaaccagacccatcagaccttcctcactgtggagaaatatgaggctacttcaacatcgtggcagatagtgtgtaatgatgcctcctgggagactcgtttttattggcacaagggactcctgggtctgagtaatgcaacagtggaatggcatattccagacactgcccagcctggaatctacagaataagatattttggacacaatcggaagcaggacattctgaagcctgctgtcatactttcatttgaaggcacttccccggcttttgaagttcctaactcaggattacactgaagtgaacccgctggggtgcattttccagaaaagggccaagaaaaggtagcaagaaaaataccaagtgacagaaagctcaaacacaacaacgagctatggaaatacaattggccagggtgtgtggaacagcctcgagactgcccactctgcctgggatgcactaccccagatctctgcacagcttggcccgcccatctcaccccggctcaaatgccggcactgcagtgacaccttctctaccagtcctgcctaaaggagcacctcccagccctacccaccactctgccccagggaagaagagacagcagctg

SEQ ID NO: 335943 - DNA, 723 bp, Artificial Sequence
  derived and/or modified sequence
atgagcggccggcggctgcgggaggccgtgcaggccgagttcgcctctcacggtatgcagaatatgacagtggtgatctccggtctctgtaatgtgtatacacactacattaccacatacgaagagtaccaggctcagcggtacgaggcagcatccactatatatggaccccataccttgtcagcttacatccagcttttccggaacctagctaaggctattgccacggataccgtggctaatctatctaggggcccggagccacccttcttcaagcaactgatcgttcctcttataccttctatagttgaccgcgctcccaaagggcggacctttggggacgtactgcagccagccaagcccgagtaccgcgtaggcgaagtggctgaggtgatttttgtcggggcaaaccctaagaactccgtgcagaaccaaacacatcagacattcctgactgtggaaaaatacgaggcaacttccaccagttggcaaatcgtttgtaatgacgcctcttgggagaccagattttattggcataaaggcctcctgggcctgtcgaacgccacggttgagtggcacatccccgacaccgcccagcccggcatctatagaatcaggtactttggtcacaacagaaagcaggacatcctgaagcccgctgtcatactcagctttgagggaacatccccagcctttgaagtgcccaattctggcctgcactag

SEQ ID NO: 335944 - DNA, 723 bp, Artificial Sequence
  derived and/or modified sequence
atgtccggcagaaggctgagggaggccgtacaggccgagttcgcgagtcacgggatgcagaacatgaccgtggttatcagtggtctgtgcaatgtctatacccactacattacaacttacgaggagtatcaagcccaaagatatgaagctgcctccactatctatgggcctcatacactcagcgcctacatacagctatttaggaatctggctaaggcaattgcaaccgacaccgtggctaacctgtcgagaggccctgagcctccattcttcaaacaactcatcgtgccactcatccccagcatcgttgaccgggctccgaagggcaggacattcggtgacgtattgcagcccgctaaacctgaatatagagtgggcgaggtcgctgaagtcatttttgtgggggcaaatccaaagaactctgtccagaaccagactcaccagacattccttacagttgaaaagtacgaggccaccagtaccagttggcagatagtgtgtaatgacgcctcctgggaaactagattctactggcacaaaggactgctaggtctaagcaacgccactgtggaatggcacatcccagacaccgctcagcctggtatctacagaataaggtatttcggacacaaccgaaaacaggatattctcaagccggctgttattctttcttttgaggggacttccccggcattcgaagtacctaattccggactccactag

SEQ ID NO: 335945 - DNA, 1255 bp, Artificial Sequence
  derived and/or modified sequence
gtttccggcggtgtggaagcggacctgaggagtcgcaattgtgaacaggctcagcgatatgaggcagcatcgacaatttatggaccgcacgcattatctgcttacattcagctcttcagaaaccttgctaaggctattgctacggacatggtagccaacctgagcagaggtccagaacctccctttttcaaacaattaatagttccattaattcctagtattgtggatagagcaccaaaaggcagaactttcggggatgtcctgcagccagcaaaacctgaatacagagtgggggaagttgctgaagttatatttgtaggtgctaacccgaagaattcagtacaaaaccagacccatcagaccttcctcactgtggagaaatatgaggctacttcaacatcgtggcagatagtgtgtaatgatgcctcctgggagactcgtttttattggcacaagggactcctgggtctgagtaatgcaacagtggaatggcatattccagacactgcccagcctggaatctacagaataagatattttggacacaatcggaagcaggacattctgaagcctgctgtcatactttcatttgaaggcacttccccggcttttgaagttgtaactatttagtgaaaagttgatagatcatttaaagaacagctttactctctacacattatataagtgatttcaaatgaatgtgaactagtgaactaccatgttgacttctataatcgtccctgtttggggacagatagtttactgctaatggggtggaggggtgtgtgtgtgtgtgtgtgtgtgtgtgtgtgtgtgtgtgtgtgtgtatgtgagagagagagagagagagagaggtttgtcccatatatcttgttccagcagccatatatcttgtggtctacagcctaaagcatgatttcccttgaagtcttggggttgtttaaaggagagtcccttcaatataaaacctctgaaatattagtgagaatggctcactaatgtgaacaatgtttaaattatttatttatatatagaattactgaatattagtactgggaaaatttatagaaatcatctagtcttacccttcatcttacatataagaaaaatggtcttttcttctaatcacatttacaaaatatgatataaaccttgaccatgaatgtatgagcctaattagagaaacagaaaatcagcatgtcagttttccttcattcaaaataacatagtctttctaagcagtcattctggagtt

SEQ ID NO: 335946 - DNA, 3715 bp, Artificial Sequence
  derived and/or modified sequence
taattttcttcctttcttttttttcctgcgagacggtgggcgggggtatctccctaagttgcccaggctggtcttgaactcctgggctcaagcgatcctcccgcctcagcctcccaaagggctgggattacaggcatgagccaccgcttcctgccaaaagagggctttagggcacccccagaacctgagatctccctcatctgtcatctttaaagagaaggaagtcgactcccagtcgagccatagtccatttgtcccgggcacggtgactccggggtggccaggaccaaatgtgtctccttctggcttttgcaccgcaccaactaatccgcggcaggccgcacagctgccctggccttcgcggaggactaaggcgagggcggtgtacgctgctccggagtcccaccgcgggagttgaggcagcggattccgagggcagggtggggcggaatcgggagggatgcggacccggtggaacgcactgcgcagacggcgccggcgcccgcacacagctgttgactagtcttccagctctcccctggaagtcgtccaggcgccggtctcttttttctgcctttttgtttccctccccgcgagtcggcgcgacggtgaatttccgtttccggcggtgtggaagcggacctgaggagtcgcaattgtgaacaggttcggtgctgcggctggggctcagcgatatgaggcagcatcgacaatttatggaccgcacgcattatctgcttacattcagctcttcagaaaccttgctaaggctattgctacggacatggtagccaacctgagcagaggtccagaacctccctttttcaaacaattaatagttccattaattcctagtattgtggatagagcaccaaaaggcagaactttcggggatgtcctgcagccagcaaaacctgaatacagagtgggggaagttgctgaagttatatttgtaggtgctaacccgaagaattcagtacaaaaccagacccatcagaccttcctcactgtggagaaatatgaggctacttcaacatcgtggcagatagtgtgtaatgatgcctcctgggagactcgtttttattggcacaagggactcctgggtctgagtaatgcaacagtggaatggcatattccagacactgcccagcctggaatctacagaataagatattttggacacaatcggaagcaggacattctgaagcctgctgtcatactttcatttgaaggcacttccccggcttttgaagttgtaactatttagtgaaaagttgatagatcatttaaagaacagctttactctctacacattatataagtgatttcaaatgaatgtgaactagtgaactaccatgttgacttctataatcgtccctgtttggggacagatagtttactgctaatggggtggaggggtgtgtgtgtgtgtgtgtgtgtgtgtgtgtgtgtgtgtgtgtgtgtatgtgagagagagagagagagagagaggtttgtcccatatatcttgttccagcagccatatatcttgtggtctacagcctaaagcatgatttcccttgaagtcttggggttgtttaaaggagagtcccttcaatataaaacctctgaaatattagtgagaatggctcactaatgtgaacaatgtttaaattatttatttatatatagaattactgaatattagtactgggaaaatttatagaaatcatctagtcttacccttcatcttacatataagaaaaatggtcttttcttctaatcacatttacaaaatatgatataaaccttgaccatgaatgtatgagcctaattagagaaacagaaaatcagcatgtcagttttccttcattcaaaataacatagtctttctaagcagtcattctggagttaacatgcctagttcagagccgctgtggatgctcaaatcatttctggaattgccttcaggacacaattatgagaaagtcagacttccaatattttgatcatgccttgtgtcttcctaagtgtccttatcccactggattgtgtctcttactcccaagacttattccaaatgattttttgactcttttcattaatcaaattcaccccaaaccagaaagttttgccattagcgtagatattaaaaatattactggctgggaaagcactcctcaaagcagaggttctaaattaatttatctgttcttttaccatttgctcactcactcactcatggacccattcaatcatagaatatttaagatttatatgcccagaattataatagtgcctaggccttgataattagtgaatttgtacttggggtgaatgtgtaagtgtcaaaaggtaactattatgaaggagaaaataatcgatttaatatgtaaattctggggaggcatttaaaaaatcagtaatcttcaagttatatcttgtgtatcatctgtgttggatactctaatttggggggaaagaggctccagacagtttgctaaatactattttgaaagttatttttgggcattgtaaaataccttgcttcataccccaaagaataagatatgacaatctgacatcgattgtctgaaagtactaattgcatttaaaattctttaagttaactacaacctcccagactgcaaagcaaatttccaaaccccaggtcatacttttgtatgtatgtaaaagctttagcattttagggaaaaaaatcaatctgtatttcaaaaataaactttgaggtttgaaaataataacaatattcataatggtagtattaacatctattatgtataacttaatctcaacataatttattgaattagaatgaacctggaacactttttgatgaattggtatcctagaggctgtttccttgggccttaactgctggaggattaggtaatcagggattccaagtgttgtgatcttttttctgatgacgccacagtcttcagtgtaaaagttcagaagcctaaaagaacaagtgatcctgaaagtagctgattccagacaagaaaattatattagaactcatgatatggttttttaaagtatttgttattactcagaagggttcatgaatcagtttccactacctctattccttctattgaagctttcctcaaatctacttgtgattcctgatagctcactggcaactgtaccaaggtggccactgtatcatctactgatccttctgcacctagcactcttggctccagataacgcacagaaacctattttctcaccagctgtcatttcttctagggcatgcagttctatgttcacagttcatgtgtaaaaataaaaccaaattcctggattatcaatatcagttctttacctgtgcataaaagaatatcatgaagtaattgaacttatctgttgatataaaaacacagatccaattcgtgtctgtggatgctgcaaggactggctcactggagccaaaccatgtggcggaaactcctgaaattggtggaaaaagtggaatatggcagattgggtaggtaggagaacaattttggagattttgtttctcatgttaaagtgtctgcattttatttgctgtaccctgcctactctggttttaaggattttttgacttcttcgaaaagcactgaataatctctttgccgggtctagattttttgatgagtactgtgtaaaattgtcaatattcaatggattatttaataataaattaagaattacactcataaaa

SEQ ID NO: 335947 - DNA, 2907 bp, Artificial Sequence
  derived and/or modified sequence
atgagactgctgagacacaccgagagcgagcagtggttccacagattccccctgtgccccagcctgaccttctgggcccccgtggccatgtggccccagacccactgcgtgggcggcagaagcagcggcctgaccaagtggacctacagcttcagcgccagcctgcaggacggcagcttcccctacgacagcgtgccctggcagcagaacaccaaccagccccccggcagcctgagcgtggtgaccaccgtgtggggcgtgaccaacaccagccagagccaggccgacgtgctgatcccccacgccacctgcagacccggccccctgctgatcaccgcctgggagccctacggccagtgccagcagccccacgagagcagaagacagccccacggcgtgggccacgaccaccagcagcccagaccccagctgcccaccgtgtgcggcgccgccgccgccgtgctgagccagggctggcccagaagcgccctgcaccccgccgagcacgtgtggcccgcccagctgcccagacagagaggcctgtggggccagcccgccgccgccgccgccgccgccgccgtggccgccgccgccgccaccgccaccgccaccgccaccgccaccgtggccgccctgcaggagacccagaacaaggacatcaaccagtacggccccgcccccgtgctgctgcccgacctgctgaaggacggcctgggcgacgaggagagaggcgcccccatcggcatgcagaacagcatgaaccccgccagcatggccgccggcatgacccccagcggcatgagcggcccccccatgggcatgaaccagcccagaccccccggcatcagccccttcggcacccacggccagagaatgccccagcagacctaccccggccccagaccccagagcctgcccatccagaacatcaagagaccctaccccggcgagcccaactacggcaaccagcagtacggccccaacagccagttccccacccagcccggccagtaccccgcccccaacccccccagacccctgaccagccccaactaccccggccagagaatgcccagccagcccagcagcggccagtaccccccccccaccgtgaacatgggccagtactacaagcccgagcagttcaacggccagaacaacaccttcagcggcagcagctacagcaactacagccagggcaacgtgaacagaccccccagacccgtgcccgtggccaactacccccacagccccgtgcccggcaaccccaccccccccatgacccccggcagcagcatccccccctacctgagccccagccaggacgtgaagccccccttcccccccgacatcaagcccaacatgagcgccctgccccccccccccgaccacaacgacgagctgagactgaccttccccgtgagagacggcgtggtgctggagcccttcagactggagcacaacctggccgtgagcaaccacgtgttccacctgagacccaccgtgcaccagaccctgatgtggagcgacctggagctgcagttcaagtgctaccaccacgaggacagacagatgaacaccaactggcccgccagcgtgcaggtgagcgtgaacgccacccccctgaccatcgagagaggcgacaacaagaccagccacaagcccctgcacctgaagcacgtgtgccagcccggcagaaacaccatccagatcaccgtgaccgcctgctgctgcagccacctgttcgtgctgcagctggtgcacagacccagcgtgagaagcgtgctgcagggcctgctgaagaagagactgctgcccgccgagcactgcatcaccaagaagagaaacttcagcagcgtggccgccagcagcggcaacaccaccctgaacggcgaggacggcgtggagcagaccgccatcaaggtgagcctgaagtgccccatcaccttcagaagaatccagctgcccgccagaggccacgactgcaagcacgtgcagtgcttcgacctggagagctacctgcagctgaactgcgagagaggcacctggagatgccccgtgtgcaagaccgccctgctggagggcctggaggtggaccagtacatgtggggcatcctgaacgccatccacagcgagttcgaggaggtgaccatcgaccccacctgcagctggagacccgtgcccatcaagagcgacctgcacatcaaggacgaccccgacggcatccccagcaagagattcaagaccatgagccccagccagatgatcatgcccaacgtgatggagatgatcgccgccctgggccccggccccagcccctaccccctgccccccccccccggcggcaccaacagcaacgactacagcagccagaacaactaccagggccacggcaacttcgacttcccccacggcaaccccggcggcaccagcatgaacgacttcatgcacggccccccccagctgagccacccccccgacatgcccaacaacatggccgccctggagaagcccctgagccaccccatgcaggagaccatgccccacgccggcagcagcgaccagccccaccccagcatccagcagggcctgcacgtgccccaccccagcagccagagcggcccccccctgcaccacagcggcgcccccccccccccccccagccagccccccagacagcccccccaggccgcccccagcagccacccccacagcgacctgaccttcaaccccagcagcgccctggagggccaggccggcgcccagggcgccagcgacatgcccgagcccagcctggacctgctgcccgagctgaccaaccccgacgagctgctgagctacctggacccccccgacctgcccagcaacagcaacgacgacctgctgagcctgttcgagaacaactag

SEQ ID NO: 335948 - DNA, 2907 bp, Artificial Sequence
  derived and/or modified sequence
atgaggctgcttcggcataccgaaagcgagcagtggttccataggttcccactgtgccctagtcttaccttttgggccccagttgccatgtggccacagacacactgcgtggggggtagatcttccggcctcactaaatggacatactctttcagtgcttctcttcaagatggctcttttccatatgatagcgttccctggcagcaaaatactaaccagccccctgggagtctttctgtggtcaccacagtttggggcgtgactaatacgagtcagtcccaggcggatgtgctgatcccccacgcgacttgtagacctggtcctctcttaatcaccgcatgggagccctacgggcaatgccagcaaccccacgaaagcagacgccagccccatggagtcggccatgatcaccagcagccccgcccccagttaccgacagtgtgcggagcagcagctgcagtcctctcccagggttggccgcgtagcgccctacatccggcagaacacgtatggcccgctcagttgccacggcaacgcggactgtgggggcagccggccgccgccgctgctgccgcagctgtggctgccgccgccgccacagcaacagctaccgctacagccaccgttgccgctttgcaggagacgcaaaacaaggacattaatcagtatggccccgccccagtgttgttgcccgacctgctgaaagatggccttggggacgaagagagaggtgcaccaattgggatgcagaacagcatgaatcccgcatccatggcagctgggatgactcctagcggtatgagcggcccaccaatgggcatgaaccaaccccgccccccaggaatctcacccttcggaacccacggccagcggatgccacagcaaacatacccggggccccgaccacagtctctccccatccagaacatcaagcggccctaccccggcgaacccaattacggcaatcagcagtacggcccaaactctcagttccccacacagccaggccagtaccccgctccaaaccccccccgcccactgaccagcccaaactatcccggtcagaggatgccttcccagccctcgtctgggcaatacccacccccaaccgtaaacatgggccagtactacaagcctgagcaattcaacggacaaaacaatacattctccggtagcagctatagcaactatagccagggaaacgttaaccggccgcctagacccgtgcccgtcgccaattacccccactcacctgtgcccggtaatccaacacctcccatgacccccgggtcctctattccgccttatctcagcccttcccaggacgtgaaaccaccattcccaccagatattaaacccaacatgagcgcactccccccaccccccgaccacaatgacgaactccgattgacgttcccggtgcgcgacggggttgtcttggagcctttccggcttgagcacaatctggctgtttctaaccacgtattccacctgcggcccaccgttcaccagacgctcatgtggtccgacctggaactacagttcaagtgttaccaccacgaggatcgtcaaatgaataccaattggccagcctctgtgcaagtatccgtcaacgctacccccctaaccatcgaaaggggggacaataagacctcccataaacctctgcacctgaagcatgtgtgtcagcctgggcgtaacactatccagattaccgtaacggcatgttgctgctcccacctctttgtgttgcagttagtgcacaggccatccgtgcggtcagtactgcagggactgctgaagaagaggctcctcccggctgaacattgcatcaccaagaagaggaacttttctagcgttgctgcatcaagcgggaataccaccctgaacggagaggatggtgtggaacagaccgctatcaaggtttcactgaagtgtccaatcaccttcagacgcatacagctgccagcccgtggtcacgattgtaagcacgtgcagtgtttcgacctcgagtcctacctccagctcaattgcgaaaggggaacatggcgctgccccgtgtgcaagactgcattactggagggtcttgaggtggatcaatacatgtggggtattctgaatgcaattcacagcgagttcgaggaggttacaatcgatcccacatgcagttggagacccgtccctatcaagagtgacttacacattaaggatgacccagacggtatcccttcaaaacgcttcaagactatgtccccttcacagatgattatgccgaacgtcatggagatgatcgcagcgctgggcccaggaccgtcaccataccccctaccgccgccccctggaggtacaaattccaatgattactccagtcagaataactaccagggccacggtaattttgattttccacacggtaaccccggcggtacatccatgaatgattttatgcatggccccccgcaattaagtcatcctcccgatatgcccaataatatggctgctctggagaaacccctgtcccaccccatgcaagagacaatgccgcatgctggctcttcggatcaaccacacccaagtattcagcagggcctgcatgtaccgcatccgagctctcagagcggcccgcccttgcaccactctggcgcacctcccccaccaccctcgcagcccccgcgacagccgccgcaggctgccccttctagtcacccacactccgatttgaccttcaacccgagctcagcacttgagggccaggctggcgcgcaaggggcatctgacatgcctgagcctagcttagacttgcttcctgaacttaccaaccccgacgagctgctgtcttatctggaccccccggacctgcctagtaacagcaatgacgacttattgagcctgttcgaaaataattag

SEQ ID NO: 335949 - DNA, 2907 bp, Artificial Sequence
  derived and/or modified sequence
atgaggttgctgaggcatacagagagtgagcagtggtttcatcgcttccctctgtgtccttctctcactttctgggccccagtggccatgtggccacagacacactgtgtaggtggtcggtcatcaggcttaacgaaatggacatattcattttcagcatcactccaagatgggtcgttcccctatgactctgtcccttggcagcagaacaccaaccagcctcccggctccctttccgtggtcaccacggtttggggagtaaccaacacatcccagagccaggctgacgttctcatcccccacgccacctgccgcccaggcccgctccttatcaccgcttgggaaccctatggccaatgccaacaaccccatgaatccaggcggcaaccccatggcgtcgggcatgaccaccagcaacccaggcctcaactccccacagtttgcggggcagcagcagcagttctcagccaaggctggccccgctcagccctacatccagcagagcatgtatggccggcccaactaccccggcagcgggggctttggggccagcccgcggcagccgctgcagcagcggcagtggcagcagcagcagccacagctacagccacagccacggccactgtggcagccctgcaggagacacagaacaaggatataaaccagtatggaccggccccagtgctgctccctgaccttctgaaggatgggttaggggatgaggagaggggagcccccataggaatgcagaacagcatgaaccccgcgagcatggcggctggcatgacgccctcggggatgagcggccctcccatgggcatgaaccagccccggccgcccggcatcagcccctttggcacacacgggcagcggatgccccagcagacctacccgggcccccggccccagtcccttcctattcagaacataaagaggccataccctggagagcccaactatggaaaccagcaatatggaccaaacagccagttccccacccagccaggccagtacccagcccccaaccccccgaggccactcacctcccccaactacccaggacagaggatgcccagccagccgagctccgggcagtacccgccccccacggtcaacatggggcagtattacaagccagaacagtttaatggacaaaataacacgttctcgggaagcagctacagtaactacagccaagggaatgtcaacaggcctcccaggccggttcctgtggcaaattacccccactcacctgttccagggaaccccacaccccccatgacccctgggagcagcatccctccatacctgtcccccagccaagacgtcaaaccacccttcccgcctgacatcaagccaaatatgagcgctctgccaccacccccagaccacaatgacgagctgcggctcacattccctgtgcgggatggcgtggtgctggagcccttccgcctggagcacaacctggcggtcagcaaccatgtgttccacctgcggcccacggtccaccagacgctgatgtggtctgacctggagctgcagttcaagtgctaccaccacgaggaccggcagatgaacaccaactggcccgcctcggtgcaggtcagcgtgaacgccacgcccctcaccattgagcgcggcgacaacaagacctcccacaagcccctgcacctgaagcacgtgtgccagccgggccgcaacaccatccagatcaccgtcacggcctgctgctgctcccacctcttcgtgctgcagctggtacaccggccctccgtccgctctgtgctgcaaggactcctcaagaagcgcctcctgcccgcagagcactgtatcacgaaaaagcggaatttcagcagcgtggctgcctcctcgggcaacacgaccctcaacggggaggatggggtggagcagacggccatcaaggtgtctctgaagtgccccatcacattccggcgcatccagctgcctgctcgaggacacgattgcaagcatgtgcagtgctttgatctggagtcatacctgcagctgaattgcgagagagggacctggaggtgtcctgtgtgcaaaaccgctctgctggagggcctggaggtggatcagtacatgtggggaatcctgaatgccatccactccgagtttgaagaggtcaccatcgatcccacgtgcagctggcggccggtgcccatcaagtcggacttacacatcaaggacgaccctgatggcatcccctccaagcggttcaagaccatgagtcccagccagatgatcatgcccaatgtcatggagatgatcgcagccctgggccccggcccgtccccctatcccctcccgcctcccccagggggcaccaactccaacgactacagcagccaaaacaactaccaaggccatggcaactttgacttcccccacgggaaccctggagggacatccatgaatgacttcatgcacgggcccccccagctctcccaccccccggacatgcccaacaacatggccgccctcgagaaacccctcagccaccccatgcaggaaactatgccacacgctggcagctctgaccagccccacccctccatacaacaaggtttgcacgtaccacaccccagcagccagtcagggcctccattacatcacagtggggctcctcctcctcctccttcccagcctccccggcagccgccacaggccgctcccagcagccatccacacagcgacctgacctttaacccctcctcagccttagagggtcaggccggagcgcagggagcgtccgacatgccggagccttcgctggatctccttcccgaactcacaaatcctgacgagctcctgtcttatctggacccccccgacctgccgagcaatagtaacgatgacctcctgtctctatttgagaacaactga

SEQ ID NO: 335950 - DNA, 2907 bp, Artificial Sequence
  derived and/or modified sequence
atgaggctgctgcggcacacagaaagtgagcagtggttccaccgcttccccctgtgccccagcctgaccttctgggcccctgtggccatgtggccccagacccactgtgtgggcggccgcagcagcggcctgaccaagtggacctacagcttcagcgccagcctgcaggacggcagcttcccctatgacagcgtgccctggcagcagaacaccaaccagcccccaggcagcctgtctgtggtgaccaccgtgtggggcgtgaccaacaccagccagagccaggctgatgtgctgatcccccacgccacctgccggcccggccccctgctgatcacagcctgggagccctacggccagtgccagcagccccatgagagccggcggcagccccatggagtgggccatgaccaccagcagccccggccccagctgcccaccgtgtgtggggctgctgctgctgtgctgagccagggctggcccaggtctgccctgcaccctgctgagcacgtgtggccagcccagctgccccggcagaggggcctgtggggccagcctgctgctgctgctgctgctgctgctgtggccgctgctgctgccacagccacagccacagccacagccaccgtggccgccctgcaggagacccagaacaaggacatcaaccagtatggccctgcccctgtgctgctgcctgacctgctgaaggatggcctgggagatgaggagcggggggcccccatcggcatgcagaacagcatgaacccagcctccatggccgccggcatgaccccatctggcatgagcggcccccccatgggcatgaaccagcccaggcctcctggcatcagccccttcggcacccacggccagaggatgccccagcagacctacccaggcccccggccccagagcctgcccatccagaacatcaagaggccctacccaggagagcccaactacggcaaccagcagtatggccccaacagccagttccccacccagcccggccagtacccagcccccaaccccccccggcccctgaccagccccaactacccaggccagaggatgcccagccagcccagcagcggccagtaccccccacccaccgtgaacatgggccagtactacaagccagagcagttcaacggccagaacaacaccttcagcggcagcagctacagcaactacagccagggcaatgtgaacagaccacccaggcctgtgcctgtggccaactacccccacagccctgtgcccggcaaccccaccccacccatgaccccaggcagcagcatccccccctacctgagccccagccaggatgtgaagccacccttccccccagacatcaagcccaacatgtctgccctgcccccacctccagaccacaatgatgagctgcggctgaccttccctgtgagagatggagtggtgctggagcccttccggctggagcacaacctggccgtgagcaaccacgtgttccacctgcggcccaccgtgcaccagaccctgatgtggagcgacctggagctgcagttcaagtgctaccaccatgaagatcggcagatgaacaccaactggccagcctctgtgcaggtgtctgtgaatgccacccccctgaccatcgagcggggggacaacaagaccagccacaagcccctgcacctgaagcacgtgtgccagcccggcaggaacaccatccagatcaccgtgacagcctgctgctgcagccacctgtttgtgctgcagctggtgcaccggcccagcgtgcgctctgtgctgcagggcctgctgaagaagaggctgctgcctgctgagcactgcatcaccaagaagaggaacttcagctctgtggccgccagcagcggcaacaccaccctgaatggagaagatggagtggagcagacagccatcaaggtgtccctgaagtgccccatcaccttccgccgcatccagctgcctgcccggggccatgactgcaagcacgtgcagtgctttgacctggagagctacctgcagctgaactgtgagcggggcacctggcgctgccctgtgtgcaagacagccctgctggagggcctggaggtggaccagtacatgtggggcatcctgaatgccatccacagcgagtttgaggaggtgaccatcgaccccacctgctcctggaggcctgtgcccatcaagagtgacctgcacatcaaggatgatcctgatggcatccccagcaagcgcttcaagaccatgagccccagccagatgatcatgcccaacgtgatggagatgattgctgccctgggccctggccccagcccctaccccctgcccccacctcctgggggcaccaacagcaatgactacagcagccagaacaactaccagggccacggcaactttgacttcccccacggcaaccctgggggcacctccatgaatgacttcatgcacggccccccccagctgagccaccccccagacatgcccaacaacatggccgccctggagaagcccctgagccaccccatgcaggagaccatgcctcatgctggcagcagtgaccagccccaccccagcatccagcagggcctgcacgtgccccaccccagcagccagagcggcccccccctgcaccacagcggggcccctcctcctccacccagccagcccccccggcagcccccccaggccgcccccagcagccacccccacagcgacctgaccttcaaccccagcagcgccctggagggccaggccggggcccagggcgccagtgacatgcctgagcccagcctggacctgctgcctgagctgaccaacccagatgagctgctgagctacctggaccccccagacctgcccagcaacagcaatgatgacctgctgagcctgtttgagaacaactag

SEQ ID NO: 335951 - DNA, 2907 bp, Artificial Sequence
  derived and/or modified sequence
atgcggctgctgcggcacaccgagagcgagcagtggttccaccggtttccgctgtgcccctccctgacgttttgggcccccgtggcaatgtggccccaaacccactgcgtcggcgggcgctccagcgggctcactaaatggacctactctttcagtgcatcactccaggacggatcttttccatatgactcagtgccttggcagcagaataccaaccagcctcccggcagcctttctgttgtcacaacagtgtggggggtcaccaacaccagccaatctcaagctgatgtgctcatcccccacgctacatgtcggcctgggccactgctaatcaccgcatgggagccttacggacagtgccagcagccacacgaaagtagacgacagccccacggagttggacacgaccaccaacagccgcgccctcaattgccgaccgtctgtggagccgcggctgccgttctgtcccagggatggcccaggtccgccctccaccccgcagagcatgtgtggcctgctcagctccctcgccaaagagggctgtgggggcagccagcagctgcggccgcggcggccgccgtcgccgccgcagccgctaccgcaacggcaactgcaactgctactgtggccgctctccaggagacacagaacaaggacatcaatcagtacggacccgcccctgtgctactcccggacctgctcaaagatgggctgggcgatgaggaacggggagcgcccattggtatgcagaactccatgaatccagcctcaatggctgccggcatgacaccttctggcatgtccggccctccgatgggtatgaatcagccccggccaccggggatctctcctttcggaacgcacggccagcgcatgccacaacagacatatcctggcccgagaccccagagcctgccaattcagaatatcaagaggccctaccccggtgagcctaattacggtaaccagcaatacggtccgaacagccagttcccaactcagcccgggcagtaccctgctccaaatcccccacgtcctctgacctcccctaactaccctggtcaacgaatgcctagccagcctagctctgggcagtatcctcctcctacagtgaacatgggacaatattacaaaccggagcaattcaacggccagaataacacattctctggctctagctacagtaattactcccaggggaacgttaatcggcccccaagacctgtgcctgttgcaaattatcctcattccccagtaccgggcaaccccactcctccaatgactccaggttcctctattcccccatacctgtcaccttctcaggacgtgaaaccaccattcccacccgatattaaaccaaatatgagcgcgttgccaccaccgccggatcacaacgacgagttgcgactcacattcccagtgagggatggggtggtacttgaaccatttaggttggaacacaacctggcagtctccaaccacgtgttccacttgcgtcccacggtacatcagaccctgatgtggagcgacctcgagctgcagttcaagtgctatcatcatgaagatcgccagatgaatacaaactggcctgctagtgtgcaggtgtcagttaacgccacgccccttaccatcgagagaggggataacaaaacatcacacaagcctctgcatctgaagcatgtatgtcagccaggaaggaataccattcagatcacagtgacagcttgctgttgttcccacctgtttgtcctgcaactggtgcatcggccctctgtgaggagcgtcctccaggggctgctcaagaagcggctgctgcccgcagagcattgcattacaaagaagcgaaacttttcaagcgtggcagcctcaagcggcaatacaaccctgaatggggaagacggcgtggaacagacagccattaaggtcagcctaaaatgtcctatcacattcaggcggatccagcttcctgccagagggcatgactgcaaacatgtgcagtgctttgacctcgagtcttacctgcagctgaattgtgaaaggggcacgtggcgctgcccagtctgtaagaccgcccttcttgagggccttgaagttgaccagtatatgtgggggatactgaatgccatccatagtgaatttgaagaagtgaccattgaccccacgtgtagctggagaccagtgcccatcaaatcggatctgcacattaaagacgacccggatggcatcccaagtaagcggttcaagaccatgtcgccatcccaaatgataatgccaaacgtaatggaaatgattgcagcgttgggccccggtccatccccttatcctctgccgcctccacctgggggcactaacagcaatgactacagcagccagaataattaccagggccacggtaactttgacttcccacacgggaaccccggtggcacatctatgaacgattttatgcacggacccccacagctttcgcaccctcccgacatgccgaacaacatggctgcattagaaaagccgttgagtcatcccatgcaggagactatgccccacgccgggtcttctgatcaacctcacccttcaatacaacagggtctgcacgtgccccacccttcctctcaatccggaccacctcttcaccattccggagctccacctccgccaccttcacagccacccaggcaaccacctcaggccgcaccaagctcccatccgcattctgatctgaccttcaatccaagtagcgcgcttgaaggacaggccggagcccagggcgcctccgacatgccggagcccagcctggacctgctgcctgagcttaccaacccagacgaacttctaagttacctagacccacccgatctccccagcaacagcaacgacgacctgcttagcttgttcgaaaataactag

SEQ ID NO: 335952 - DNA, 2907 bp, Artificial Sequence
  derived and/or modified sequence
atgcggctcctgcgccataccgagtctgaacaatggttccaccgtttccccctttgccccagcctcactttttgggccccagtggccatgtggccccagacgcactgcgtgggcggtaggagcagcgggttaacaaagtggacttactccttcagtgccagtctgcaggacggtagcttcccatatgattctgtgccttggcagcaaaacacaaatcagccgccaggctcactgagtgtagtgacaacagtctggggggttactaataccagccagtctcaggctgatgttctcattccacacgctacatgcaggcccggacctctcctgataacagcatgggagccttacggacagtgtcaacaacctcacgaatcccgtcgccaaccccacggtgtgggccacgatcaccagcagcctcggcctcagctgccgaccgtgtgcggcgctgccgcagctgttttgtcccagggttggcctcgctccgccctgcaccctgccgagcacgtctggccagcccagttaccaagacaaagaggattatggggacagcctgccgctgccgcagctgccgcagctgtcgccgcagccgcagctacagctacagccacggccacagccacagtggccgctttacaagagacccaaaataaggacattaaccagtacggaccagcccctgtgcttttgcctgatctgttaaaagatgggctcggcgatgaggagcgcggagcccctatcggaatgcaaaactccatgaacccagcctccatggcagctggcatgacaccctcaggaatgtccggcccaccaatggggatgaaccagcccaggcctcctggcattagtccatttgggacccatggacagagaatgccacagcaaacctaccccggtcccagacctcagtctctccccatacagaatattaagaggccctacccaggcgagcctaactacggcaaccaacagtacggcccaaactcgcagttcccaacccaaccaggtcagtatcccgctcctaatcctcctcgtccacttacctcaccaaactaccctggacagcggatgccgagccaacccagctccggtcagtatccaccaccaactgtcaatatgggacaatactataagcctgaacagttcaatgggcagaacaacacatttagcgggtccagctatagtaactattcacagggaaatgtaaaccgaccaccacgacccgttccggtcgccaactatcctcactcccctgttcccggtaaccccactcccccaatgacacctggctcatctattcccccttacttatcccccagtcaagatgttaaaccgccttttccgcctgacataaaacccaacatgagcgccctgccccctcctcccgatcataatgatgagctgcggttgacgtttccggtacgagacggagttgtcctggaacctttcagattagaacataatctcgctgtgtccaaccatgtgttccaccttaggcctacggtacaccagacactgatgtggagcgatcttgaactgcaatttaaatgttaccaccatgaggaccgccaaatgaacaccaactggcctgcctccgtgcaggtctcagtgaacgccacaccattgacaattgaaaggggggataacaaaacaagtcacaagccactccatctgaaacacgtctgccaacctggcagaaataccattcaaattacagtgaccgcatgttgctgttcacatctgttcgtgttgcaactcgtccatcgaccttcggtgagaagcgtgttacaaggactactgaagaagcgcctgttacccgcagagcattgtatcaccaagaagaggaatttctctagcgtggccgctagctctggcaacaccacgctgaatggcgaggatggagtggaacagacagccattaaagtatcactgaaatgccccataacttttaggcgcatacaacttcctgcccgtggacatgattgtaagcacgttcagtgcttcgacctggagtcatacttgcagctaaactgtgagcgaggaacctggcggtgtcctgtttgtaaaactgctctgctagagggtcttgaagtcgaccagtatatgtggggcattctcaacgccattcattccgagtttgaagaggtaacaattgatcccacctgtagttggaggccagtacccattaagagcgatttgcatattaaagatgatcctgacggaatcccatcaaagcgcttcaaaacaatgtcaccttcacaaatgataatgcccaatgtgatggaaatgattgccgcactagggcctggcccttccccatacccactacctccaccacctggcggaaccaatagcaatgattatagttctcagaataattatcaggggcatggcaatttcgactttcctcacgggaacccagggggaacttccatgaatgacttcatgcacggtccccctcaactgtctcaccctccagatatgccaaacaacatggcggctctcgaaaagcccctttcccacccgatgcaggagacaatgccacatgcaggctcgtccgaccagcctcatccaagtatacagcaaggactgcacgtaccccacccatcctcccagtcgggcccacccctacatcattcaggggcaccgcctccccctcccagccagcccccaagacaacctccacaggccgctccctctagccatccccatagcgatttaacctttaatccatcaagtgccctggaggggcaagctggcgctcagggagcttccgacatgccagagccgagcctcgatctgctccccgaacttacgaacccagatgagctgctcagttacctggacccacccgacctcccttctaactccaatgatgatctgctgagcttattcgagaacaactag

SEQ ID NO: 335953 - protein, 654 aa, Artificial Sequence
  derived and/or modified sequence
MEAEDLSKAEDRNEDPGSKNEGQLAAVQPDVPHGGQSSSPTALWDMLERKFLEYQQLTHKSPIERQKSLLSLLPLFLKAWEHSVGIICFPSLQRLAEDVSDQLAQQLQKALVGKPAEQARLAAGQLLWWKGDVDQDGYLLLKSVYVLTGTDSETLGRVAESGLPALLLQCLYLFFVFPLDKDELLESDLQVQKMFVQMLLNICSDSQGLEGLLSGSELQSLLIATTCLREHSCCFWKEPTFCVLRAISKAQNLSIIQYLQATDCVRLSLQNLSRLTDTLPAPEVSEAVSLILGFVKDSYPVSSALFLEFENSEGYPLLLKVLLRYDGLTQSEVDPHLEELLGLVVWLTTCGRSELKVFDSITYPQLEGFKFHHEASGVTVKNLQAFQVLQNVFHKASDSVLCIQVLSVIRTMWAWNARNFFLLEWTLQPISQFVEIMPLKPAPVQEHFFQLLEALVFELHYVPHEILRKVQHLIKESPGPSCTLMALQSILSIAGGDPLFTDIFRDSGLLGLLLAQLRKQAKIMRKSGNKVSTPGVQDPERELTCVMLRIVVTLLKGSVRNAVVLKDHGMVPFIKIFLDDECYREASLSILEQLSAINAEEYMSIIVGALCSSTQGELQLKLDLLKVISSPPLRLASLWICTKRSTFAQAFVFM

SEQ ID NO: 335954 - protein, 552 aa, Artificial Sequence
  derived and/or modified sequence
  misc_feature (1)..(1): Xaa can be any naturally occurring amino acid
XDDTVVWAEECVACANWLWMNTADNLELSLFSHLLEILQSPREGPRNAEAAHQAQLIPKLIFLFNEPSLIPSKISTIIGILACQLRGHFSTQDLLRIGLFVVYTLKPSSVNERQICMDGALDPSLPAGSQTSGKTIWLRNQLLEMLLSVISSPQLHLSSESKEEMFLKLGPDWFLLLLQGHLHASTTVLALKLLLYFLASPSLRTRFRDGLCAGSWVERSTEGVDIVMDNLKSQSPLPEQSPCLLPGFRVLNDFLAHHVHIPEVYLIVSTFFLQTPLTELMDGPKDSLDAMLQWLLQRHHQEEVLQAGLCTEGALLLLEMLKATMSQPLAGSEDGAWAQTFPASVLQFLSLVHRTYPQDPAWRAPEFLQTLAIAAFPLGAQKGVGAESTRNTSSPEAAAEGDSTVEGLQAPTKAHPARRKLREFTQLLLRELLLGASSPKQWLPLEVLLEASPDHATSQQKRDFQSEVLLSAMELFHMTSGGDAAMFRDGKEPQPSAEAAAAPSLANISCFTQKLVEKLYSGMFSADPRHILLFILEHIMVISAPLQARDFS

SEQ ID NO: 335955 - DNA, 1659 bp, Artificial Sequence
  derived and/or modified sequence
tgagacgacaccgtggtgtgggccgaggagtgcgtggcctgcgccaactggctgtggatgaacaccgccgacaacctggagctgagcctgttcagccacctgctggagatcctgcagagccccagagagggccccagaaacgccgaggccgcccaccaggcccagctgatccccaagctgatcttcctgttcaacgagcccagcctgatccccagcaagatcagcaccatcatcggcatcctggcctgccagctgagaggccacttcagcacccaggacctgctgagaatcggcctgttcgtggtgtacaccctgaagcccagcagcgtgaacgagagacagatctgcatggacggcgccctggaccccagcctgcccgccggcagccagaccagcggcaagaccatctggctgagaaaccagctgctggagatgctgctgagcgtgatcagcagcccccagctgcacctgagcagcgagagcaaggaggagatgttcctgaagctgggccccgactggttcctgctgctgctgcagggccacctgcacgccagcaccaccgtgctggccctgaagctgctgctgtacttcctggccagccccagcctgagaaccagattcagagacggcctgtgcgccggcagctgggtggagagaagcaccgagggcgtggacatcgtgatggacaacctgaagagccagagccccctgcccgagcagagcccctgcctgctgcccggcttcagagtgctgaacgacttcctggcccaccacgtgcacatccccgaggtgtacctgatcgtgagcaccttcttcctgcagacccccctgaccgagctgatggacggccccaaggacagcctggacgccatgctgcagtggctgctgcagagacaccaccaggaggaggtgctgcaggccggcctgtgcaccgagggcgccctgctgctgctggagatgctgaaggccaccatgagccagcccctggccggcagcgaggacggcgcctgggcccagaccttccccgccagcgtgctgcagttcctgagcctggtgcacagaacctacccccaggaccccgcctggagagcccccgagttcctgcagaccctggccatcgccgccttccccctgggcgcccagaagggcgtgggcgccgagagcaccagaaacaccagcagccccgaggccgccgccgagggcgacagcaccgtggagggcctgcaggcccccaccaaggcccaccccgccagaagaaagctgagagagttcacccagctgctgctgagagagctgctgctgggcgccagcagccccaagcagtggctgcccctggaggtgctgctggaggccagccccgaccacgccaccagccagcagaagagagacttccagagcgaggtgctgctgagcgccatggagctgttccacatgaccagcggcggcgacgccgccatgttcagagacggcaaggagccccagcccagcgccgaggccgccgccgcccccagcctggccaacatcagctgcttcacccagaagctggtggagaagctgtacagcggcatgttcagcgccgaccccagacacatcctgctgttcatcctggagcacatcatggtgatcagcgcccccctgcaggccagagacttcagctag

SEQ ID NO: 335956 - DNA, 1659 bp, Artificial Sequence
  derived and/or modified sequence
tgagatgacactgtcgtttgggctgaggagtgtgtggcatgcgccaactggctgtggatgaacaccgccgataatttggagctgtcgctgttttcccatctgctcgaaatcttgcagtccccaagagagggaccaagaaatgctgaagccgcgcaccaggctcagctgatacccaaattgatcttcctgttcaatgaaccctctctgatccctagtaaaattagcacaattatcgggattctcgcatgccaactgcgcgggcacttttctacccaggacctcctccgcatcggcctgtttgtagtgtataccctcaagccctcttctgtgaatgaaagacagatttgcatggacggcgccctggatcctagcctgcccgctggatcccaaacaagcggaaaaacaatctggcttcgaaatcaactcctggaaatgctgctgtctgtcatctccagcccccaattgcacctgtcaagcgagagtaaagaagagatgttcttgaagcttgggcctgattggtttttacttctgttacagggccacctccatgcgtccaccaccgttctagctcttaagctgctgttgtattttttggcgtccccttctttgcggactaggtttcgagatggactctgcgctggctcctgggtggagcgatcaacagagggggtagatattgtgatggacaatctgaagagtcagtcccctctgccagaacagtccccatgtctactaccagggtttcgtgtcctcaacgacttccttgcccatcacgttcatattcccgaggtctacctgatcgtgtctacattttttctccagacgccgctcactgagctgatggatggacccaaggactctctggatgctatgctccagtggttgctccagagacaccaccaagaagaagttctacaggccgggctgtgtacagagggggcgctcttattgctggaaatgttgaaggcaacaatgtcccagccactagccggtagcgaggacggagcctgggcccaaacttttccagcatccgttcttcagtttctttcacttgtacaccggacatatccccaagaccccgcatggcgggcccctgagttccttcaaacattggcgatagcagcatttccgctgggcgcccagaagggagtgggtgctgaatccacccggaatacgagttctcccgaggcggccgccgaaggggacagtacggttgagggattacaagcgcctactaaagctcatcccgcccggaggaaactccgcgaattcacacagctgctgctcagggaactcctgctcggggcctcctccccaaaacagtggttgcccctcgaagttctgctcgaagcgtcacccgaccacgctacctctcagcagaaacgcgatttccagtcagaggttctgttatccgccatggagctgttccatatgaccagcgggggtgacgccgccatgttccgcgacggtaaagagccacagccctccgccgaagcagcggccgccccatctctggccaatatttcttgctttacccagaagctggtagagaagctctatagcgggatgttctccgccgaccccaggcacatactgctcttcatacttgagcatatcatggtaatctctgcacctctgcaggcccgagatttcagttag

SEQ ID NO: 335957 - DNA, 1659 bp, Artificial Sequence
  derived and/or modified sequence
tgagatgacacagtggtgtgggccgaggagtgtgtggcctgtgccaactggctgtggatgaacacagctgacaacctggagctgagcctcttcagccacctgctggagatcctgcagagcccccgggagggccccagaaatgctgaggccgcccaccaggcccagctgatccccaagctgatcttcctgttcaatgagcccagcctcatccccagcaagatcagcaccatcatcggcatcctggcctgccagctgcggggccacttcagcacccaggacctgctgagaattggcctgtttgtggtgtacaccctgaagcccagctctgtgaatgaaaggcagatctgcatggatggagccctggaccccagcctgcctgctggcagccagaccagcggcaagaccatctggctgaggaaccagctgctggagatgctgctgagcgtcatcagcagcccccagctgcacctgagcagcgagagcaaggaggagatgttcctgaagctgggccctgactggttcctgctgctgctgcagggccacctgcacgccagcaccaccgtgctggccctgaagctgctgctgtacttcctggccagccccagcctgcggacccgcttcagagatggcctgtgtgccggctcctgggtggagaggagcacagaaggagtggacatcgtgatggacaacctgaagagccagagccccctgcctgagcagagcccctgcctgctgcccggcttccgggtgctgaatgacttcctggcccaccacgtgcacatccctgaggtgtacctgattgtgtccaccttcttcctgcagacccccctgacagagctgatggatggccccaaggacagcctggatgccatgctgcagtggctgctgcagaggcaccaccaggaggaggtgctgcaggccggcctgtgcacagaaggagccctgctgctgctggagatgctgaaggccaccatgagccagcccctggccggctctgaagatggagcctgggcccagaccttccctgcctctgtgctgcagttcctgagcctggtgcacaggacctacccccaggaccctgcctggagggcccctgagttcctgcagaccctggccatcgccgccttccccctgggcgcccagaagggcgtgggcgctgagagcaccaggaacaccagcagccctgaggccgctgctgagggggacagcacagtggagggcctgcaggcccccaccaaggcccacccagcccggaggaagctgcgggagttcacccagctgctgctgcgggagctgctgctgggcgccagcagccccaagcagtggctgcccctggaggtgctgctggaggccagcccagaccacgccaccagccagcagaagagggacttccagagcgaggtgctgctgagcgccatggagctgttccacatgaccagcggaggagatgctgccatgttcagagatggcaaggagccccagcccagcgctgaggccgctgctgcccccagcctggccaacatcagctgcttcacccagaagctggtggagaagctgtacagcggcatgttttctgctgaccccaggcacatcctgctcttcatcctggagcacatcatggtgatcagcgcccccctgcaggcccgggacttctcctag

SEQ ID NO: 335958 - DNA, 1659 bp, Artificial Sequence
  derived and/or modified sequence
tgagacgacaccgtggtgtgggccgaggagtgcgtggcctgcgccaattggctgtggatgaacaccgccgataatttagaactcagcctgttctcccatctactcgagatccttcaaagtcccagagagggaccacggaatgctgaagcggcccaccaggcccaactgatccccaagttaatctttctgttcaacgagccctcccttattccttcgaagatcagtacaatcatcggtatcctggcttgccagctacggggtcacttctccactcaggatctcttgcgcattggtttgttcgtggtttatacactgaaaccaagctctgtgaatgagagacaaatttgtatggacggtgctctcgacccttccctgccagcagggtctcagacttccgggaagaccatatggctgagaaatcagctgctggaaatgctgcttagtgttatctctagccctcaattgcatctgtctagtgaaagtaaggaggaaatgttcctaaagctaggacccgactggtttcttcttttactgcagggacatttgcacgccagtaccactgtgctcgcgctgaagcttctcctgtattttttggcctcaccatccctgcgtacaaggttcagggatggattgtgtgcaggctcttgggttgagcgctctaccgaaggcgtggacatcgtgatggataatctgaaatcacaatcgcccctgcctgagcaatcgccctgcctgctgccaggtttcagggtactgaacgatttcctggcccatcatgtgcatattcctgaggtttatcttattgttagtacctttttcctgcagacgcctttgaccgaattaatggatggaccaaaggacagcctggatgccatgctgcagtggctgttgcagcgacaccatcaggaggaggtgctacaggctggtctttgcacggagggcgcactgcttttgctggaaatgttgaaagcaaccatgtcacaacctctggccggctccgaggatggggcatgggctcagacttttccagccagtgtgcttcagtttctcagcctcgtgcatcgcacatacccgcaagatcctgcctggcgcgctccggagtttcttcagacattagccatagcagcctttcctctaggtgctcagaaaggagttggagccgagtctactaggaataccagttcaccagaggccgcagccgaaggtgactcaaccgtagaaggcttgcaggctcctaccaaggctcaccctgctcgcaggaaactgcgggaattcacgcaattgttgttgagagaactcttgctgggagcctcgagtcccaaacagtggcttcccctggaggtcctgctggaggcctcccctgatcacgctaccagccagcagaagagggacttccaatccgaggtcctgctttcggcaatggaactgtttcatatgacaagcggcggtgatgccgccatgttcagagacggtaaggagccccagccaagcgcggaggccgccgctgcaccctcccttgcaaacatttcttgttttacccaaaaactcgtggaaaaactgtactcaggaatgttctctgctgaccccagacacattcttctgtttattctggagcatattatggtcatttcagcccctctccaggccagagatttctcgtag

SEQ ID NO: 335959 - DNA, 1659 bp, Artificial Sequence
  derived and/or modified sequence
taagacgacacggtagtgtgggcagaggagtgcgtggcgtgtgctaactggctgtggatgaacacagccgacaatctggagctgagtctcttttctcatctcctggagatactgcagagcccccgtgagggtcccagaaatgccgaggccgcacatcaggcacagctcattccaaagctaatattcttgttcaacgaacccagcctaattccgagtaagatctctactattatcgggatactggcttgccagctgcgaggccacttttcaacccaggatttattacggatcggcttgtttgttgtgtacactctgaaaccttcctcagttaacgagaggcagatttgcatggacggcgctctagacccaagtctgccagcaggcagccagactagcggaaaaacaatttggttgagaaatcaacttctggaaatgctgctgtcagtgataagtagtccacagctccacctcagcagtgagagcaaagaagagatgtttttaaaactggggccagattggtttcttctgctcctgcagggacacctacatgcttcaactaccgttctagccttgaagctgctgctctatttcctcgcatccccttctctgcgaacacgcttccgggatggactctgcgcgggttcctgggttgagagatctaccgagggggtggatatagtcatggataacctgaaaagccagtccccgctccctgaacagtccccttgtctgctgccgggattccgagttcttaatgattttctggcccaccatgtgcacattcccgaggtgtatctgattgtcagtacttttttcctacagacccccctgactgaactaatggatggtcccaaagactccttggatgctatgttgcagtggctgctgcagcggcaccatcaggaagaggtgctgcaagcaggattgtgcacggagggagcgcttttgctgttggaaatgctgaaggcgacaatgagccaaccgctggccggtagcgaagacggcgcttgggcacagacctttcccgctagtgttcttcagttcctgtccctggtccacagaacctacccccaggatccagcttggagagcacccgaattcttacaaaccctggctatcgctgcctttcctctaggagctcaaaagggtgtgggcgctgaatccacacggaatacgtcctcccccgaggctgccgctgaaggcgattccactgtcgagggcctccaggccccaactaaggctcacccagcacggcgtaagctacgggagtttacccaattgctgttgcgtgagctcttgctgggcgcatcctccccaaaacagtggcttccgcttgaggtgcttttagaggccagcccagaccatgcaactagccagcagaaacgggacttccagtccgaagtgcttctgagcgcgatggaattgtttcatatgacttctggcggtgatgcagccatgtttcgcgatggcaaggagccgcagccatcagcagaagcagctgctgctcctagtcttgccaacatctcttgcttcactcagaaactcgtcgagaaattgtatagcggcatgttttcagcggatccccgacacatcctgctgttcattttggaacacatcatggtaatttccgccccactgcaggctcgggacttcagctag

SEQ ID NO: 335960 - DNA, 2609 bp, Artificial Sequence
  derived and/or modified sequence
agatgacactgtggtttgggctgaagaatgtgttgcctgcgcaaattggctctggatgaatactgcagacaatctggagctcagcctcttttcccatcttttggaaatccttcaatcaccaagggaaggacccaggaatgctgaagctgcccaccaggcacagcttatacccaagctcatcttcctattcaatgagccgagcctcatcccctccaagatctccaccatcattggcatcctggcctgtcagctgaggggccacttcagcacccaggacttgctcaggattgggctgtttgttgtgtacaccctcaagccttcgtcggtgaatgagaggcagatctgcatggacggagccctggacccttccctgcctgctggaagccaaacatctggaaagacaatctggctcagaaaccagttgctggagatgctgctcagtgtaatatcttccccccagcttcatctgtcctctgagtcaaaggaagagatgtttctgaaactggggcctgactggttcctgctgctcctgcagggccacctgcatgccagcaccactgtgctggcattgaagctgctgctgtactttctggcaagcccctccctccgcacacggtttagagatggcctgtgtgcaggatcctgggtggaacgcagcactgagggcgtggatattgtaatggacaacctgaagagccagtcaccactgcctgagcaaagcccatgcctgcttcctgggttccgtgtcttgaatgactttctggcccaccacgtccacattccagaggtctacctcatcgtctccaccttcttcctgcagacaccactcacagagctgatggacgggcccaaagacagccttgatgccatgcttcagtggctcctgcagaggcaccaccaggaagaagtcctccaggctgggctgtgcacagaaggtgccttgctcctcctggaaatgctgaaggccaccatgagccagcccctggcaggttctgaggatggtgcctgggcacagaccttcccggccagcgtgctgcagttcctcagcctcgtccaccgcacctacccccaggacccagcgtggcgagccccggagttcctccagaccttggccatagccgccttccccctgggagcccaaaagggggttggggctgagtccacccggaacaccagcagtcctgaggccgcagctgaaggcgacagcacagtggagggtctccaggctcccaccaaggcacatcccgcccggaggaagctgagggagttcacgcagctcctcttgagggagctcctgcttggagcctccagccccaagcagtggctgcccctggaggtgctcctggaggcttctccagaccacgccaccagccaacagaagcgagacttccagtccgaggtcctgctttctgctatggaactattccacatgacaagtggaggtgatgcagcgatgttcagagacggcaaagagcctcagccaagtgcagaagctgctgctgccccttctcttgccaacatctcctgcttcacccagaagctggtggagaagctgtacagtgggatgttctcggcagaccccaggcatatcctcctcttcatcctggagcacatcatggtgatctcagccccattacaagctagagacttttcctgacaagcctccaggaaacctttgctcaaaccctccctgtgatggggaaccccctaaaattcaagttgtcccacccagggggatgtctgtgattcttggaaagaactttctgttatcaagctgggatctacctccagcaactcctgccagcagtcctggttatgccctctgcagcagaattaggaggaccactctccttcctcttcacatctcatagagagtgaaattggctcccagcacccttctgactgcagagtcacccacagacctcaggactgggcctcttcacagtttctagagccatcttcacttgtctgatgagcaggtccaagcaaacctggaaagacttgaattcaaaggcttcttcaggaacaactccaagagaggagaaatagcccttgtcagctctgtgagggttaaaatcagattcctggcaagttgtgttgtaaatggaaagaagctgctgagctccctatggctaaagcatggactcccagctaatatcccaaacataggtgccagtgggggccaccgtgctttcagggggaccaggcctgagggctcggctccccacatatccaccagcctcctctcttgcttgctgtctgtgatgcctgcccctcttaacctctgtttgagacccatctgaggagcaggagaggaacatgataaagaaatgaatcccaaaccccaacaggtttaaacagaccttcacttcatgagtagaaacattgcgttacctgtgaaattctaagggagtagcctataacaaattcattttctatcggactgaaaaactttgtgcatactctttgtattatggattcttttcatggaagccaaacagatgtttggagatgtatggaccagtccatgctaaggctacaaatcagggtcttctacttctccctctaagtttcttttgaattaaaatcttctggactccgtctccagt

SEQ ID NO: 335961 - protein, 1042 aa, Artificial Sequence
  derived and/or modified sequence
MEAEDLSKAEDRNEDPGSKNEGQLAAVQPDVPHGGQSSSPTALWDMLERKFLEYQQLTHKSPIERQKSLLSLLPLFLKAWEHSVGIICFPSLQRLAEDVSDQLAQQLQKALVGKPAEQARLAAGQLLWWKGDVDQDGYLLLKSVYVLTGTDSETLGRVAESGLPALLLQCLYLFFVFPLDKDELLESDLQVQKMFVQMLLNICSDSQGLEGLLSGSELQSLLIATTCLREHSCCFWKEPTFCVLRAISKAQNLSIIQYLQATDCVRLSLQNLSRLTDTLPAPEVSEAVSLILGFVKDSYPVSSALFLEFENSEGYPLLLKVLLRYDGLTQSEVDPHLEELLGLVVWLTTCGRSELKVFDSITYPQLEGFKFHHEASGVTVKNLQAFQVLQNVFHKASDSVLCIQVLSVIRTMWAWNARNFFLLEWTLQPISQFVEIMPLKPAPVQEHFFQLLEALVFELHYVPHEILRKVQHLIKESPGPSCTLMALQSILSIAGGDPLFTDIFRDSGLLGLLLAQLRKQAKIMRKSGNKVSTPGVQDPERELTCVMLRIVVTLLKGSVRNAVVLKDHGMVPFIKIFLDDECYREASLSILEQLSAINAEEYMSIIVGALCSSTQGELQLKLDLLKSLLRILVTPKGRAAFRVSSGFNGLLSLLSDLEGSLQEPPLQAWGAVSPRQTLELVLYTLCAVSAALHWDPVNGYFFRRNGLFEKLAEDLCLLGCFGALEEEGNLLRSWVDTKARPFADLLGTAFSSSGSLPPRIQSCLQILGFLDSMASGTLHLRGDLKESLRTKQGPVVDVQKGETGSDPQRNFKQWPDLEERMDEGDAAIMHPGVVCIMVRLLPRLYHEDHPQLSEEIQCSLASHIQSLVKSEKNRQVMCEAGLLGTLMASCHRALVTSGSPLHSRLIRIFEKLASQAIEPDVLRQFLGLGIPSSLSATTKILDSSHTHRGNPGCSGSQTAQGLAEGPWPAAPDAGLHPGVTQAPQPLGESQDSTTALQTALSLISMTSPHIWKPNIWKDNLAQKPVAGDAAQCNIFPPASSVL

SEQ ID NO: 335962 - protein, 1052 aa, Artificial Sequence
  derived and/or modified sequence
LNSDLLCHGMEAEDLSKAEDRNEDPGSKNEGQLAAVQPDVPHGGQSSSPTALWDMLERKFLEYQQLTHKSPIERQKSLLSLLPLFLKAWEHSVGIICFPSLQRLAEDVSDQLAQQLQKALVGKPAEQARLAAGQLLWWKGDVDQDGYLLLKSVYVLTGTDSETLGRVAESGLPALLLQCLYLFFVFPLDKDELLESDLQVQKMFVQMLLNICSDSQGLEGLLSGSELQSLLIATTCLREHSCCFWKEPTFCVLRAISKAQNLSIIQYLQATDCVRLSLQNLSRLTDTLPAPEVSEAVSLILGFVKDSYPVSSALFLEFENSEGYPLLLKVLLRYDGLTQSEVDPHLEELLGLVVWLTTCGRSELKVFDSITYPQLEGFKFHHEASGVTVKNLQAFQVLQNVFHKASDSVLCIQVLSVIRTMWAWNARNFFLLEWTLQPISQFVEIMPLKPAPVQEHFFQLLEALVFELHYVPHEILRKVQHLIKESPGPSCTLMALQSILSIAGGDPLFTDIFRDSGLLGLLLAQLRKQAKIMRKSGNKVSTPGVQDPERELTCVMLRIVVTLLKGSVRNAVVLKDHGMVPFIKIFLDDECYREASLSILEQLSAINAEEYMSIIVGALCSSTQGELQLKLDLLKSLLRILVTPKGRAAFRVSSGFNGLLSLLSDLEGSLQEPPLQAWGAVSPRQTLELVLYTLCAVSAALHWDPVNGYFFRRNGLFEKLAEDLCLLGCFGALEEEGNLLRSWVDTKARPFADLLGTAFSSSGSLPPRIQSCLQILGFLDSMASGTLHLRGDLKESLRTKQGPVVDVQKGETGSDPQRNFKQWPDLEERMDEGDAAIMHPGVVCIMVRLLPRLYHEDHPQLSEEIQCSLASHIQSLVKSEKNRQVMCEAGLLGTLMASCHRALVTSGSPLHSRLIRIFEKLASQAIEPDVLRQFLGLGIPSSLSATTKILDSSHTHRGNPGCSGSQTAQGLAEGPWPAAPDAGLHPGVTQAPQPLGESQDSTTALQTALSLISMTSPVAGSQTSGKTIWLRNQLLEMLLSVISSPQLHLSSE

SEQ ID NO: 335963 - DNA, 3159 bp, Artificial Sequence
  derived and/or modified sequence
ctgaacagcgacctgctgtgccacggcatggaggccgaggacctgagcaaggccgaggacagaaacgaggaccccggcagcaagaacgagggccagctggccgccgtgcagcccgacgtgccccacggcggccagagcagcagccccaccgccctgtgggacatgctggagagaaagttcctggagtaccagcagctgacccacaagagccccatcgagagacagaagagcctgctgagcctgctgcccctgttcctgaaggcctgggagcacagcgtgggcatcatctgcttccccagcctgcagagactggccgaggacgtgagcgaccagctggcccagcagctgcagaaggccctggtgggcaagcccgccgagcaggccagactggccgccggccagctgctgtggtggaagggcgacgtggaccaggacggctacctgctgctgaagagcgtgtacgtgctgaccggcaccgacagcgagaccctgggcagagtggccgagagcggcctgcccgccctgctgctgcagtgcctgtacctgttcttcgtgttccccctggacaaggacgagctgctggagagcgacctgcaggtgcagaagatgttcgtgcagatgctgctgaacatctgcagcgacagccagggcctggagggcctgctgagcggcagcgagctgcagagcctgctgatcgccaccacctgcctgagagagcacagctgctgcttctggaaggagcccaccttctgcgtgctgagagccatcagcaaggcccagaacctgagcatcatccagtacctgcaggccaccgactgcgtgagactgagcctgcagaacctgagcagactgaccgacaccctgcccgcccccgaggtgagcgaggccgtgagcctgatcctgggcttcgtgaaggacagctaccccgtgagcagcgccctgttcctggagttcgagaacagcgagggctaccccctgctgctgaaggtgctgctgagatacgacggcctgacccagagcgaggtggacccccacctggaggagctgctgggcctggtggtgtggctgaccacctgcggcagaagcgagctgaaggtgttcgacagcatcacctacccccagctggagggcttcaagttccaccacgaggccagcggcgtgaccgtgaagaacctgcaggccttccaggtgctgcagaacgtgttccacaaggccagcgacagcgtgctgtgcatccaggtgctgagcgtgatcagaaccatgtgggcctggaacgccagaaacttcttcctgctggagtggaccctgcagcccatcagccagttcgtggagatcatgcccctgaagcccgcccccgtgcaggagcacttcttccagctgctggaggccctggtgttcgagctgcactacgtgccccacgagatcctgagaaaggtgcagcacctgatcaaggagagccccggccccagctgcaccctgatggccctgcagagcatcctgagcatcgccggcggcgaccccctgttcaccgacatcttcagagacagcggcctgctgggcctgctgctggcccagctgagaaagcaggccaagatcatgagaaagagcggcaacaaggtgagcacccccggcgtgcaggaccccgagagagagctgacctgcgtgatgctgagaatcgtggtgaccctgctgaagggcagcgtgagaaacgccgtggtgctgaaggaccacggcatggtgcccttcatcaagatcttcctggacgacgagtgctacagagaggccagcctgagcatcctggagcagctgagcgccatcaacgccgaggagtacatgagcatcatcgtgggcgccctgtgcagcagcacccagggcgagctgcagctgaagctggacctgctgaagagcctgctgagaatcctggtgacccccaagggcagagccgccttcagagtgagcagcggcttcaacggcctgctgagcctgctgagcgacctggagggcagcctgcaggagccccccctgcaggcctggggcgccgtgagccccagacagaccctggagctggtgctgtacaccctgtgcgccgtgagcgccgccctgcactgggaccccgtgaacggctacttcttcagaagaaacggcctgttcgagaagctggccgaggacctgtgcctgctgggctgcttcggcgccctggaggaggagggcaacctgctgagaagctgggtggacaccaaggccagacccttcgccgacctgctgggcaccgccttcagcagcagcggcagcctgccccccagaatccagagctgcctgcagatcctgggcttcctggacagcatggccagcggcaccctgcacctgagaggcgacctgaaggagagcctgagaaccaagcagggccccgtggtggacgtgcagaagggcgagaccggcagcgacccccagagaaacttcaagcagtggcccgacctggaggagagaatggacgagggcgacgccgccatcatgcaccccggcgtggtgtgcatcatggtgagactgctgcccagactgtaccacgaggaccacccccagctgagcgaggagatccagtgcagcctggccagccacatccagagcctggtgaagagcgagaagaacagacaggtgatgtgcgaggccggcctgctgggcaccctgatggccagctgccacagagccctggtgaccagcggcagccccctgcacagcagactgatcagaatcttcgagaagctggccagccaggccatcgagcccgacgtgctgagacagttcctgggcctgggcatccccagcagcctgagcgccaccaccaagatcctggacagcagccacacccacagaggcaaccccggctgcagcggcagccagaccgcccagggcctggccgagggcccctggcccgccgcccccgacgccggcctgcaccccggcgtgacccaggccccccagcccctgggcgagagccaggacagcaccaccgccctgcagaccgccctgagcctgatcagcatgaccagccccgtggccggcagccagaccagcggcaagaccatctggctgagaaaccagctgctggagatgctgctgagcgtgatcagcagcccccagctgcacctgagcagcgagtag

SEQ ID NO: 335964 - DNA, 3159 bp, Artificial Sequence
  derived and/or modified sequence
ttgaacagcgatttactctgtcacggcatggaggctgaggacttgagcaaggccgaagatcgcaacgaagatcccggctcaaaaaatgagggccagctggctgcagtgcagccagacgtgcctcacggcggccagtcttcatcccccactgctttgtgggacatgctggagcgcaagtttctggagtatcaacaactaacacacaagtcgccaatagagcgccaaaagtcactgctgagcctcctgccactgtttctgaaagcttgggagcacagcgtcggaattatctgttttcctagcctgcagcgcttagctgaggatgtgtctgatcagctggcacagcaattacaaaaggcccttgtgggaaaaccggccgaacaggcccggctggctgccgggcagctgctctggtggaagggagacgtcgaccaggacgggtatttgttactaaagagcgtctatgttctgacaggtacagattcagaaaccttaggtcgggttgctgaatcagggctcccggccctcttactgcagtgcctatacctgttttttgtgtttccccttgataaggatgagctcctcgaatctgacctacaggtgcaaaagatgtttgtgcagatgctgctcaacatttgctccgattcccaagggttggagggcctcctgtcaggctcagaactgcagagtcttctaatcgccaccacgtgcctgagagaacacagttgctgcttttggaaggagcctaccttctgtgttctccgcgctatttctaaagcccagaacctctctatcatccagtatttgcaggccacagattgcgtacggttatcactgcaaaatctcagtcgactgacagacactcttcccgctccggaggtctcagaggctgtatcactcatactgggcttcgtgaaagatagttaccccgtttcaagcgcgctgtttttggaatttgaaaattcggaaggatacccattgctgctcaaggtactcctccgatacgatggtctcacgcagtccgaagtcgatccacacctggaggagcttctgggtctggtggtgtggttaaccacctgcggaaggtctgagctcaaggtgttcgatagcattacttacccacaactggagggatttaagtttcatcacgaagcctccggcgttaccgtgaagaatctgcaggctttccaggtcctccagaacgttttccacaaggccagtgacagtgtgttgtgtatacaggttctttctgttattagaaccatgtgggcctggaatgctcgaaacttcttcttattagaatggactctgcagcctatctctcagttcgtcgagataatgcccctgaagcctgcccctgtgcaagagcacttctttcaactgttggaggcccttgtgtttgaattgcactacgtgccacatgaaattctcagaaaagtgcagcacctgataaaggagtcccctgggccttcttgcacactgatggccctgcagagtatcctgtcgatcgcgggcggggatccactgttcactgatatcttcagggacagcggcctgctcggactcctcctcgcccagctgaggaagcaggccaaaattatgaggaaatctggcaacaaagtgtccactcccggggtgcaagaccctgagagagagttgacctgtgtgatgctgagaattgtcgtcaccctgctgaaagggtccgttagaaacgctgtggtcctcaaagaccacggaatggttccgtttataaagatttttctggatgatgaatgttatagagaagcttcactgtcgatcttggaacagttaagcgcaataaatgccgaggaatacatgagtatcatcgtgggtgcactttgctcttcaacccagggcgaattgcaactcaaactcgatctgcttaagtcccttctgcgtatcctggtgactccaaaggggcgggctgcatttcgcgtgtcctccggattcaatggcctgctgtcattactgtcagaccttgagggatctctgcaggaaccaccattgcaggcgtggggagctgtcagtcctcgtcagaccctggaactagtattgtacacactatgtgcggtgtccgcagccctgcactgggatcctgtgaatgggtacttctttagaaggaatggcctctttgaaaagctcgctgaggatctttgcctgctgggctgctttggcgctctcgaggaggaaggcaacctgctgcgctcctgggttgatacaaaagctagaccctttgctgacctgctaggcacggccttctcaagctcggggagcctgcctccaagaatacaatcttgcctccaaattctcggctttcttgattccatggcgagtggcacccttcacctgcggggcgacctcaaagagtccttacgtacaaaacagggacccgtggtggatgtgcaaaaaggcgagactggctccgatccacagaggaattttaagcaatggccagacctcgaagaacgtatggacgagggagacgccgctatcatgcatccgggcgtcgtgtgtatcatggtacgtctgctgccccgcctgtaccacgaggaccacccccagttatcagaagaaatccaatgcagcctggcaagtcacattcagagcctggtgaaatctgaaaaaaatcgccaggtaatgtgcgaggctggcctgctgggcacgctgatggcctcatgccatagagcccttgtgacctctggctcccctctccattccagactcatccgcatttttgaaaaactcgccagtcaagcgatcgagcccgatgtactccgccagttcctcggacttggcattccatcatctctgtccgccactaccaagattttggatagctctcacactcatcgggggaaccccggttgtagcggctcgcagaccgcccaagggctcgccgagggaccatggcctgctgcgcccgatgccgggctgcatcctggcgtgactcaggctcctcagccattgggagaatcccaagatagcaccactgcgctgcagacagccctgagcttgatttctatgacctcccccgtagccggatcccagacatctggaaaaacgatctggctccggaatcagctcctggaaatgctgctcagcgttatctcgagcccacagttgcacctaagcagtgagtag

SEQ ID NO: 335965 - DNA, 3159 bp, Artificial Sequence
  derived and/or modified sequence
ctcaacagcgacctgctgtgccacggcatggaggccgaggacctgagcaaggcagaagatagaaatgaagatcctggcagcaagaatgaaggccagctggccgctgtgcagccagatgtgccccacggcggccagagcagcagccccacagccctgtgggacatgctggagaggaagttcctggagtaccagcagctgacccacaagagccccatcgagcggcagaagagcctgctgagcctgctgcccctcttcctgaaggcctgggagcacagcgtgggcatcatctgcttccccagcctgcagaggctggccgaggatgtgtctgaccagctggcccagcagctgcagaaggccctggtgggcaagccagctgagcaggcccggctggccgccggccagctgctgtggtggaagggagatgtggaccaggacggctacctgctgctgaagtctgtgtatgtgctgactggaacagattctgagaccctgggccgggtggccgagagcggcctgcctgccctgctgctgcagtgcctgtacctgttctttgtgttccccctggacaaggatgagctgctggagagtgacctgcaggtgcagaagatgtttgtgcagatgctgctgaacatctgcagcgacagccagggcctggagggcctgctgagcggcagcgagctgcagagcctgctgattgccaccacctgcctgcgggagcacagctgctgcttctggaaggagcccaccttctgtgtgctgcgggccatcagcaaggcccagaacctgagcatcatccagtacctgcaggccacagactgtgtgcggctgagcctgcagaacctgagccggctgacagacaccctgcctgcccctgaggtgtctgaggccgtgtccctcatcctgggctttgtgaaggacagctaccctgtgagcagcgccctcttcctggagtttgaaaattctgagggctaccccctgctgctgaaggtgctgctgcgctatgatggcctgacccagagcgaggtggacccccacctggaggagctgctgggcctggtggtgtggctgaccacctgtggccgctctgagctgaaggtgtttgacagcatcacctacccccagctggagggcttcaagttccaccacgaggccagcggcgtgacagtgaagaacctgcaggccttccaggtgctgcagaatgtgttccacaaggccagtgacagcgtgctgtgcatccaggtgctgagcgtcatccgcaccatgtgggcctggaatgccaggaacttcttcctgctggagtggaccctgcagcccatcagccagtttgtggagatcatgcccctgaagccagcccctgtgcaggagcacttcttccagctgctggaggccctggtgtttgagctgcactacgtgccccatgagatcctgaggaaggtgcagcacctgatcaaggagagccctggccccagctgcaccctgatggccctgcagagcatcctgagcattgctggaggagaccccctcttcacagacatcttccgggacagcggcctgctgggcctgctgctggcccagctgaggaagcaggccaagatcatgaggaagagcggcaacaaggtgtccaccccaggagtgcaggaccctgagcgggagctgacctgtgtgatgctgagaattgtggtgaccctgctgaagggctctgtgagaaatgctgtggtgctgaaggaccacggcatggtgcccttcatcaagatcttcctggatgatgagtgctaccgggaggccagcctgagcatcctggagcagctgagcgccatcaatgctgaggagtacatgagcatcatcgtgggcgccctgtgcagcagcacccagggcgagctgcagctgaagctggacctgctgaagagcctgctgcgcatcctggtgacccccaagggccgggccgccttccgggtgagcagcggcttcaacggcctgctgagcctgctgagtgacctggagggcagcctgcaggagccccccctgcaggcctggggcgctgtgagcccccggcagaccctggagctggtgctgtacaccctgtgtgctgtgtctgctgccctgcactgggaccctgtgaatggctacttcttcagaagaaatggcctgtttgagaagctggccgaggacctgtgcctgctgggctgcttcggggccctggaggaggagggcaacctgctgcgctcctgggtggacaccaaggcccggccctttgctgacctgctgggcacagccttcagcagcagcggcagcctgcccccacgcatccagagctgcctgcagatcctgggcttcctggacagcatggccagcggcaccctgcacctgcggggggacctgaaggagagcctgcggaccaagcagggccctgtggtggatgtgcagaagggggagaccggcagtgacccccagaggaacttcaagcagtggccagacctggaggagaggatggatgaaggagatgctgccatcatgcaccctggggtggtgtgcatcatggtgcggctgctgccccggctgtaccacgaggaccacccccagctgtctgaggagatccagtgcagcctggccagccacatccagagcctggtgaagtctgagaagaaccggcaggtgatgtgtgaggccggcctgctgggcaccctgatggccagctgccaccgggccctggtgaccagcggcagccccctgcacagccgcctcatccgcatctttgagaagctggccagccaggccatcgagccagatgtgctgcggcagttcctgggcctgggcatccccagcagcctgagcgccaccaccaagatcctggacagcagccacacccaccggggcaaccctggctgcagcggcagccagacagcccagggcctggccgagggcccctggccagctgccccagatgctggcctgcaccctggggtgacccaggccccccagcccctgggggagagccaggacagcaccacagccctgcagacagccctgagcctcatctccatgaccagccctgtggccggcagccagaccagcggcaagaccatctggctgaggaaccagctgctggagatgctgctgagcgtcatcagcagcccccagctgcacctgagcagcgagtag

SEQ ID NO: 335966 - DNA, 3159 bp, Artificial Sequence
  derived and/or modified sequence
ctgaacagcgacctgctgtgccacggcatggaggccgaggacctgtcgaaagcggaggatcggaatgaagatcctggcagcaagaatgagggccagctggcggctgtccagccggatgtgcctcatgggggccaatcttcatcccccaccgccctctgggacatgctggagaggaagttcctcgagtatcagcagctaacacataaaagtcctattgagcgccagaagtccctgttatcactcctccctctgtttttgaaggcctgggagcactcagtcggtatcatttgcttcccttcgctgcagagactggcagaggacgtcagcgaccagttggctcaacagttacagaaagctctggtaggtaagccagcagagcaagcaagacttgccgccggacagctcctgtggtggaaaggcgacgtagatcaggatggctacttactgctgaagagcgtttacgtactgaccggcactgatagtgaaactcttgggagggtcgcggagtctgggcttccagctcttttgttacagtgtctttatctattcttcgtattccctctggataaggatgaactcctcgagtctgatctgcaggtccagaagatgttcgttcaaatgctgctcaacatctgcagcgactctcaagggttggaaggtttgctcagcggatcagaactgcagagcctactgatcgctacaacatgcttgagggagcatagttgctgcttctggaaagaaccaaccttctgcgtgcttcgggccatatccaaggcacaaaatctgagtataatccagtacctgcaggcgacagactgtgtgcgattgtcactgcagaatctgagtcggttgaccgacaccttgcctgccccagaggtttcagaggccgtttctttgatcctgggtttcgtgaaggattcctacccggtctcgagcgccctattcctggagttcgaaaactccgaaggctatcccctgctgctcaaggtgcttctcaggtacgacggactgactcagagtgaagtggacccacatcttgaggaactgcttggactggtcgtgtggctgaccacctgcgggcgctcagagctaaaagtgtttgacagcatcacctatccacagctggaggggtttaaatttcatcacgaagcttctggggtgaccgtaaaaaacctgcaggcatttcaggtattacagaacgttttccacaaggcgagcgatagcgtgctatgcatccaggtgttgagcgttatcagaacaatgtgggcatggaatgcccggaattttttcctgctcgagtggactctccagcctatatcacagtttgtggaaattatgcccctgaaaccagcacccgttcaggaacacttttttcagctactcgaggccctcgtcttcgagctacactatgtgcctcacgagattctgcggaaagtgcagcatctaattaaagaatctccaggcccgagctgcactttaatggctctgcagtctatcctcagtatcgcaggcggggacccgttatttaccgatatcttcagggactctggactgctaggcctgttgctggctcagctgagaaagcaggccaaaatcatgaggaagtcaggtaataaagtcagtacccctggggtccaggacccagaacgagaactgacttgcgtgatgttacggattgtcgtcacgcttttgaagggctctgtgagaaacgcggtggttctgaaggaccatgggatggtgccatttatcaaaatatttctggatgacgaatgttatagggaggcatctctgtccatccttgagcaactgtctgctatcaatgccgaggagtatatgtctattatcgttggcgctttgtgttcttccacccagggcgagctgcaactgaagctggatctgctgaagagcctacttcgcatcctggtcacacctaagggaagagccgcctttagggtgtcttctggctttaatggactgctgtcactgttaagtgacttggaaggatctctacaggagccacccctgcaagcgtggggcgcggtgagcccgcggcagacactggagcttgtgctgtatacattgtgcgccgtgtcagcggccctccactgggatccggtgaacggctatttttttcggagaaatggactgtttgaaaaactggcagaggacctgtgtcttttggggtgttttggggcgctggaagaagagggtaatctgttgagaagctgggtagacacaaaggctcgcccctttgctgacctcttgggcactgctttctctagctccggctctctgcccccaagaattcagtcttgcctgcaaatcctgggatttctggactcaatggcctctggcactcttcacctgcggggcgacctgaaggagagcctgcggacaaagcagggaccagtcgttgacgttcaaaaaggcgaaacaggttccgatccacaacggaactttaaacagtggcccgacctggaagagagaatggacgagggggacgccgctattatgcaccccggtgttgtgtgtatcatggttcggctgctgccacgcctctaccatgaggatcacccgcagctcagcgaagaaattcagtgttccctcgcatcacacatacagtccctagtgaaatccgaaaagaacaggcaagtgatgtgcgaggctgggctgctggggacattaatggctagttgtcacagggctttagttacatccggtagtccattgcacagcaggcttattagaatcttcgagaaactcgctagtcaggccatcgaacctgatgtgctgaggcagttcctgggactgggtataccctccagcctttctgcgacgacaaagatattggactctagtcatacccaccgcgggaaccctggctgcagcggctcccagaccgcacaggggctggcggaggggccctggccagccgcacctgacgctggcctacacccaggagtcacacaggccccccagcccctgggcgagtcccaagatagtactactgcactgcaaaccgccctgtcattgatttcaatgacttcaccggtcgccggatcccagacaagtggtaagactatctggctcaggaaccagttgttagaaatgcttctgtccgtgatatcatccccccagctccatttaagctcagagtag

SEQ ID NO: 335967 - DNA, 3159 bp, Artificial Sequence
  derived and/or modified sequence
ttgaactccgaccttctgtgccacggtatggaggccgaggatctgagcaaagctgaggaccggaacgaggatcctggatctaagaacgaggggcagctagccgcagttcaacctgatgtcccccatggtggacaatcttccagtcccacagccctgtgggatatgctggaacgcaaattcttagagtaccaacagcttacgcataaaagtccaatagagcggcaaaagagcttactatctctattgccgctcttcctcaaagcttgggaacatagcgtgggcatcatttgtttcccatctcttcagcgcttagccgaagacgtatccgaccagctggcgcagcaactccagaaggcgctggtgggtaaaccagccgagcaagctcgattggcagccggtcagctactgtggtggaagggggacgtggatcaggacgggtacctgctgctcaaaagtgtatatgtgcttactggcaccgactcagaaacccttggtagagttgcggagtccggactgccggctctccttctgcaatgtctatacttattcttcgtcttccccctagataaggacgagctgttggagtctgacctacaggtacaaaaaatgtttgtgcagatgctgctgaatatatgtagcgattcacagggtctcgaaggattattgtccggttccgaactccagagcctgctaatcgcaactacatgcctccgggaacactcatgctgtttttggaaggagccaaccttctgcgtgctgagggcaatttctaaagcccagaatttgagtatcatacagtacctccaggccaccgactgtgtacgcctgtcccttcaaaatctctcccgattgaccgatacgctccccgctcccgaggttagcgaggcagtgtcgttgatactgggattcgttaaagacagctatcctgtgtcctccgctttgttcctcgagttcgaaaatagcgaaggctaccccttgctgctgaaggttctcctacgctatgacggtctaactcagtctgaggttgacccccacttggaagagctgctggggttggtggtgtggcttaccacgtgtggcaggtctgaactcaaggtatttgattcaatcacctatcctcagcttgaggggttcaaattccaccacgaggcttccggcgtaactgttaaaaatctgcaggccttccaggtgctgcagaacgtgtttcataaagcgtccgatagtgtcttgtgcattcaagtgttgtccgtgattcggacaatgtgggcatggaatgctaggaatttttttttactcgaatggacgctgcaacctatcagccaatttgttgagatcatgccactgaagccagccccagtacaagaacattttttccagctgctggaagctttggtgtttgaactgcattatgtccctcacgagatactcaggaaggtccagcacctgatcaaggaatcaccgggtccgtcatgcacgttgatggctctgcagtccatcctgtccatcgctggaggggacccgctgtttacagacattttccgggattcaggactactgggcctcctactggcacagctgagaaaacaagcgaagattatgagaaaaagcggaaacaaagtgagtacacctggcgtgcaggaccctgagagggagctcacctgtgtgatgctcaggattgtggtcacgttgttgaagggttccgtgaggaatgcagtggtgctcaaagatcacggcatggtgccttttatcaagattttcctagacgatgaatgttaccgggaggctagccttagcattctggaacagttgtccgccattaacgctgaagagtatatgtcgattatcgttggcgcactgtgcagtagcacacaaggggagcttcagctgaagttggatctgctcaaatcgctgctgagaatcctcgtgaccccgaaaggacgggctgcatttagggtgtctagcggctttaatggactcctctccttgctgagtgacctcgaaggatccctccaggaaccacccctacaggcatggggcgcagtgtctccccgacagaccttggaactagtgctgtacactctttgtgctgtaagcgcagctctgcattgggatcccgtgaacggctactttttcagaagaaacggcttgtttgaaaagctcgcagaagatctgtgtcttctcgggtgttttggggctcttgaagaagagggcaacctcctgcgttcctgggtagacacaaaggcaaggccgtttgctgacttgctgggcaccgctttctcttcttctgggtctcttcctcctcgaatccagtcctgtctccaaatccttgggttccttgacagcatggcgtctggtaccctccatctgagaggagacctcaaggagtctttgcgcaccaaacaagggccagtcgtcgatgtccaaaaaggcgaaaccggttcggacccgcagcgcaatttcaaacagtggcctgacctagaggaacgcatggatgagggcgatgccgctattatgcaccccggagtggtctgcattatggttcggctgctgccccgactgtaccatgaagatcacccccaacttagcgaggaaattcagtgcagtctggcaagccacatccagagtctcgtcaaatccgaaaagaaccgccaggtcatgtgtgaggccggtctgcttggaaccctgatggccagttgccaccgagcactcgttaccagtggcagcccgctccattctcgccttatcaggatcttcgaaaaattagcatcccaggccatcgaacctgacgtgttgaggcagttcctggggctggggattccgtcatcccttagcgctactaccaaaatactggatagctcccatacccatcgtggcaatccaggttgtagcggaagccagacggctcagggtctagctgaggggccttggccagcagccccagacgcgggactgcatcccggtgtaacgcaagcccctcagcccttgggcgaaagccaggatagcaccacagcgttgcaaacggctctgtccctcatctccatgacttcccccgtggctggtagtcaaacctcaggcaagaccatctggctccgtaaccaactactggagatgctcctgtccgtaattagcagcccgcaactgcatctgtcatctgaatag

SEQ ID NO: 335968 - DNA, 2193 bp, Artificial Sequence
  derived and/or modified sequence
gtgaaacggcgctgaggactgacgatgtggggccgggtcctcttcccccgagcctgaggggctgcagctggggatagggggcccatgccttctgatgtctacaggcgctgacggccacccctccagatctgctttgccacggcatggaggcagaagatctttcaaaggctgaagacagaaatgaagacccaggttccaaaaatgaagggcagcttgctgctgtgcagcctgatgtcccacatggagggcagtcctccagccccacagctctctgggacatgctggaaaggaagtttctggaataccagcagttgactcacaagagccccattgagcgtcagaagagcctgttgagtcttctccccctattcctaaaggcctgggaacactccgtggggatcatctgctttcccagtctccaaaggctggctgaagacgtgtctgaccagcttgcccagcaactccagaaggcccttgtggggaagcctgcggagcaagctcggttggcagctggacagttgctgtggtggaagggggacgtggatcaggatggctacttgctcctgaagtcagtgtacgtgctcacggggacagactcggagacgctgggcagggttgctgagtctgggcttccagccctgctcctacagtgcctttacctcttctttgtctttcctctggacaaagatgagcttcttgagagtgatcttcaagttcaaaagatgttcgtgcagatgttgctcaatatttgcagtgactctcagggcctggagggactcctctcaggaagtgagctgcagtctctgctgattgccacgacctgccttcgggagcacagctgctgcttctggaaggaacccaccttctgcgtgctaagggcaatctccaaggcccagaacctcagcatcatccagtacctgcaggccacagactgtgtcaggctctccctccagaacctctccaggctcacggacactctccctgcccctgaagtgagcgaggctgtaagcctgatcttgggattcgtgaaggactcctaccccgtctcctcggctctgttcctggagtttgagaattcagagggctatcctctgctgctcaaagtgttacttcggtatgatgggctgacccagagcgaagtggacccgcatctggaggagctccttgggctggtggtgtggctgacaacctgtgggaggtcagagctgaaggtgtttgacagcatcacttaccctcagcttgaaggcttcaagttccatcatgaggcatctggggtgactgttaagaatcttcaggccttccaggtcctacagaatgttttccacaaagccagtgactctgtcctctgcatacaagtcttgtcagtcatcaggaccatgtgggcctggaatgctcgaaacttcttcctgctggagtggaccctgcagcccatctcgcagtttgtagagatcatgcccctgaagccggccccagtgcaggaacacttcttccagcttctagaggccctggtgttcgagctgcactacgtgcctcatgagatcctgcgaaaggtacagcatctgatcaaggagagccctgggccatcctgcaccctcatggccctgcagagcatcctcagcatcgctggtggggaccccctcttcaccgacatcttccgggactcagggctcctgggcctgctactggcacagcttcggaagcaagccaagatcatgaggaagtcaggaaacaaagtgtccactcctggtgttcaggatccagaaagagaactcacctgtgtgatgctgaggattgtagtcacacttctgaaaggctcggtgaggaatgcagttgtcctgaaggaccacggcatggtgcccttcatcaagatcttcctggatgacgagtgctaccgggaggcctcgctcagcatcttggagcagctctcagccatcaacgccgaggagtacatgagcatcattgtgggtgctctatgctcatccactcaaggggagctgcagctgaaactggatctcctgaaggtgatttcaagtcctcctttgagattggcttccctgtggatatgcaccaagcgatccacatttgctcaggcatttgtattcatgtaattcagttagccactgtatgtggcaggcagtaccctgtattaggtagcgtcaggtgctgtaacaaataaatcccatatcctcagta

SEQ ID NO: 335969 - DNA, 3415 bp, Artificial Sequence
  derived and/or modified sequence
ctgaattcagatctgctttgccacggcatggaggcagaagatctttcaaaggctgaagacagaaatgaagacccaggttccaaaaatgaagggcagcttgctgctgtgcagcctgatgtcccacatggagggcagtcctccagccccacagctctctgggacatgctggaaaggaagtttctggaataccagcagttgactcacaagagccccattgagcgtcagaagagcctgttgagtcttctccccctattcctaaaggcctgggaacactccgtggggatcatctgctttcccagtctccaaaggctggctgaagacgtgtctgaccagcttgcccagcaactccagaaggcccttgtggggaagcctgcggagcaagctcggttggcagctggacagttgctgtggtggaagggggacgtggatcaggatggctacttgctcctgaagtcagtgtacgtgctcacggggacagactcggagacgctgggcagggttgctgagtctgggcttccagccctgctcctacagtgcctttacctcttctttgtctttcctctggacaaagatgagcttcttgagagtgatcttcaagttcaaaagatgttcgtgcagatgttgctcaatatttgcagtgactctcagggcctggagggactcctctcaggaagtgagctgcagtctctgctgattgccacgacctgccttcgggagcacagctgctgcttctggaaggaacccaccttctgcgtgctaagggcaatctccaaggcccagaacctcagcatcatccagtacctgcaggccacagactgtgtcaggctctccctccagaacctctccaggctcacggacactctccctgcccctgaagtgagcgaggctgtaagcctgatcttgggattcgtgaaggactcctaccccgtctcctcggctctgttcctggagtttgagaattcagagggctatcctctgctgctcaaagtgttacttcggtatgatgggctgacccagagcgaagtggacccgcatctggaggagctccttgggctggtggtgtggctgacaacctgtgggaggtcagagctgaaggtgtttgacagcatcacttaccctcagcttgaaggcttcaagttccatcatgaggcatctggggtgactgttaagaatcttcaggccttccaggtcctacagaatgttttccacaaagccagtgactctgtcctctgcatacaagtcttgtcagtcatcaggaccatgtgggcctggaatgctcgaaacttcttcctgctggagtggaccctgcagcccatctcgcagtttgtagagatcatgcccctgaagccggccccagtgcaggaacacttcttccagcttctagaggccctggtgttcgagctgcactacgtgcctcatgagatcctgcgaaaggtacagcatctgatcaaggagagccctgggccatcctgcaccctcatggccctgcagagcatcctcagcatcgctggtggggaccccctcttcaccgacatcttccgggactcagggctcctgggcctgctactggcacagcttcggaagcaagccaagatcatgaggaagtcaggaaacaaagtgtccactcctggtgttcaggatccagaaagagaactcacctgtgtgatgctgaggattgtagtcacacttctgaaaggctcggtgaggaatgcagttgtcctgaaggaccacggcatggtgcccttcatcaagatcttcctggatgacgagtgctaccgggaggcctcgctcagcatcttggagcagctctcagccatcaacgccgaggagtacatgagcatcattgtgggtgctctatgctcatccactcaaggggagctgcagctgaaactggatctcctgaagtctctgctccggatcctggtgacccccaagggtcgtgctgccttcagagtctccagcgggttcaacgggctgctgtctctgctctctgacctggaaggctccctccaggagcccccgctgcaggcatggggagcagtatcccccagacagaccctggagctggttttgtacactctctgtgctgtgtccgcagcgctgcactgggaccctgtcaatggctacttcttcaggaggaatgggctctttgagaagctggccgaggacctctgcctgctgggctgttttggagccctggaggaagagggcaacctgctgcgctcttgggtggacacaaaggccaggccatttgcagatttgctgggcactgccttttcctccagcggctcactcccaccccggatacagagctgcctccagatccttggctttctggacagcatggccagcggcaccctccacttgcgtggggacctgaaggagtccctgaggaccaagcaggggccggttgtggatgttcagaagggagaaactggcagtgacccccaacgcaacttcaagcagtggccagacctggaggagaggatggatgagggagatgctgcaatcatgcatcccggggtcgtgtgcatcatggtgaggctgctgcctcggttgtaccatgaagatcacccacagctttccgaggagatccagtgctccctggccagtcatatccagtccctggtgaagtcggagaagaaccgccaggtcatgtgcgaagcaggcttgcttgggaccctcatggcctcctgccacagggccctggtcaccagtggcagccccctccactcacgcctcatcaggatctttgagaagctcgcttcccaggccattgaaccggatgtgctaagacagtttctaggtcttggaattccctcatctctgtcggccacaacaaaaatccttgattcatctcacacacacagaggcaaccctgggtgctcagggtcacagactgcacagggcttggctgaggggccctggccagctgccccagatgctgggctgcaccctggagtcacacaggccccgcagcccttgggggaatcccaggattcaactactgctcttcagacggcgctgagcctcatctccatgacctcccctgtagctggaagccaaacatctggaaagacaatctggctcagaaaccagttgctggagatgctgctcagtgtaatatcttccccccagcttcatctgtcctctgagtaagtagctccaggaagagcaatttggcaggaggttacctcatacagggtgtggcattaaaccttttcttaatgaaaagtttagcatctctgagtctgttttctgcaatgtatttcctgcactagtcagaaagaaaattatattctctctacccaatgaaccagaccttgccctaagatattctgatgcaaatgttaagtggacatgagtaactagaaacagatttggtataattacaataaactccttttgtcaccat

SEQ ID NO: 335970 - DNA, 928 bp, Artificial Sequence
  derived and/or modified sequence
agaaatcctttctcagctgtcagggaaacatggattctccaaggccaggatggtttcccagcgtcttcccaggaagacaagaggtccaccatggagcccttgtgtccactcctgctggtgggttttagcttgccgctcgccagggctctcaggggcaacgagaccactgccgacagcaacgagacaaccacgacctcaggccctccggacccgggcgcctcccagccgctgctggcctggctgctactgccgctgctgctcctcctcctcgtgctccttctcgccgcctacttcttcaggttcaggaagcagaggaaagctgtggtcagcaccagcgacaagaagatgcccaacggaatcttggaggagcaagagcagcaaagggtgatgctgctcagcaggtcaccctcagggcccaagaagtattttcccatccccgtggagcacctggaggaggagatccgtatcagatccgccgacgactgcaagcagtttcgggaggagttcaacatgaccattctagggtgattctgagccaactggatggaattccctgttcagactacatcaatgcttcctacatagatggttacaaagagaagaataaattcatagcagctcaaggtcccaaacaggaaacggttaacgacttctggagaatggtctgggagcaaaagtctgcgaccatcgtcatgttaacaaacttgaaagaaaggaaagaggaaaagtgccatcagtactggcccgaccaaggctgctggacctatggaaacatccgggtgtgcgtggaggactgcgtggttttggtcgactacaccatccggaagttctgcatacagccacagctccccgacggctgcaaagcccccaggctggtctcacagctgcacttcaccagctggcccgacttcggagtgccttttacccc

SEQ ID NO: 335971 - protein, 669 aa, Artificial Sequence
  derived and/or modified sequence
MVSQRLPRKTRGPPWSPCVHSCWWVLACRSPGLSGATRPLPTATRQPRPQALRTRAPPSRCWPGCYCRCCSSSSCSFSPPTSSGSGPKKYFPIPVEHLEEEIRIRSADDCKQFREEFNSLPSGHIQGTFELANKEENREKNRYPNILPNDHSRVILSQLDGIPCSDYINASYIDGYKEKNKFIAAQGPKQETVNDFWRMVWEQKSATIVMLTNLKERKEEKCHQYWPDQGCWTYGNIRVCVEDCVVLVDYTIRKFCIQPQLPDGCKAPRLVSQLHFTSWPDFGVPFTPIGMLKFLKKVKTLNPVHAGPIVVHCSAGVGRTGTFIVIDAMMAMMHAEQKVDVFEFVSRIRNQRPQMVQTDMQYTFIYQALLEYYLYGDTELDVSSLEKHLQTMHGTTTHFDKIGLEEEFRKLTNVRIMKENMRTGNLPANMKKARVIQIIPYDFNRVILSMKRGQEYTDYINASFIDGYRQKDYFIATQGPLAHTVEDFWRMIWEWKSHTIVMLTEVQEREQDKCYQYWPTEGSVTHGEITIEIKNDTLSEAISIRDFLVTLNQPQARQEEQVRVVRQFHFHGWPEIGIPAEGKGMIDLIAAVQKQQQQTGNHPITVHCRNSMNSATKWYKILLIYFLIMLISNEDSCLKIFFNLMEQRRSHFPQDARLSPPLSGTAFAL

SEQ ID NO: 335972 - DNA, 2010 bp, Artificial Sequence
  derived and/or modified sequence
atggtgagccagagactgccccgtaagacaagggggcctccctggtccccttgcgtccacagctgttggtgggtgttagcgtgccggagccctggcctgagcggagccacccgccccctacctacagcgacccgccagccacgacctcaggctctgcgcacccgcgctccgccttcaaggtgttggcccggatgctactgccgctgttgcagcagttcaagctgttcattctccccacccaccagtagcggttcaggcccaaagaagtacttccccattccagttgagcatttggaggaggagattcgcatcaggtctgctgatgactgtaagcagtttcgcgaagagttcaatagtctcccctctggccacatccaaggtaccttcgagttggcaaacaaggaagaaaacagagagaagaatagatatcctaacatattgccgaacgaccactcacgggtcatcctctcccagcttgatggcattccctgttctgattacatcaatgcctcctatatcgatggctacaaagagaagaataaattcattgcagcccagggtccaaagcaagaaacagtgaacgatttctggagaatggtgtgggagcagaaatccgccaccatcgtgatgctgaccaacctgaaggagcgcaaggaggagaagtgccaccaatactggccagatcagggctgctggacctatggcaacatcagagtctgcgtggaggattgtgttgtgctcgtggactacactatacggaagttctgcatccagccacagttaccggatgggtgcaaagcacctaggctggtgtcacagctccacttcacttcctggcccgatttcggggtgccttttactccaatcggcatgctcaaattcctgaagaaagtcaagactcttaacccagtccacgccggccctatcgttgtgcattgctcagccggtgtgggccggacagggactttcattgtcatcgacgccatgatggcaatgatgcacgcggaacagaaagtcgacgtgttcgaattcgtttctcgcattagaaaccagaggccacagatggttcaaaccgacatgcagtatacctttatctaccaggccctgctggagtattatctctacggggatactgagctcgatgtgagtagtttggagaagcatcttcaaacgatgcacgggaccaccactcacttcgacaaaataggcctcgaagaagagtttcgaaaattgacaaacgtccggatcatgaaagaaaatatgcgcacgggcaacctacccgccaatatgaaaaaagctagagttattcagattatcccttatgatttcaacagagttatcctgagcatgaaacgcgggcaggaatacacagactacatcaacgcgtcatttatagatgggtatagacagaaggactactttattgccacccaaggtcccttggctcacacagtggaggacttctggcgcatgatatgggaatggaagagccatactatagtcatgctcaccgaagtccaagagcgggagcaagataagtgttaccagtactggcccacagaaggtagtgtcacacacggtgaaataaccattgaaatcaaaaacgatactctttctgaagccatatcaatcagagatttccttgtcactttgaaccagcctcaggctagacaggaagagcaggtgagagtggtgagacagtttcactttcacgggtggccagagattggcatacccgcagaagggaaagggatgattgacttaatagcggctgtgcagaagcagcagcagcagacaggcaaccatcctatcactgtgcactgccgcaacagcatgaactcagccacaaaatggtacaagatattgctcatctactttcttataatgctcatctccaatgaagacagctgcctgaaaatctttttcaatttgatggagcaacgcagaagccacttcccccaggatgctcggctgtccccacccctgtcaggtaccgcatttgccctatag

SEQ ID NO: 335973 - DNA, 2010 bp, Artificial Sequence
  derived and/or modified sequence
atggtgtcccagaggctgcccaggaagacccggggccccccctggagcccctgtgtgcacagctgctggtgggtgctggcctgccgcagccctggcctgagcggggccacccggcccctgcccacagccacccggcagccccggccccaggccctgcggacccgggccccacccagccgctgctggccaggctgctactgccgctgctgcagcagcagcagctgcagcttcagcccccccaccagcagcggcagcggccccaagaagtacttccccatccctgtggagcacctggaggaggagatccgcatccgctctgcagatgactgcaagcagttccgggaggagttcaacagcctgcccagcggccacatccagggcacctttgagctggccaacaaggaggagaaccgggagaagaaccgctaccccaacatcctgcccaatgaccacagcagggtcatcctgagccagctggatggcatcccctgcagcgactacatcaatgccagctacattgatggctacaaggagaagaacaagttcatcgccgcccagggccccaagcaggagaccgtgaatgacttctggaggatggtgtgggagcagaagagcgccaccatcgtgatgctgaccaacctgaaggagaggaaggaggagaagtgccaccagtactggccagaccagggctgctggacctacggcaacatccgggtgtgtgtggaggactgtgtggtgctggtggactacaccatcaggaagttctgcatccagccccagctgcctgatggctgcaaggccccccggctggtgtcccagctgcacttcacctcctggccagactttggagtgcccttcacccccatcggcatgctgaagttcctgaagaaggtgaagaccctgaaccctgtgcacgccggccccatcgtggtgcactgcagcgctggggtgggccgcacaggcaccttcatcgtgattgatgccatgatggccatgatgcatgctgagcagaaggtggatgtgtttgaatttgtgagccgcatccggaaccagaggccccagatggtgcagacagacatgcagtacaccttcatctaccaggccctgctggagtactacctgtatggagacacagagctggatgtgagcagcctggagaagcacctgcagaccatgcacggcaccaccacccactttgacaagattggcctggaggaggagttcaggaagctgaccaacgtgcgcatcatgaaggagaacatgaggactggaaacctgcctgccaacatgaagaaggcccgggtcatccagatcatcccctatgacttcaacagagtcatcctgtccatgaagaggggccaggagtacacagactacatcaatgccagcttcattgatggctaccggcagaaggactacttcatcgccacccagggccccctggcccacacagtggaggacttctggaggatgatctgggagtggaagagccacaccatcgtgatgctgacagaggtgcaggagcgggagcaggacaagtgctaccagtactggcccacagagggctctgtgacccacggggagatcaccatcgagatcaagaatgacaccctgtctgaggccatcagcatccgggacttcctggtgaccctgaaccagccccaggcccggcaggaggagcaggtgcgggtggtgcggcagttccacttccacggctggccagagatcggcatcccagctgagggcaagggcatgattgacctgattgctgctgtgcagaagcagcagcagcagacaggcaaccaccccatcaccgtgcactgcagaaattccatgaacagcgccaccaagtggtacaagatcctgctgatctacttcctgatcatgctgatcagcaatgaagacagctgcctgaagatcttcttcaacctgatggagcagaggaggagccacttcccccaggatgcccggctgagcccccccctgtctggaacagcctttgccctgtag

SEQ ID NO: 335974 - DNA, 2010 bp, Artificial Sequence
  derived and/or modified sequence
atggtgagccagcggctgccccggaagacccggggccccccctggagtccatgtgtgcattcctgctggtgggtgctcgcctgtcggtctcccggactgtctggtgcaactagacccctccccacagctacccggcagccaagaccgcaggcactccgtactagggcgcctccttcccgttgctggccaggctgttactgcagatgttgcagtagttctagctgtagtttttctccccctacatcctccggatcaggacctaaaaaatatttccccatcccagtggaacacctcgaagaggaaattcgtatcaggagcgccgacgactgcaagcagtttagggaggaatttaacagtttaccttctggacacatacaggggaccttcgagttggcgaacaaggaagaaaacagggaaaaaaaccgataccccaacattctacctaacgatcactctcgggtaattctgagccagctggatgggataccatgttcagattacatcaatgcgagctatattgacgggtacaaggagaaaaataagttcattgctgcacagggtcccaagcaggagaccgtgaatgacttctggaggatggtgtgggaacagaaatcagccactatcgttatgttgaccaaccttaaagagcgaaaagaggagaaatgtcaccagtattggccagatcaaggatgttggacgtacgggaacatccgggtctgcgtggaagactgtgtggtgctcgtagactacactattcgaaagttttgtatccagccgcaactccctgatggctgcaaggctccgcgactggtctctcagcttcacttcaccagctggcccgatttcggcgttccctttacaccgatcggaatgctgaaattcctaaagaaagttaagaccctcaaccccgtgcacgctggccctattgtggtccattgttcagccggagttggccgcaccggcacttttatcgtcatcgacgccatgatggccatgatgcatgctgagcagaaagttgacgttttcgagtttgtgtctcgcatccgtaatcagcggccgcaaatggtgcagacagacatgcagtataccttcatttaccaggcactgctggagtattacctgtacggtgacaccgagttagacgtctcaagcttagagaaacatctccagaccatgcatgggacaacgacccatttcgataaaatcggcctggaggaagagttcaggaaactaacgaatgtaaggattatgaaagaaaacatgcggaccggaaatctcccagccaatatgaaaaaagctagggtcattcagattattccttatgattttaaccgcgtaatcctcagtatgaaacgaggccaggaatataccgattacattaacgctagctttatagatgggtaccgccagaaggattattttatcgcaacccaaggccctctggcgcacaccgtggaggacttttggcggatgatttgggagtggaagagccatactatcgtgatgctgacagaggtccaagaaagggagcaggataagtgctaccagtattggcccaccgaggggagcgtaacacacggagaaattacaatcgagattaaaaatgatactctgtctgaggcaatttccattagagatttccttgtcactttgaatcagccacaggcaaggcaggaagaacaggtgagagtcgtgcgccagttccattttcacggatggcccgaaatcggaatccccgccgagggtaagggaatgatcgacctcattgccgcagtgcaaaaacaacagcaacaaacagggaatcacccgattactgtccactgtcgtaactccatgaacagtgccaccaagtggtacaagatactgctgatctatttcctgataatgctcatcagcaacgaggatagttgcctcaaaatattcttcaaccttatggaacagcggcgatcccactttccccaggatgctaggctgagccctccactctctgggaccgcttttgctctctag

SEQ ID NO: 335975 - DNA, 2010 bp, Artificial Sequence
  derived and/or modified sequence
atggtatctcagcgacttcccagaaaaactaggggaccaccttggagcccgtgtgtgcattcttgttggtgggtgttggcctgtcggagccccggattaagcggagctacacgcccactgcctaccgcaacaagacaaccgagaccacaggccctgcgaactcgggcacccccaagcaggtgctggcctggatgctattgtcgatgttgctcatcatcgtcatgctcattctccccccctacatcatctgggagtggaccaaagaagtattttccaattccagtggaacatctggaagaagaaatccgaatcagatccgcggacgattgtaagcaatttcgggaagagttcaattcacttccttcagggcacattcagggcacattcgagctggcaaataaagaggagaatagggagaaaaaccgttacccaaacatcttgcccaacgaccacagtcgggttatcttatctcagctggacgggatcccatgctccgactatataaatgcatcatacatagacggctataaggagaagaataaattcatcgctgcccaaggcccaaagcaggagaccgtaaacgacttttggagaatggtgtgggagcagaaatctgcaactattgtgatgttaacaaacctgaaggaacgcaaggaggaaaaatgccaccagtactggccggaccaagggtgttggacttacggcaacatccgggtatgcgtagaggactgcgtcgtgctcgtggattacaccatccgcaagttctgtattcagccgcagctccctgatgggtgtaaggcaccacgcttagtttctcagcttcacttcacgtcatggccagactttggagttccattcacccccataggaatgctcaaatttcttaaaaaggtcaaaactttaaatcccgtgcacgctggcccaatcgtggtacattgctcagctggggtcgggagaaccggaacatttattgtgattgatgccatgatggccatgatgcacgcagagcagaaggtggacgttttcgaatttgtctccagaatcaggaaccagcgccctcagatggtccagaccgacatgcagtacaccttcatctatcaggctctgttagagtattacctatacggggatacggagctcgacgttagtagcttggagaagcatctccaaacaatgcatgggaccaccacccacttcgataaaattgggctggaagaggaattccgcaagctgaccaacgtccgtatcatgaaagagaatatgagaaccggcaatcttccagcgaacatgaagaaagcccgagtcattcagattatcccgtacgattttaatagggtgattctgagcatgaaacgtggccaggaatacacagattatatcaatgcttccttcattgatggttacagacagaaggactacttcatcgccacacagggtcccctggcgcacacggtggaagacttttggaggatgatctgggagtggaaaagccataccatcgtgatgctgacagaggttcaggagcgagaacaggataagtgttatcagtactggcctactgaaggttccgtgactcacggggaaattaccattgagattaaaaacgatactctcagcgaggctatttccattcgtgatttcctggtgactctgaaccagccccaggcacgtcaggaggaacaggtgcgcgtggtccgacaattccatttccacgggtggcctgaaattggcatcccagcggagggcaaaggcatgattgacctgatcgctgcagtccagaaacaacaacagcaaaccggaaaccacccaattacagttcactgccgcaactctatgaactccgccacaaaatggtataagattctgctgatctactttctgataatgctgataagcaatgaggactcttgtttaaagattttctttaatttaatggagcagagacgcagtcactttcctcaggacgctcgtctctctcctccactctcagggaccgcatttgcactgtag

SEQ ID NO: 335976 - DNA, 2189 bp, Artificial Sequence
  derived and/or modified sequence
acagcagacccagttcaaagttggaattcttctagaaatcctttctcagctgtcagggaaacatggattctccaaggccaggatggtttcccagcgtcttcccaggaagacaagaggtccaccatggagcccttgtgtccactcctgctggtgggttttagcttgccgctcgccagggctctcaggggcaacgagaccactgccgacagcaacgagacaaccacgacctcaggccctccggacccgggcgcctcccagccgctgctggcctggctgctactgccgctgctgctcctcctcctcgtgctccttctcgccgcctacttcttcaggttcagggcccaagaagtattttcccatccccgtggagcacctggaggaggagatccgtatcagatccgccgacgactgcaagcagtttcgggaggagttcaactcattgccatctggacacatacaaggaacttttgaactggcaaataaagaagaaaacagagaaaaaaacagatatcccaacatccttcccaatgaccattctagggtgattctgagccaactggatggaattccctgttcagactacatcaatgcttcctacatagatggttacaaagagaagaataaattcatagcagctcaaggtcccaaacaggaaacggttaacgacttctggagaatggtctgggagcaaaagtctgcgaccatcgtcatgttaacaaacttgaaagaaaggaaagaggaaaagtgccatcagtactggcccgaccaaggctgctggacctatggaaacatccgggtgtgcgtggaggactgcgtggttttggtcgactacaccatccggaagttctgcatacagccacagctccccgacggctgcaaagcccccaggctggtctcacagctgcacttcaccagctggcccgacttcggagtgccttttacccccattgggatgctgaagttcctcaagaaagtaaagacgctcaaccccgtgcacgctgggcccatcgtggtccactgtagcgcgggcgtgggccggacgggcaccttcattgtgatcgatgccatgatggccatgatgcacgcggagcagaaggtggatgtgtttgaatttgtgtctcgaatccgtaatcagcgccctcagatggttcaaacggatatgcagtacacgttcatctaccaagccttactcgagtactacctctacggggacacagagctggacgtgtcctccctggagaagcacctgcagaccatgcacggcaccaccacccacttcgacaagatcgggctggaggaggagttcaggaaattgacaaatgtccggatcatgaaggagaacatgaggacgggcaacttgccggcaaacatgaagaaggccagggtcatccagatcatcccgtatgacttcaaccgagtgatcctttccatgaaaaggggtcaagaatacacagactacatcaacgcatccttcatagacggctaccgacagaaggactatttcatcgccacccaggggccactggcacacacggttgaggacttctggaggatgatctgggaatggaaatcccacactatcgtgatgctgacggaggtgcaggagagagagcaggataaatgctaccagtattggccaaccgagggctcagttactcatggagaaataacgattgagataaagaatgataccctttcagaagccatcagtatacgagactttctggtcactctcaatcagccccaggcccgccaggaggagcaggtccgagtagtgcgccagtttcacttccacggctggcctgagatcgggattcccgccgagggcaaaggcatgattgacctcatcgcagccgtgcagaagcagcagcagcagacaggcaaccaccccatcaccgtgcactgcaggaacagtatgaattctgctacaaagtggtacaagattttattgatatattttctgattatgctaatttcaaatgaagattcctgccttaaaatattttttaatttaatggaacaaaggagaagccactttccccaggacgcaagactctcccctccactgtccgggacagcgttcgccctttagcggggaggtcattacagcctcatggcctctaccaaggccccagatcacaggatctcctgggccttggagcacctcacgctgggggaatcaatccctg

SEQ ID NO: 335977 - DNA, 2010 bp, Artificial Sequence
  derived and/or modified sequence
atggtgagccagagactgcccagaaagaccagaggccccccctggagcccctgcgtgcacagctgctggtgggtgctggcctgcagaagccccggcctgagcggcgccaccagacccctgcccaccgccaccagacagcccagaccccaggccctgagaaccagagccccccccagcagatgctggcccggctgctactgcagatgctgcagcagcagcagctgcagcttcagcccccccaccagcagcggcagcggccccaagaagtacttccccatccccgtggagcacctggaggaggagatcagaatcagaagcgccgacgactgcaagcagttcagagaggagttcaacagcctgcccagcggccacatccagggcaccttcgagctggccaacaaggaggagaacagagagaagaacagataccccaacatcctgcccaacgaccacagcagagtgatcctgagccagctggacggcatcccctgcagcgactacatcaacgccagctacatcgacggctacaaggagaagaacaagttcatcgccgcccagggccccaagcaggagaccgtgaacgacttctggagaatggtgtgggagcagaagagcgccaccatcgtgatgctgaccaacctgaaggagagaaaggaggagaagtgccaccagtactggcccgaccagggctgctggacctacggcaacatcagagtgtgcgtggaggactgcgtggtgctggtggactacaccatcagaaagttctgcatccagccccagctgcccgacggctgcaaggcccccagactggtgagccagctgcacttcaccagctggcccgacttcggcgtgcccttcacccccatcggcatgctgaagttcctgaagaaggtgaagaccctgaaccccgtgcacgccggccccatcgtggtgcactgcagcgccggcgtgggcagaaccggcaccttcatcgtgatcgacgccatgatggccatgatgcacgccgagcagaaggtggacgtgttcgagttcgtgagcagaatcagaaaccagagaccccagatggtgcagaccgacatgcagtacaccttcatctaccaggccctgctggagtactacctgtacggcgacaccgagctggacgtgagcagcctggagaagcacctgcagaccatgcacggcaccaccacccacttcgacaagatcggcctggaggaggagttcagaaagctgaccaacgtgagaatcatgaaggagaacatgagaaccggcaacctgcccgccaacatgaagaaggccagagtgatccagatcatcccctacgacttcaacagagtgatcctgagcatgaagagaggccaggagtacaccgactacatcaacgccagcttcatcgacggctacagacagaaggactacttcatcgccacccagggccccctggcccacaccgtggaggacttctggagaatgatctgggagtggaagagccacaccatcgtgatgctgaccgaggtgcaggagagagagcaggacaagtgctaccagtactggcccaccgagggcagcgtgacccacggcgagatcaccatcgagatcaagaacgacaccctgagcgaggccatcagcatcagagacttcctggtgaccctgaaccagccccaggccagacaggaggagcaggtgagagtggtgagacagttccacttccacggctggcccgagatcggcatccccgccgagggcaagggcatgatcgacctgatcgccgccgtgcagaagcagcagcagcagaccggcaaccaccccatcaccgtgcactgcagaaacagcatgaacagcgccaccaagtggtacaagatcctgctgatctacttcctgatcatgctgatcagcaacgaggacagctgcctgaagatcttcttcaacctgatggagcagagaagaagccacttcccccaggacgccagactgagcccccccctgagcggcaccgccttcgccctgtag

SEQ ID NO: 335978 - DNA, 438 bp, Artificial Sequence
  derived and/or modified sequence
atggagccgctatgtccgttattattggtcggcttcagcctcccactggcacgtgcgctgcgaggtaatgaaacgacagccgactccaacgaaacaaccacaacatccggaccaccagatccaggagcctctcaacctctgttagcctggctgctcttgccactgctgttactgcttctcgtgctgttgttggctgcctatttctttaggttcagaaagcagcggaaggcagttgtgtccacctctgacaaaaagatgccaaatggaattttggaagagcaggagcagcaacgcgtgatgttgctcagcagaagtcccagcggacccaagaaatattttcctattcctgtggagcatctggaggaggagatcaggatcagatcagctgatgattgcaaacaatttagggaggaattcaacatgactattttaggttag

SEQ ID NO: 335979 - DNA, 423 bp, Artificial Sequence
  derived and/or modified sequence
atggaacccctgtgtcctttgttgcttgtgggtttctcccttccactcgcaagagctttgagggggaatgagaccactgccgacagcaatgagaccactacaacaagcggtcctcctgaccctggggctagtcaacccctcctggcatggctgctgcttcccctgctcctgcttctgttggtactgctcctagcagcctatttcttcaggttcagaaagcaacgcaaggctgtcgtaagtacttcggacaagaagatgcccaacggaatacttgaggagcaggagcagcagcgagtaatgttgttatctaggtccccctcaggccctaaaaagtactttcccatcccagtcgagcacttagaggaggagatcaggatcaggtctgcagacgattgcaaacaatttagggaggagtttaattag

SEQ ID NO: 335980 - DNA, 465 bp, Artificial Sequence
  derived and/or modified sequence
atggaaccactttgcccactgctcctcgtgggcttttcactgccactagctcgggcgctgagaggaaatgagacaaccgctgattctaatgagaccacaacgaccagtggtcctcccgaccccggggcgagtcagccgctgttagcttggctactacttcctttgcttctcctgctcctagtattactgcttgccgcctatttcttccggtttcggaaacaaaggaaggctgtggtgagcacatccgacaaaaaaatgccgaatggaatcttggaggagcaggagcagcagcgtgtcatgttgttatctagatcaccttcagggccaaaaaagtacttccctattcccgtggagcacctagaagaggagataaggataaggagcgcagacgattgcaagcagtttagggaagagtttaattctttaccttccgggcacatccagggcaccttcgagctcgcgtag

SEQ ID NO: 335981 - DNA, 438 bp, Artificial Sequence
  derived and/or modified sequence
atggagcccctgtgccccctgctgctggtgggcttcagcctgcccctggcccgggccctgcggggaaatgagaccacagctgacagcaatgagaccaccaccaccagcggccccccagaccccggggccagccagcccctgctggcctggctgctgctgcccctgctgctgctgctgctggtgctgctgctggccgcctacttcttccgcttcaggaagcagaggaaggctgtggtgtccaccagtgacaagaagatgcccaacggcatcctggaggagcaggagcagcagagggtgatgctgctgagccgcagccccagcggccccaagaagtacttccccatccctgtggagcacctggaggaggagatccgcatccgctctgcagatgactgcaagcagttccgggaggagttcaacatgaccatcctgggctag

SEQ ID NO: 335982 - DNA, 423 bp, Artificial Sequence
  derived and/or modified sequence
atggagcccctgtgccccctgctgctggtgggcttcagcctgcccctggcccgggccctgcggggaaatgagaccacagctgacagcaatgagaccaccaccaccagcggccccccagaccccggggccagccagcccctgctggcctggctgctgctgcccctgctgctgctgctgctggtgctgctgctggccgcctacttcttccgcttcaggaagcagaggaaggctgtggtgtccaccagtgacaagaagatgcccaacggcatcctggaggagcaggagcagcagagggtgatgctgctgagccgcagccccagcggccccaagaagtacttccccatccctgtggagcacctggaggaggagatccgcatccgctctgcagatgactgcaagcagttccgggaggagttcaactag

SEQ ID NO: 335983 - DNA, 465 bp, Artificial Sequence
  derived and/or modified sequence
atggagcccctgtgccccctgctgctggtgggcttcagcctgcccctggcccgggccctgcggggaaatgagaccacagctgacagcaatgagaccaccaccaccagcggccccccagaccccggggccagccagcccctgctggcctggctgctgctgcccctgctgctgctgctgctggtgctgctgctggccgcctacttcttccgcttcaggaagcagaggaaggctgtggtgtccaccagtgacaagaagatgcccaacggcatcctggaggagcaggagcagcagagggtgatgctgctgagccgcagccccagcggccccaagaagtacttccccatccctgtggagcacctggaggaggagatccgcatccgctctgcagatgactgcaagcagttccgggaggagttcaacagcctgcccagcggccacatccagggcacctttgagctggcctag

SEQ ID NO: 335984 - DNA, 438 bp, Artificial Sequence
  derived and/or modified sequence
atggagcccctgtgccccctgctgctggtgggcttcagcctgccccttgccagggcgctgcggggtaacgagaccactgctgattcaaacgagacaaccaccacttccggacccccggatccgggggccagtcagccacttcttgcatggctcttgctccccctgctgctgctgctcctcgtcctactcttggccgcctatttttttcgattccggaaacagcgcaaggctgttgtgtcgacctccgacaagaagatgccaaacggcattctggaagagcaggagcagcagagggtgatgttgttgtcacggtccccttcgggcccgaagaagtacttccccattcctgtggagcacctcgaggaggagatccgaatacgatccgccgatgattgcaaacagttccgcgaagaatttaacatgacaatacttggttag

SEQ ID NO: 335985 - DNA, 423 bp, Artificial Sequence
  derived and/or modified sequence
atggagcccctgtgccccctgctgctggtgggcttcagcctgcccctggctcgggctctgagaggcaacgaaacgacagccgattccaacgagacaactacaacatcgggccctcccgatccaggggcaagtcagcctttgctggcgtggctattgctccccctgttgctactgctcctagtcctacttctagctgcgtacttcttccggttcaggaagcagagaaaggcagttgtgagtacttcagacaagaaaatgccaaacggcatcttggaggaacaggaacagcagagagttatgctgctgtcgcgttctccatcaggcccaaagaaatatttccccatcccagtagaacacttagaggaagaaattaggattcggtcggcagatgactgcaagcagttcagagaagaatttaattag

SEQ ID NO: 335986 - DNA, 465 bp, Artificial Sequence
  derived and/or modified sequence
atggagcccctgtgccccctgctgctggtgggcttcagcctgcccctggcccgcgcgttgcggggaaacgaaacgacagcagactctaacgaaaccaccacaaccagcggcccccccgatcccggtgcatcacaacccctcctagcatggctgttgttacccctcttgctgttactcctagtactgttgctggctgcctacttcttcagattcagaaaacagcggaaggcagtcgtgagtacctccgataagaaaatgcctaatggcatactggaggagcaagaacagcagagagtcatgctgttgtccagaagccctagcggccctaagaagtacttcccaattcccgtggagcatctggaggaggagatcagaattaggtccgcggatgattgtaaacagtttcgcgaagagtttaacagcctgccaagcggccatatccagggtacctttgaactggcatag

SEQ ID NO: 335987 - DNA, 438 bp, Artificial Sequence
  derived and/or modified sequence
atggagccactctgcccgctgctgttggtgggcttctcactcccactcgcccgagccctgaggggtaacgagacaactgccgactctaatgaaaccactacgacctctggaccacctgatcccggtgcctctcagcctttgttggcttggctgctcctacccctgctgcttttgctcctcgtactcctactcgctgcctacttctttagatttcgcaagcagaggaaggccgtggtcagcacgagtgataaaaagatgcctaacggtatactggaggagcaagagcagcagagagttatgctactcagccgaagcccaagtggacccaagaaatatttccccattccggtggaacaccttgaagaagagataagaataagatctgcagacgactgtaagcagtttcgcgaggagtttaacatgacaatattgggctag

SEQ ID NO: 335988 - DNA, 423 bp, Artificial Sequence
  derived and/or modified sequence
atggagcctctttgcccactcctgctcgtcggcttcagtctgcccctagctcgagctcttcggggtaacgagaccacagccgatagtaacgagacaaccacaacatcaggtcctcctgatcccggagctagccagcctttgctcgcatggttgcttctgcccctgctgctgctcctgctggtgcttttactggctgcctacttttttaggttccgcaagcaacggaaggccgtagtctccaccagcgataagaagatgccaaacggaatattggaggagcaggagcaacagcgcgtaatgttactgagtcgatctcccagtggccctaaaaagtatttccccattcctgttgagcacctggaggaggaaatcagaatccggtctgctgacgattgcaaacagttccgggaggagttcaactag

SEQ ID NO: 335989 - DNA, 465 bp, Artificial Sequence
  derived and/or modified sequence
atggagccactttgtcctctcctgcttgtgggcttctccctccccctggctagggcactgcggggtaacgaaaccaccgctgactccaatgagaccactactacctcaggcccacccgaccccggagccagtcaacctcttctggcatggctcttattacctttgcttctgctgttactggttttgctcctggccgcatatttctttcggttcaggaagcagaggaaagccgtggtgtcgaccagtgacaagaaaatgccaaacgggatactcgaagaacaggaacagcaacgcgtgatgctattgagtagaagtccttccggccctaaaaagtattttcccattcctgttgagcatttggaagaagaaattcgtatccgctccgctgatgattgtaagcagtttagagaagagttcaattctttgccctcaggtcacatacaagggacgtttgaactcgcatag

SEQ ID NO: 335990 - DNA, 2304 bp, Artificial Sequence
  derived and/or modified sequence
atctcaaatcctgttgcagtcagtagcgctggctgtctgcagtagagatggttttcaatgattgtttcagaaattccttatcaacagaaaatgaacgagacggggagttttcagaaaataaatggatttgcagacaacttaacgtcatcatcgaagtcaccaaagaaagcaaagcagcgactggggaagctgaggctgaagtagcaagggcatgccacccaggctgctattccagtcgctgtgaaagcctggtcactgtctttgccacgcagaacacatctctgggaatgctgtcgatctatgcctccatcttttaaaggctttccatttctgtctggattttttctttatgggaggcagaaataatagtgaattgaatgaaatggagtatataagtgtctagcacagtccttggcacatagaaagtgctctgtaaacagtacttcgcatcaaattcttgggatgaatgaaagtgagtgcctggcgctgcacataagaaaagacgtggcagcaaaccatcctcccgacatgacgtgctgcgttggtgcgtttacgtccctgttccttctgaaagactcaaaattgtgttggagctactggtgcacctttgtaagacctgcactaacgaccgcgccactgggaagggcacttctttatgaagtcgccgtattcccagggagactggtcaacccatacaatgtgaaaaaaaaagaagctatgtgaaaaaatattcccctttgtcatagagaaggagaacttggtgaggctgggcagctgcaggagcctcagtttttcagataacagaacagagtagaccttgagggtccatttccctttttgttttaggaagtgctgtagaagggggcaaagagatctttgatatgagaaggtatttcttcaaagcagcatcgtgcctgaaatagcattgttctttacgctgagagaggaggaaatgggaatttggtgttcaacgggtttaaagtttcagttacaagaaatggacaagtccgagagctctgctgtgccacatcatgcctaaagtcaccgagactgtgttgtacacttttttgttaaaaggtaaatctcatgttaaatgttgttactacaattaaaaagaagccctaggctgtgtttgcagaaaggcactaaccatacatgtgctcaagagcccttttgtgttttcttcacttcatgttgtagttcaatttagttttgctttgcaaggatcctcggaaagtgtatcatcagcaatgacttttattttagaactaaatgtgaaccacggggggaatcatgatcgacattgctcgttgtcctttcttcctccctgtgggctgtgaatccaactcgtcctgggagcagggcgctctcgccttctgttcctctccgagctcagtgcacagaagcattctgcttacccagctgggactgctgactgcaccatcgagcacgcaggttgcactgttctcagcagctacactggattatatgccgcctttcttactgactgattatgaacttaaaacaaattcactctgctgctgtgaattatacatttatttttaagcatttatttcaactcgagatgagcggtctctcctgtaaatttctccctgctggatctttgctctggtttctggtgacatagtgtgagtgccggcagccgcgagcctcagaaggaaaattacaaagggaatactcagtaaatgatgtattgcctttcgcatcagtagcctgcttggaaatgttcaaattatcagcccaggagactccagtgctgtggacatgggtctgaacgaattgatcacctaggggctactgagaacgcggtgctctgtccaccatggagcccttgtgtccactcctgctggtgggttttagcttgccgctcgccagggctctcaggggcaacgagaccactgccgacagcaacgagacaaccacgacctcaggccctccggacccgggcgcctcccagccgctgctggcctggctgctactgccgctgctgctcctcctcctcgtgctccttctcgccgcctacttcttcaggttcaggaagcagaggaaagctgtggtcagcaccagcgacaagaagatgcccaacggaatcttggaggagcaagagcagcaaagggtgatgctgctcagcaggtcaccctcagggcccaagaagtattttcccatccccgtggagcacctggaggaggagatccgtatcagatccgccgacgactgcaagcagtttcgggaggagttcaactcattgccatctggacacatacaaggaacttttgaactggc

SEQ ID NO: 335991 - DNA, 438 bp, Artificial Sequence
  derived and/or modified sequence
atggagcccctgtgccccctgctgctggtgggcttcagcctgcccctggccagagccctgagaggcaacgagaccaccgccgacagcaacgagaccaccaccaccagcggcccccccgaccccggcgccagccagcccctgctggcctggctgctgctgcccctgctgctgctgctgctggtgctgctgctggccgcctacttcttcagattcagaaagcagagaaaggccgtggtgagcaccagcgacaagaagatgcccaacggcatcctggaggagcaggagcagcagagagtgatgctgctgagcagaagccccagcggccccaagaagtacttccccatccccgtggagcacctggaggaggagatcagaatcagaagcgccgacgactgcaagcagttcagagaggagttcaacatgaccatcctgggctag

SEQ ID NO: 335992 - DNA, 423 bp, Artificial Sequence
  derived and/or modified sequence
atggagcccctgtgccccctgctgctggtgggcttcagcctgcccctggccagagccctgagaggcaacgagaccaccgccgacagcaacgagaccaccaccaccagcggcccccccgaccccggcgccagccagcccctgctggcctggctgctgctgcccctgctgctgctgctgctggtgctgctgctggccgcctacttcttcagattcagaaagcagagaaaggccgtggtgagcaccagcgacaagaagatgcccaacggcatcctggaggagcaggagcagcagagagtgatgctgctgagcagaagccccagcggccccaagaagtacttccccatccccgtggagcacctggaggaggagatcagaatcagaagcgccgacgactgcaagcagttcagagaggagttcaactag

SEQ ID NO: 335993 - DNA, 465 bp, Artificial Sequence
  derived and/or modified sequence
atggagcccctgtgccccctgctgctggtgggcttcagcctgcccctggccagagccctgagaggcaacgagaccaccgccgacagcaacgagaccaccaccaccagcggcccccccgaccccggcgccagccagcccctgctggcctggctgctgctgcccctgctgctgctgctgctggtgctgctgctggccgcctacttcttcagattcagaaagcagagaaaggccgtggtgagcaccagcgacaagaagatgcccaacggcatcctggaggagcaggagcagcagagagtgatgctgctgagcagaagccccagcggccccaagaagtacttccccatccccgtggagcacctggaggaggagatcagaatcagaagcgccgacgactgcaagcagttcagagaggagttcaacagcctgcccagcggccacatccagggcaccttcgagctggcctag

SEQ ID NO: 335994 - protein, 589 aa, Artificial Sequence
  derived and/or modified sequence
MASSQRDMEDWVQAIRRVIWAPLGGGTARRSHAHPLEPLPPGIFGQRLEETVHHERKYGPRLAPLLVEQCVDFIRERGLTEEGLFRMPGQANLVRDLQDSFDCGEKPLFDSTTDVHTVASLLKLYLRELPEPVVPFARYEDFLSCAQLLTKDEGEGTLELAKQVSNLPQANYNLLRYICKFLDEVQAYSNVNKMSVQNLATVFGPNILRPQVEDPVTIMEGTSLVQHLMTVLIRKHSQLFTAPVPEGPTSPRGGLQCAVGWGSEEVTRDSQGEPGGPGLPAHRTSSLDGAAVAVLSRTAPTGPGSRCSPGKKVQTLPSWKSSFRQPRSLSGSPKGGGSSLEVPIISSGGNWLMNGLSSLRGHRRASSGDRLKDSGSVQRLSTYDNVPAPGLVPGIPSVASMAWSGASSSESSVGGSLSSCTACRASDSSARSSLHTDWALEPSPLPSSSEDPKSLDLDHSMDEAGAGASNSEPSEPDSPTREHARRSEALQGLVTELRAELCRQRTEYERSVKRIEEGSADLRKRMSRLEEELDQEKKKYIMLEIKLRNSERAREDAERRNQLLQREMEEFFSTLGSLTVGAKGARAPK

SEQ ID NO: 335995 - DNA, 393 bp, Artificial Sequence
  derived and/or modified sequence
atgagcctgtgcagcctgctgagcccccggagcggcttccggtgctgctgcgctgcaccccccccccccgcccaacctcaccaggaagcccagggcgggttggtagagctgcttatgcacgccgccgccagaaagactctattcaattttccacctgctccatcacgcgcctcgcctggccatagggtggcttgccagcccgacagggcaaggaagtccggcagttgggccgtggctcagcggcgccgtgaacaggaagaggccggcgcccgcgccggcgccgtggacccgctgggattgccccttgttagttccatctcgtgcgtgcagcactgtaacttggcggccggcgtgcaaacaggacgaccccctgcatcctcaacggactgctag

SEQ ID NO: 335996 - protein, 377 aa, Artificial Sequence
  derived and/or modified sequence
MCEEEDSTALVCDNGSGLCKAGFAGDDAPRAVFPSIVGRPRHQGVMVGMGQKDSYVGDEAQSKRGILTLKYPIEHGIITNWDDMEKIWHHSFYNELRVAPEEHPTLLTEAPLNPKANREKMTQIMFETFNVPAMYVAIQAVLSLYASGRTTGIVLDSGDGVTHNVPIYEGYALPHAIMRLDLAGRDLTDYLMKILTERGYSFVTTAEREIVRDIKEKLCYVALDFENEMATAASSSSLEKSYELPDGQVITIGNERFRCPETLFQPSFIGMESAGIHETTYNSIMKCDIDIRKDLYANNVLSGGTTMYPGIADRMQKEITALAPSTMKIKIIAPPERKYSVWIGGSILASLSTFQQMWISKQEYDEAGPSIVHRKCF

SEQ ID NO: 335997 - protein, 151 aa, Artificial Sequence
  derived and/or modified sequence
MCEEEDSTALVCDNGSGLCKAGFAGDDAPRAVFPSIVGRPRHQGVMVGMGQKDSYVGDEAQSKRGILTLKYPIEHGIITNWDDMEKIWHHSFYNELRVAPEEHPTLLTEAPLNPKANREKMTQIMFETFNVPAMYVAIQAVLSLYASGRTT

SEQ ID NO: 335998 - protein, 332 aa, Artificial Sequence
  derived and/or modified sequence
MVGMGQKDSYVGDEAQSKRGILTLKYPIEHGIITNWDDMEKIWHHSFYNELRVAPEEHPTLLTEAPLNPKANREKMTQIMFETFNVPAMYVAIQAVLSLYASGRTTGIVLDSGDGVTHNVPIYEGYALPHAIMRLDLAGRDLTDYLMKILTERGYSFVTTAEREIVRDIKEKLCYVALDFENEMATAASSSSLEKSYELPDGQVITIGNERFRCPETLFQPSFIGMESAGIHETTYNSIMKCDIDIRKDLYANNVLSGGTTMYPGIADRMQKEITALAPSTMKIKIIAPPERKYSVWIGGSILASLSTFQQMWISKQEYDEAGPSIVHRKCF

SEQ ID NO: 335999 - DNA, 1134 bp, Artificial Sequence
  derived and/or modified sequence
atgtgcgaggaggaggacagcaccgccctggtgtgcgacaacggcagcggcctgtgcaaggccggcttcgccggcgacgacgcccccagagccgtgttccccagcatcgtgggcagacccagacaccagggcgtgatggtgggcatgggccagaaggacagctacgtgggcgacgaggcccagagcaagagaggcatcctgaccctgaagtaccccatcgagcacggcatcatcaccaactgggacgacatggagaagatctggcaccacagcttctacaacgagctgagagtggcccccgaggagcaccccaccctgctgaccgaggcccccctgaaccccaaggccaacagagagaagatgacccagatcatgttcgagaccttcaacgtgcccgccatgtacgtggccatccaggccgtgctgagcctgtacgccagcggcagaaccaccggcatcgtgctggacagcggcgacggcgtgacccacaacgtgcccatctacgagggctacgccctgccccacgccatcatgagactggacctggccggcagagacctgaccgactacctgatgaagatcctgaccgagagaggctacagcttcgtgaccaccgccgagagagagatcgtgagagacatcaaggagaagctgtgctacgtggccctggacttcgagaacgagatggccaccgccgccagcagcagcagcctggagaagagctacgagctgcccgacggccaggtgatcaccatcggcaacgagagattcagatgccccgagaccctgttccagcccagcttcatcggcatggagagcgccggcatccacgagaccacctacaacagcatcatgaagtgcgacatcgacatcagaaaggacctgtacgccaacaacgtgctgagcggcggcaccaccatgtaccccggcatcgccgacagaatgcagaaggagatcaccgccctggcccccagcaccatgaagatcaagatcatcgccccccccgagagaaagtacagcgtgtggatcggcggcagcatcctggccagcctgagcaccttccagcagatgtggatcagcaagcaggagtacgacgaggccggccccagcatcgtgcacagaaagtgcttctag

SEQ ID NO: 336000 - DNA, 1134 bp, Artificial Sequence
  derived and/or modified sequence
atgtgcgaggaagaagactcaacagccctcgtgtgcgataatggtagcgggttgtgcaaggctgggtttgccggggacgacgcccctcgcgcagtcttccctagcatagtgggccggccacgccaccagggcgtgatggtgggtatgggccagaaagactcatatgtgggtgatgaagcccagagcaagcgtggtatcctcaccttgaagtatcctatcgagcacggtatcatcaccaattgggacgacatggagaaaatctggcaccatagcttttataacgaactgagggttgcaccagaggagcatcccaccctgctgactgaggcccccctcaaccctaaggctaatcgggagaagatgacacagattatgttcgagaccttcaatgtgcccgccatgtatgtcgcaatccaagctgtcctgagtctctacgcaagcggaagaaccacaggaattgtactcgactctggcgacggtgtaacacacaatgttcccatttatgaaggctacgccctgcctcacgccatcatgcggctcgatttggcagggagggacctcaccgactacctgatgaaaatcctcactgagaggggatattcattcgtgacaactgctgagcgagaaatcgtgcgtgacataaaggagaaattgtgctacgtggcactggattttgaaaacgaaatggctacggccgcgagcagcagctcactggaaaagtcctacgaactgcccgatgggcaggtcattactatcgggaacgagcggtttcgctgcccagaaaccttattccaacctagttttatcggcatggagtccgcgggaatccatgagactacttacaatagtattatgaaatgtgatatcgatatccggaaagacctttatgcaaacaacgttttaagtgggggtacaaccatgtaccctggcatcgcagaccggatgcaaaaagaaatcaccgctctcgctccatccaccatgaaaatcaaaataattgccccgcctgagagaaaatactcggtgtggattggtggctccattctagcatcacttagtacctttcaacagatgtggatttcgaagcaggaatatgacgaggcaggcccatccatcgtgcaccgaaaatgtttttag

SEQ ID NO: 336001 - DNA, 1134 bp, Artificial Sequence
  derived and/or modified sequence
atgtgtgaggaggaggacagcacagccctggtgtgtgacaatggcagcggcctgtgcaaggccggctttgctggagatgatgcccccagggctgtgttccccagcatcgtgggccggcccaggcaccagggcgtgatggtgggcatgggccagaaggacagctatgtgggagatgaggcccagagcaagaggggcatcctgaccctgaagtaccccattgaacatggcatcatcaccaactgggatgacatggagaagatctggcaccacagcttctacaatgagctgcgggtggcccctgaggagcaccccaccctgctgacagaggcccccctgaaccccaaggccaaccgggagaagatgacccagatcatgtttgagaccttcaacgtgcctgccatgtatgtggccatccaggccgtgctgagcctgtatgccagcggccgcaccactggaattgtgctggacagcggagatggagtgacccacaacgtgcccatctatgagggctacgccctgccccacgccatcatgaggctggacctggccggccgggacctgacagactacctgatgaagatcctgacagagcggggctacagctttgtgaccacagctgagcgggagatcgtgcgggacatcaaggagaagctgtgctacgtggccctggactttgaaaatgagatggccacagctgccagcagcagcagcctggagaagagctatgagctgcctgatggccaggtgatcaccatcggaaatgaacgcttccgctgcccagagaccctcttccagcccagcttcatcggcatggagagcgctggcatccacgagaccacctacaacagcatcatgaagtgtgacatcgacatcaggaaggacctgtatgccaacaacgtgctgagcggcggcaccaccatgtacccaggcattgctgacaggatgcagaaggagatcacagccctggcccccagcaccatgaagatcaagatcatcgcccctcctgagaggaagtacagcgtgtggattggaggcagcatcctggccagcctgagcaccttccagcagatgtggatcagcaagcaggagtatgatgaagctggccccagcatcgtgcacaggaagtgcttctag

SEQ ID NO: 336002 - DNA, 1134 bp, Artificial Sequence
  derived and/or modified sequence
atgtgcgaggaggaggacagcaccgccctggtgtgcgacaacggctccggactatgtaaagctggttttgccggtgatgacgccccccgggccgttttcccctcaatagtcggaagacctcggcatcagggcgtcatggtggggatggggcagaaagattcttacgtaggcgatgaggcacaaagcaagcgggggatattgacactgaaataccccatcgaacacggcatcattaccaactgggatgatatggagaaaatatggcatcactcattttacaacgagctgcgcgtggccccagaggaacatcccaccctcctcaccgaggcgccccttaacccaaaggctaaccgcgagaagatgactcaaatcatgttcgaaacatttaatgtgcctgccatgtatgtagccatccaggcggtcctttccctgtatgcatcagggagaaccaccggaattgtgctggacagcggggacggtgttacacacaacgtgcctatctatgaggggtatgctttaccccatgccataatgcgcctggacctcgctggtagagacctgaccgactacttaatgaaaattttgactgagcgcgggtactcattcgtgaccactgccgaacgggagattgtgcgcgatatcaaagagaagttgtgctatgtcgcattggatttcgagaacgagatggcaactgcagcaagtagcagcagtcttgagaaatcatacgagcttcctgacgggcaggttatcaccatcggaaacgaacggtttagatgcccagagaccctgttccaaccatcctttattgggatggaatctgctggtatccacgaaaccacttataacagtatcatgaagtgcgatatcgacattagaaaggacctgtatgccaacaatgtgttatcagggggcactactatgtatccgggtatagcagataggatgcaaaaagagattaccgctctagcgccttctactatgaaaattaagataatcgccccaccagaacgaaagtacagcgtctggatcggcgggagcatcctggccagtctctctacttttcaacagatgtggatctccaaacaggagtacgatgaagcaggcccctccatcgtccatcgcaagtgcttctag

SEQ ID NO: 336003 - DNA, 1134 bp, Artificial Sequence
  derived and/or modified sequence
atgtgtgaagaagaggatagcacagccctcgtctgtgacaatggcagcggactttgcaaagctggcttcgctggggatgatgcccctagggctgtgttccccagcattgtgggtcgtccccgtcaccagggtgtgatggtaggtatggggcagaaggacagctatgtaggcgacgaggctcagagcaaaagaggcatccttactctcaaatatccaatcgaacacgggattatcactaactgggacgatatggaaaaaatttggcatcactcgttctacaatgagctccgagtggcccctgaggaacaccctacgctgctcacagaggcaccattgaatccaaaggctaaccgagagaagatgactcaaattatgttcgagacatttaacgtaccagccatgtatgtcgcaatccaggctgtactgagcttgtacgcgtccggaaggacgaccggcatcgtgctcgactctggagacggggtaactcataatgttcctatatatgagggctacgccctcccccacgcaattatgcggttggacctcgctgggcgagacttgactgactacctcatgaaaatcttaaccgaacggggatatagtttcgtgaccacagccgagcgtgagatcgttagggatataaaagaaaaactgtgttatgttgccctggacttcgagaacgagatggctactgccgcttcatcttccagcctagaaaagtcctacgaactcccagacggccaggtgatcaccatcggcaatgaacgtttccgttgccctgaaacattattccaacccagttttatcgggatggagtcggcgggtatccacgaaacgacctataattccattatgaaatgcgatatcgacatacgtaaagatctctatgcaaacaacgtacttagtggcggtacaactatgtaccccggtattgcagatcgtatgcaaaaggagataactgctctggctcccagcactatgaaaatcaaaattattgcgcctcccgagagaaaatattcagtctggattggcggttccattctggccagcctatctacgttccagcagatgtggatctctaagcaggagtatgacgaagccggaccatctattgtgcacaggaagtgtttttag

SEQ ID NO: 336004 - DNA, 1349 bp, Artificial Sequence
  derived and/or modified sequence
gaacaccacccagtgtggagcagcccagccaagcactgtcaggaatcctgtgaagcagctccagctatgtgtgaagaagaggacagcactgccttggtgtgtgacaatggctctgggctctgtaaggccggctttgctggggacgatgctcccagggctgttttcccatccattgtgggacgtcccagacatcagggggtgatggtgggaatgggacaaaaagacagctacgtgggtgacgaagcacagagcaaaagaggaatcctgaccctgaagtacccgatagaacatggcatcatcaccaactgggacgacatggaaaagatctggcaccactctttctacaatgagcttcgtgttgcccctgaagagcatcccaccctgctcacggaggcacccctgaaccccaaggccaaccgggagaaaatgactcaaattatgtttgagactttcaatgtcccagccatgtatgtggctatccaggcggtgctgtctctctatgcctctggacgcacaactggcatcgtgctggactctggagatggtgtcacccacaatgtccccatctatgagggctatgccttgccccatgccatcatgcgtctggatctggctggccgagatctcactgactacctcatgaagatcctgactgagcgtggctattccttcgttactactgctgagcgtgagattgtccgggacatcaaggagaaactgtgttatgtagctctggactttgaaaatgagatggccactgccgcatcctcatcctcccttgagaagagttacgagttgcctgatgggcaagtgatcaccatcggaaatgaacgtttccgctgcccagagaccctgttccagccatccttcatcgggatggagtctgctggcatccatgaaaccacctacaacagcatcatgaagtgtgatattgacatcaggaaggacctctatgctaacaatgtcctatcagggggcaccactatgtaccctggcattgccgaccgaatgcagaaggagatcacggccctagcacccagcaccatgaagatcaagatcattgcccctccggagcgcaaatactctgtctggatcggtggctccatcctggcctctctgtccaccttccagcagatgtggatcagcaaacaggaatacgatgaagccgggccttccattgtccaccgcaaatgcttctaaaacactttcctgctcctctctgtctctagcacacaactgtgaatgtcctgtggaattatgccttcagttcttttccaaatcattcctagccaaagctctgactcgttacctatgtgttttttaataaatctgaaataggctactggtaa

SEQ ID NO: 336005 - DNA, 878 bp, Artificial Sequence
  derived and/or modified sequence
gacctttggcttggcttgtcagggcttgtccaggagttccgctcctctctccaaccggggtccccctccagcgaccctaaagcttcccagacttccgcttcaattcctgtccgcaccccacgcccacctcaacgtggagcgcagtggtctccgaggagcgccggagctgccccgcctgcccagcggggtcagcacttcgcatcaaggcccaagaaaagcaagtcctccagcgttctgagcacccgggcctgagggaaggtcctaacagcccccgggagccagtctccaacgcctcccgcagcagcccgccgctcccaggtgcccgcgtgcgccgctgccgccgcaatcccgcacgcgtcccgcgcccgccccactttgcctatccccgggactaagacgggaatcctgtgaagcagctccagctatgtgtgaagaagaggacagcactgccttggtgtgtgacaatggctctgggctctgtaaggccggctttgctggggacgatgctcccagggctgttttcccatccattgtgggacgtcccagacatcagggggtgatggtgggaatgggacaaaaagacagctacgtgggtgacgaagcacagagcaaaagaggaatcctgaccctgaagtacccgatagaacatggcatcatcaccaactgggacgacatggaaaagatctggcaccactctttctacaatgagcttcgtgttgcccctgaagagcatcccaccctgctcacggaggcacccctgaaccccaaggccaaccgggagaaaatgactcaaattatgtttgagactttcaatgtcccagccatgtatgtggctatccaggcggtgctgtctctctatgcctctggacgcacaactg

SEQ ID NO: 336006 - DNA, 744 bp, Artificial Sequence
  derived and/or modified sequence
caaccggggtccccctccagcgaccctaaagcttcccagacttccgcttcaattcctgtccgcaccccacgcccacctcaacgtggagcgcagtggtctccgaggagcgccggagctgccccgcctgcccagcggggtcagcacttcgcatcaaggcccaagaaaagcaagtcctccagcgttctgagcacccgggcctgagggaaggtcctaacagcccccgggagccagtctccaacgcctcccgcagcagcccgccgctcccagaatcctgtgaagcagctccagctatgtgtgaagaagaggacagcactgccttggtgtgtgacaatggctctgggctctgtaaggccggctttgctggggacgatgctcccagggctgttttcccatccattgtgggacgtcccagacatcagggggtgatggtgggaatgggacaaaaagacagctacgtgggtgacgaagcacagagcaaaagaggaatcctgaccctgaagtacccgatagaacatggcatcatcaccaactgggacgacatggaaaagatctggcaccactctttctacaatgagcttcgtgttgcccctgaagagcatcccaccctgctcacggaggcacccctgaaccccaaggccaaccgggagaaaatgactcaaattatgtttgagactttcaatgtcccagccatgtatgtggctatccaggcggtgctgtctctctatgcctctggacgcacaactg

SEQ ID NO: 336007 - DNA, 1756 bp, Artificial Sequence
  derived and/or modified sequence
ctctccccgcccccgcggggcggcgcgcactcacccacccgcgccggagcggacctttggcttggcttgtcagggcttgtccaggagttccgctcctctctccaaccggggtccccctccagcgaccctaaagcttcccagacttccgcttcaattcctgtccgcaccccacgcccacctcaacgtggagcgcagtggtctccgaggagcgccggagctgccccgcctgcccagcggggtcagcacttcgcatcaaggcccaagaaaagcaagtcctccagcgttctgagcacccgggcctgagggaaggtcctaacagcccccgggagccagtctccaacgcctcccgcagcagcccgccgctcccaggtgcccgcgtgcgccgctgccgccgcaatcccgcacgcgtcccgcgcccgccccactttgcctatccccgggactaagacgggaatcctgtgaagcagctccagctatgtgtgaagaagaggacagcactgccttggtgtgtgacaatggctctgggctctgtaaggccggctttgctggggacgatgctcccagggctgttttcccatccattgtgggacgtcccagacatcagggggtgatggtgggaatgggacaaaaagacagctacgtgggtgacgaagcacagagcaaaagaggaatcctgaccctgaagtacccgatagaacatggcatcatcaccaactgggacgacatggaaaagatctggcaccactctttctacaatgagcttcgtgttgcccctgaagagcatcccaccctgctcacggaggcacccctgaaccccaaggccaaccgggagaaaatgactcaaattatgtttgagactttcaatgtcccagccatgtatgtggctatccaggcggtgctgtctctctatgcctctggacgcacaactggcatcgtgctggactctggagatggtgtcacccacaatgtccccatctatgagggctatgccttgccccatgccatcatgcgtctggatctggctggccgagatctcactgactacctcatgaagatcctgactgagcgtggctattccttcgttactactgctgagcgtgagattgtccgggacatcaaggagaaactgtgttatgtagctctggactttgaaaatgagatggccactgccgcatcctcatcctcccttgagaagagttacgagttgcctgatgggcaagtgatcaccatcggaaatgaacgtttccgctgcccagagaccctgttccagccatccttcatcgggatggagtctgctggcatccatgaaaccacctacaacagcatcatgaagtgtgatattgacatcaggaaggacctctatgctaacaatgtcctatcagggggcaccactatgtaccctggcattgccgaccgaatgcagaaggagatcacggccctagcacccagcaccatgaagatcaagatcattgcccctccggagcgcaaatactctgtctggatcggtggctccatcctggcctctctgtccaccttccagcagatgtggatcagcaaacaggaatacgatgaagccgggccttccattgtccaccgcaaatgcttctaaaacactttcctgctcctctctgtctctagcacacaactgtgaatgtcctgtggaattatgccttcagttcttttccaaatcattcctagccaaagctctgactcgttacctatgtgttttttaataaatctgaaataggctactggt

SEQ ID NO: 336008 - DNA, 456 bp, Artificial Sequence
  derived and/or modified sequence
atgtgcgaggaggaggacagcaccgccctggtgtgcgacaacggcagcggcctgtgcaaggccggcttcgccggcgacgacgcccccagagccgtgttccccagcatcgtgggcagacccagacaccagggcgtgatggtgggcatgggccagaaggacagctacgtgggcgacgaggcccagagcaagagaggcatcctgaccctgaagtaccccatcgagcacggcatcatcaccaactgggacgacatggagaagatctggcaccacagcttctacaacgagctgagagtggcccccgaggagcaccccaccctgctgaccgaggcccccctgaaccccaaggccaacagagagaagatgacccagatcatgttcgagaccttcaacgtgcccgccatgtacgtggccatccaggccgtgctgagcctgtacgccagcggcagaaccacctag

SEQ ID NO: 336009 - DNA, 999 bp, Artificial Sequence
  derived and/or modified sequence
atggtgggcatgggccagaaggacagctacgtgggcgacgaggcccagagcaagagaggcatcctgaccctgaagtaccccatcgagcacggcatcatcaccaactgggacgacatggagaagatctggcaccacagcttctacaacgagctgagagtggcccccgaggagcaccccaccctgctgaccgaggcccccctgaaccccaaggccaacagagagaagatgacccagatcatgttcgagaccttcaacgtgcccgccatgtacgtggccatccaggccgtgctgagcctgtacgccagcggcagaaccaccggcatcgtgctggacagcggcgacggcgtgacccacaacgtgcccatctacgagggctacgccctgccccacgccatcatgagactggacctggccggcagagacctgaccgactacctgatgaagatcctgaccgagagaggctacagcttcgtgaccaccgccgagagagagatcgtgagagacatcaaggagaagctgtgctacgtggccctggacttcgagaacgagatggccaccgccgccagcagcagcagcctggagaagagctacgagctgcccgacggccaggtgatcaccatcggcaacgagagattcagatgccccgagaccctgttccagcccagcttcatcggcatggagagcgccggcatccacgagaccacctacaacagcatcatgaagtgcgacatcgacatcagaaaggacctgtacgccaacaacgtgctgagcggcggcaccaccatgtaccccggcatcgccgacagaatgcagaaggagatcaccgccctggcccccagcaccatgaagatcaagatcatcgccccccccgagagaaagtacagcgtgtggatcggcggcagcatcctggccagcctgagcaccttccagcagatgtggatcagcaagcaggagtacgacgaggccggccccagcatcgtgcacagaaagtgcttctag

SEQ ID NO: 336010 - DNA, 1194 bp, Artificial Sequence
  derived and/or modified sequence
gaacaccacccagtgtggagcagcccagccaagcactgtcagggggtgatggtgggaatgggacaaaaagacagctacgtgggtgacgaagcacagagcaaaagaggaatcctgaccctgaagtacccgatagaacatggcatcatcaccaactgggacgacatggaaaagatctggcaccactctttctacaatgagcttcgtgttgcccctgaagagcatcccaccctgctcacggaggcacccctgaaccccaaggccaaccgggagaaaatgactcaaattatgtttgagactttcaatgtcccagccatgtatgtggctatccaggcggtgctgtctctctatgcctctggacgcacaactggcatcgtgctggactctggagatggtgtcacccacaatgtccccatctatgagggctatgccttgccccatgccatcatgcgtctggatctggctggccgagatctcactgactacctcatgaagatcctgactgagcgtggctattccttcgttactactgctgagcgtgagattgtccgggacatcaaggagaaactgtgttatgtagctctggactttgaaaatgagatggccactgccgcatcctcatcctcccttgagaagagttacgagttgcctgatgggcaagtgatcaccatcggaaatgaacgtttccgctgcccagagaccctgttccagccatccttcatcgggatggagtctgctggcatccatgaaaccacctacaacagcatcatgaagtgtgatattgacatcaggaaggacctctatgctaacaatgtcctatcagggggcaccactatgtaccctggcattgccgaccgaatgcagaaggagatcacggccctagcacccagcaccatgaagatcaagatcattgcccctccggagcgcaaatactctgtctggatcggtggctccatcctggcctctctgtccaccttccagcagatgtggatcagcaaacaggaatacgatgaagccgggccttccattgtccaccgcaaatgcttctaaaacactttcctgctcctctctgtctctagcacacaactgtgaatgtcctgtggaattatgccttcagttcttttccaaatcattcctagccaaagctctgactcgttacctatgtgttttttaataaatctgaaataggctactggt

SEQ ID NO: 336011 - DNA, 456 bp, Artificial Sequence
  derived and/or modified sequence
atgtgcgaggaggaggactcgacagccctggtgtgcgataacggctccggcctgtgtaaagcaggttttgccggagatgatgcaccccgcgcagtattcccaagcattgtgggcaggccacggcatcagggtgttatggttggaatgggacagaaggactcttatgttggtgacgaggcacaaagcaaacgtgggattctgaccctgaagtatcctatcgaacacgggatcattacgaactgggacgatatggagaaaatctggcatcactccttttataacgaactgagagtggccccagaagaacatccaacccttctcactgaagccccactgaatccaaaagctaatagagagaagatgacccagattatgttcgagacatttaatgtaccagccatgtatgtggcgatccaggctgttctgtccttgtacgccagcggccggactacctag

SEQ ID NO: 336012 - DNA, 456 bp, Artificial Sequence
  derived and/or modified sequence
atgtgcgaggaggaagatagcaccgccttggtatgcgacaatggaagcgggctctgcaaggccggattcgctggagacgacgcgcctcgagccgtgttcccttccattgtcggacgaccccggcaccagggtgtgatggtcggaatgggccagaaggatagctacgtcggcgacgaagcccagagtaaaaggggaattctgactctaaaatatcccattgagcacggcattatcaccaattgggatgatatggaaaagatctggcatcactccttttacaacgagctgcgagtcgctccagaagaacaccccaccctattgacggaggcgccactcaatcctaaagcaaatagagagaagatgacgcagattatgtttgaaacatttaacgtgccggcaatgtatgtcgctattcaggctgtcctgagtctttatgcgtccggccgtacaacttag

SEQ ID NO: 336013 - DNA, 1134 bp, Artificial Sequence
  derived and/or modified sequence
atgtgtgaggaagaagactcaacagccctggtctgcgacaacggaagtggactttgcaaggcgggtttcgccggcgatgatgcgccccgtgctgtgttcccaagtatcgttggccgccctcggcatcagggtgtaatggttggaatgggtcaaaaggactcctatgtcggcgatgaagcacagtccaaaagaggcatccttactctgaaataccctatcgagcacgggatcatcacaaattgggacgatatggagaaaatctggcaccactcattctacaacgagctgcgcgtggcccccgaggaacacccgactctcctgaccgaggcccccctgaaccccaaagctaatagagagaaaatgacacagatcatgttcgaaacattcaatgttccagccatgtatgtggccattcaggctgtcctgtctctgtacgccagcggccgcaccaccggaatcgttctcgattcaggcgacggcgtcacacacaatgttcctatctatgagggttacgcgctgcctcacgctatcatgagattagacctggccggccgggatctgacggactacttgatgaaaattctgacagaaagaggttatagttttgtcaccaccgcagaacgagaaatagtgagagacataaaggaaaagctttgctatgtggcgctggatttcgagaatgaaatggcaaccgcagcctcttcgagcagcctggagaagtcctacgaattacccgacggtcaagttattaccattggtaacgagaggttccgctgtccagaaacattgtttcagccgagctttataggaatggagtcggccgggattcacgagactacatacaacagcatcatgaaatgtgacatcgatattagaaaggatctatacgcaaacaacgtgctgagcggcggcacaaccatgtacccagggattgcagacaggatgcaaaaagaaatcacggctctggccccttccacaatgaaaatcaagattatcgccccgcccgagagaaaatattccgtctggatcggggggagtatactcgctagcttaagtacttttcagcagatgtggatctcaaagcaggaatatgatgaggccgggccctccattgtgcacagaaagtgcttctag

SEQ ID NO: 336014 - DNA, 999 bp, Artificial Sequence
  derived and/or modified sequence
atggtgggaatgggacaaaaagattcgtacgtgggggacgaagctcagtccaagcgcggcattctgactttaaagtaccctatcgaacatggtatcattacaaactgggacgacatggagaaaatttggcatcactccttttataacgagctgcgggttgccccggaagaacatcccaccctcttaactgaagctcctctgaaccccaaggcaaatcgggaaaaaatgacgcagatcatgtttgagacctttaatgtgcccgctatgtacgttgcgatccaagcggtgctgagcctctatgcaagcggcaggaccaccggcatcgtgttggatagcggggatggtgtcacccacaatgttccaatttacgagggttacgccttgccccacgcgatcatgaggctcgacttggctggccgcgatctcacagactacctcatgaaaattctgaccgagcgaggctacagtttcgtgaccacagcagaacgcgagatagtgcgcgatatcaaagagaaactgtgctatgtggccttagacttcgagaatgagatggcaacagccgcatctagctcatccctggaaaagtcctatgaattgccagatggccaggtcatcactattggcaacgagagattcaggtgccctgaaaccttattccagcccagttttatcgggatggagtcagccggcattcatgagaccacttacaactccattatgaaatgtgacattgacatccgtaaagacttatacgcaaataacgtgctgtccgggggcaccactatgtatcctggcatagccgaccggatgcagaaggaaataacagctctcgctccctcaacaatgaagataaaaatcattgcccctcccgaacgcaagtactctgtctggattggaggaagtatcttggcttcgttatctacttttcagcagatgtggattagtaaacaagagtatgatgaggccgggccttccattgtacaccggaagtgtttctag

SEQ ID NO: 336015 - DNA, 456 bp, Artificial Sequence
  derived and/or modified sequence
atgtgtgaggaggaggacagcacagccctggtgtgtgacaatggcagcggcctgtgcaaggccggctttgctggagatgatgcccccagggctgtgttccccagcatcgtgggccggcccaggcaccagggcgtgatggtgggcatgggccagaaggacagctatgtgggagatgaggcccagagcaagaggggcatcctgaccctgaagtaccccattgaacatggcatcatcaccaactgggatgacatggagaagatctggcaccacagcttctacaatgagctgcgggtggcccctgaggagcaccccaccctgctgacagaggcccccctgaaccccaaggccaaccgggagaagatgacccagatcatgtttgagaccttcaacgtgcctgccatgtatgtggccatccaggccgtgctgagcctgtatgccagcggccgcaccacctag

SEQ ID NO: 336016 - DNA, 999 bp, Artificial Sequence
  derived and/or modified sequence
atggtgggcatgggccagaaggacagctatgtgggagatgaggcccagagcaagaggggcatcctgaccctgaagtaccccatcgagcacggcatcatcaccaactgggatgacatggagaagatctggcaccacagcttctacaatgagctgcgggtggcccctgaggagcaccccaccctgctgacagaggcccccctgaaccccaaggccaaccgggagaagatgacccagatcatgtttgagaccttcaacgtgcctgccatgtatgtggccatccaggccgtgctgagcctgtatgccagcggccgcaccaccggcatcgtgctggacagcggagatggagtgacccacaacgtgcccatctatgagggctacgccctgccccacgccatcatgaggctggacctggccggccgggacctgacagactacctgatgaagatcctgacagagcggggctacagctttgtgaccacagctgagcgggagatcgtgcgggacatcaaggagaagctgtgctacgtggccctggactttgaaaatgagatggccacagctgccagcagcagcagcctggagaagagctatgagctgcctgatggccaggtgatcaccatcggaaatgaacgcttccgctgcccagagaccctcttccagcccagcttcatcggcatggagagcgctggcatccacgagaccacctacaacagcatcatgaagtgtgacatcgacatcaggaaggacctgtatgccaacaacgtgctgagcggcggcaccaccatgtacccaggcattgctgacaggatgcagaaggagatcacagccctggcccccagcaccatgaagatcaagatcatcgcccctcctgagaggaagtacagcgtgtggattggaggcagcatcctggccagcctgagcaccttccagcagatgtggatcagcaagcaggagtatgatgaggccggccccagcatcgtgcacaggaagtgcttctag

SEQ ID NO: 336017 - DNA, 456 bp, Artificial Sequence
  derived and/or modified sequence
atgtgcgaggaggaggacagcaccgccctggtgtgcgacaacggctcaggcttatgcaaggcaggcttcgccggcgacgacgcacctcgcgctgtttttccctcgattgtaggaaggccccggcaccagggagtgatggttggtatgggtcaaaaagatagctatgtgggagacgaggctcagtcgaagcggggcatcctgaccctaaagtatcctattgaacacggtattatcacaaattgggatgatatggagaaaatatggcatcactccttctacaatgaacttcgcgtggctcctgaagaacacccaactcttctcacagaggcccctttgaatcctaaggccaatcgtgagaaaatgactcagataatgttcgagaccttcaatgtgcccgctatgtatgtggcaatccaggccgtgctgagcctctacgcatctggtcgaactacttag

SEQ ID NO: 336018 - DNA, 456 bp, Artificial Sequence
  derived and/or modified sequence
atgtgcgaggaggaggacagcaccgccctggtgtgcgacaacggcagtggcctgtgtaaagctgggtttgctggcgatgatgcaccccgagctgtgtttccaagcatcgtggggcggccacgacaccagggtgtcatggtgggcatgggccagaaagactcttacgttggagacgaggcccagagtaaacgcgggatcctaactctgaaatatccgattgagcacggcattataactaattgggatgacatggaaaagatttggcatcacagcttttacaatgagctgagggttgcccccgaagaacaccctactctgctcactgaagcccccctgaaccctaaagctaatcgggaaaagatgacacagataatgtttgagaccttcaacgttcctgcaatgtatgtggccattcaggcggtgctgagcctatacgcatctggccggacaacctag

SEQ ID NO: 336019 - DNA, 1134 bp, Artificial Sequence
  derived and/or modified sequence
atgtgcgaggaggaggacagcaccgccctggtgtgcgacaacggctccggcctctgcaaagcagggtttgccggggacgatgcccccagagcagtctttccttccatcgtgggcaggccacggcatcaaggcgttatggtggggatgggccagaaggactcatacgtaggcgatgaagcccagtctaagcggggaattctcaccttgaaataccctatcgaacatggcattattactaactgggacgatatggagaagatctggcaccattctttttacaatgagttacgcgtggctcccgaggagcatccaacactcctcaccgaggccccattgaatcccaaagcaaacagagagaaaatgacccagattatgtttgagacattcaacgttcccgcgatgtatgtagccattcaagctgtgctgagcctgtacgccagcggtcgcactactggcatcgtcttagattcgggtgatggagtgactcacaatgtccccatttatgaaggctacgctttgccgcacgcgattatgcggctggacctggctggccgcgatcttaccgactatctgatgaagattctgaccgagcgcggatattcttttgttaccaccgcagagcgagaaatagtgcgagatatcaaagagaagctgtgttatgtcgcactggatttcgagaacgagatggccacggccgcatcttcgtcgagcctggaaaaaagctacgagctgcccgacggccaagtgataactatcgggaacgaacggttccgttgcccagagactctcttccaaccgtcatttataggaatggaatctgccggcattcatgagaccacctacaacagtataatgaagtgcgacatagatataaggaaggatttgtacgccaacaacgtactgagcggagggaccactatgtaccctggaatcgccgatcgaatgcagaaggagatcactgccctcgcccctagtaccatgaagattaaaattatcgcccctcctgagcggaaatattctgtgtggataggtggatcgatcctggccagtttgtccacctttcaacagatgtggatttccaagcaggagtacgacgaagccggaccatctatcgttcatcggaagtgcttctag

SEQ ID NO: 336020 - DNA, 999 bp, Artificial Sequence
  derived and/or modified sequence
atggtgggcatgggccagaaggacagctacgtgggcgacgaggcccagagcaaacggggtattctgaccctgaaataccctatagagcacggcattattacgaattgggacgatatggaaaagatatggcatcatagcttctacaacgagctcagggtcgcccctgaggaacatcccaccctcctaacagaagcgccactgaacccgaaggctaatcgcgaaaagatgacacagataatgttcgagaccttcaacgtacccgctatgtatgtggcgatccaggcagtgttgtctttatatgcgtcaggccgtaccaccgggatcgtcctcgacagcggggacggcgtgacacacaacgttccaatctacgagggatatgcactgcctcacgctataatgcggctggatctcgccggtcgcgacttaacagattacctcatgaagatcctgaccgaacggggctactccttcgtgacaaccgctgagagggaaatcgtaagggacattaaggagaagctgtgttacgtcgccctggatttcgaaaatgaaatggccaccgctgcttcaagctcctccttggagaagagctatgaactgcccgatggccaggtgataactataggaaatgaacgatttagatgtcccgaaacactgttccagccttctttcattggaatggaatctgccggaattcacgagacgacatataattccataatgaagtgcgacattgacattcggaaagacctgtatgctaacaacgtcctttctggaggcaccacaatgtaccccggaatcgccgatcggatgcaaaaagaaattactgctctggccccatcaaccatgaaaatcaagattattgccccacccgagcgcaaatacagcgtttggattggcggctcaatccttgccagcttgtctaccttccagcagatgtggatttcaaaacaggagtatgatgaggctgggcccagtattgttcaccggaagtgcttctag

SEQ ID NO: 336021 - DNA, 456 bp, Artificial Sequence
  derived and/or modified sequence
atgtgcgaggaagaggacagtacagccttggtctgtgacaatggttcaggcctatgcaaagcgggtttcgccggagacgacgctcccagagccgtatttccgtctattgtgggaagaccaaggcatcaaggagtgatggtgggtatgggccagaaagactcctacgtcggtgatgaggcccaatccaagagaggaatcctcacacttaagtaccctatcgaacacggaattattaccaactgggacgacatggaaaagatctggcaccattcgttctacaacgagcttcgtgtggcccctgaggagcacccgacactgctcaccgaagctcctctgaatccaaaagctaatagggaaaagatgactcagataatgtttgaaacatttaacgtcccagcaatgtatgtggcaattcaggcggttctcagcctgtatgcatccggcaggaccacctag

SEQ ID NO: 336022 - DNA, 456 bp, Artificial Sequence
  derived and/or modified sequence
atgtgcgaggaggaggacagtactgcactggtttgcgacaacgggagcggcttgtgtaaagccggttttgcaggagatgatgcccctcgagccgtgttcccttcaattgtcggcagacccaggcaccagggggttatggtagggatgggtcaaaaggacagctacgtgggggatgaggcccagagcaagcgcggtattctcaccctgaagtatcccatagaacatgggataattaccaattgggacgacatggagaagatttggcaccacagcttttacaacgagttacgcgtggcccctgaagaacatccaacgctactgacagaagctcccctcaatccaaaggccaatcgcgagaaaatgacccagatcatgttcgagacgtttaatgtccccgcaatgtacgttgcgatccaggccgtactttctctctacgcgagcggcagaactacctag

SEQ ID NO: 336023 - DNA, 1134 bp, Artificial Sequence
  derived and/or modified sequence
atgtgtgaggaggaggacagcacagcactggtgtgtgataatggtagcggactatgtaaagccggttttgccggagatgacgcgcctagagctgtgttcccttcgattgtcggacgcccacggcatcagggcgtcatggtgggcatgggccagaaggattcctatgtgggcgacgaagctcagtccaagcgcggtatcctgaccctgaagtatcccatcgaacacggcatcattaccaattgggacgatatggaaaagatatggcaccactctttttacaatgagcttcgggtagctcccgaagaacatcctacattgctgacagaggcccctctcaatcctaaggcaaatagagagaagatgacgcaaatcatgttcgaaactttcaacgtgccagccatgtatgtcgccatccaggcggtgctgtccctgtatgcctctggtcgtacaaccggtatcgtactggatagcggtgatggagtcacccataacgtgcccatctacgaggggtacgccctgccacatgccattatgcgactggaccttgcgggacgagacctgaccgattacttgatgaagatcctgaccgagagaggatacagttttgtgacaacagccgagcgagaaatagtcagggatatcaaagaaaaactgtgttacgtggctctggattttgaaaacgagatggcgacagccgcatcgtcatcaagtctggagaaaagctacgagctacctgacggtcaggtcatcaccattggcaatgaaaggtttcggtgcccggagacactttttcagcctagtttcattgggatggagagtgcaggaattcacgaaactacttacaattctatcatgaagtgcgacatcgacatccggaaagacctgtacgcgaataatgtattatccggcggaactaccatgtatcccggaattgctgatcggatgcagaaggagatcacagctctggcgccaagtacaatgaagattaagatcattgctcctccagagaggaagtactctgtgtggatagggggaagtatactagcctctctgtcaaccttccaacagatgtggattagtaaacaggagtatgacgaagctggcccatccatcgttcataggaaatgtttttag

SEQ ID NO: 336024 - DNA, 999 bp, Artificial Sequence
  derived and/or modified sequence
atggtcggaatgggacagaaggatagctatgtgggggacgaggcccaatcgaagaggggcattctgacactgaaatatccgattgaacacggaatcattacaaactgggacgacatggagaagatctggcatcactcgttttataatgagctcagagttgctccagaggagcacccaaccctgttgactgaagcaccactcaatccgaaagcaaacagggaaaaaatgactcagatcatgtttgaaaccttcaatgtaccagctatgtacgtagcgatccaagccgtcctgagtttgtacgctagtggacgcacaaccggtattgtgttagactcgggcgacggtgttacccataacgtgccaatttacgagggttacgccctgcctcacgcaattatgaggctcgatttggccggacgagatctgactgactacttgatgaagattcttactgagcgcggatatagctttgtcactacggcagaacgggagattgtgagagacataaaggaaaagttgtgctacgtggcccttgactttgagaacgaaatggcaaccgcggcatcttctagcagcctggagaaaagctatgaattaccggacggacaggtgattacgatcggcaacgaaaggtttcgatgcccagaaaccctgttccaaccctccttcatcggtatggagtccgcaggcatccacgagaccacctataattcaatcatgaagtgtgatatcgacatcaggaaagacctgtatgcaaataacgtgttgagcgggggtactaccatgtatccaggcatagcagaccggatgcagaaggagatcacagctctagctccctctacaatgaagattaaaattatcgctccaccagaacgcaaatattccgtgtggatcgggggatccatactagccagtctaagtacattccagcaaatgtggatcagcaaacaggaatatgacgaagccggtccatctatagtgcacaggaagtgtttctag

SEQ ID NO: 336025 - DNA, 1753 bp, Artificial Sequence
  derived and/or modified sequence
aaagttgctatgtcattttgcatttccaccagcaatatatgatagttcgtttatttcacatctttgacagcatttagtgttgtcagggttttttttgtttgttttagacattttagtagtctggctcttgctgattgaattcctttggtgcagtttagcatgttcctctgtgttctgcatctcctgtagtgtaatgttcaagctcagaaatgccttatgtggatcgtcagaatcgcatttgtggttttctagacattgaagaaaatgaaaacagtgggaaatttcttcgaaggtacttcatactggataccagagaagatagtttcgtgtggtacatggataatccacagaacctaccttctggatcatcacgtgttggagccattaagcttacctacatttcaaaggttagcgatgctactaagctaaggccaaaggcggagttctgttttgttatgaatgcaggaatgaggaagtacttcctacaagccaatgatcagcaggacctagtggaatgggtaaatgtgttaaacaaagctataaaaattacagtaccaaagcagtcagactcacagcctaattctgataacctaagtcgccatggtgaatgtgggaaaaagcaagtgtcttacagaactgatattgttggtggcgtacccatcattactcccactcagaaagaagaagtaaatgaatgtggtgaaagtattgacagaaataatctgaaacggtcacaaagccatcttccttactttactcctaaaccacctcaagatagtgcggttatcaaagctggatattgtgtaaaacaaggagcagtgatgaaaaactggaagagaagatattttcaattggatgaaaacacaataggctacttcaaatctgaactggaaaaggaacctcttcgtgtaataccacttaaagaggttcataaagtccaggaatgtaagcaaagcgacataatgatgagggacaacctctttgaaattgtaacaacgtctcgaactttctatgtgcaggctgatagccctgaagagatgcacagttggattaaagcagtctctggcgccattgtagcacagcggggtcccggcagatctgcgtcttctatgcggcaggccagaaggctgtcgaacccttgtatacagaggtatacatcaagagctggtgaatgcagcacgtatgtgggctctcacgcaaacgtgccttcttagtggagggcccagacttactacttacaactgatcatagaaagagcatccccccggtccttcagaatccaaacacgctttccgtcctaccaacgcagccaccgccacctcacattccacagcctctcgcagcaactctttggtctcaacctttaccatggagaagcgaggattttacgagtctcttgccaaggtcaagccagggaacttcaaggtccagactgtctctccaagagaaccagcttccaaagtgactgaacaagctctgttaagacctcaaagtaaaaatggccctcaggaaaaagattgtgacctagtagacttggacgatgcgagccttccggtcagtgacgtgtgaggcagaagcgcacggagcctgcctgcctctgccgtcctcagtttcctttcatgaggcttctagccaaagatgataaagggggaaatggtttttagtgcgtatattatactgcctcttaggtgtactctttataagctggtaaaccaagaatctagggagtggccaaactaaatataatttcttt

SEQ ID NO: 336026 - protein, 455 aa, Artificial Sequence
  derived and/or modified sequence
MRASLGVCGTASSMVIVYVEDINDEAPVFTQQQYSRLGLRETAGIGTSVIVVQATDRDSGDGGLVNYRILSGAEGKFEIDESTGLIITVNYLDYETKTSYMMNVSATDQAPPFNQGFCSVYITLLNELDEAVQFSNASYEAAILENLALGTEIVRVQAYSIDNLNQITYRFNAYTSTQAKALFKIDAITGVITVQGLVDREKGDFYTLTVVADDGGPKVDSTVVYITVLDENDNSPRFDFTSDSAVSIPEDCPVGQRVATVKAWDPDAGSNGQVVFSLASGNIAGAFEIVTTNDSIGEVFVARPLDREELDHYILQVVASDRGTPPRKKDHILQVTILDINDNPPVIESPFGYNVSVNENVGGGTAVVQVRATDRDIGINSVLSYYITEGNKDMAFRMDRISGEIATRPAPPDRERQSFYHLVATVEDEGTPTLSVSDGGGHREERVGQGSSASE

SEQ ID NO: 336027 - DNA, 4029 bp, Artificial Sequence
  derived and/or modified sequence
gcggcggcggcggctcgggagagagggacgcgggctgcaggcgcgatgcttggctagaggacgcgtccgacggcggccggacgctgaggtggtcggggctagtcagcccggcctgggcatggagcgcggggtggcagagcctctggacgtttggggcgcgcccagtccgagcccccggcgcgcctgaagttgcgagcggcgagcggcgagcggcgagcggcccgcggagacccaggagctgccggcacgccgcggatgagccttcgcgccggcgggaagacgcggcggtggccagggccagagcaggcggcccgcgggggccgatccggcggagagcagagcccgaggcgaggcgaggcgcggcgccgctgcacacacgcacacggagccatggggcgccatgttgccaccagctgccacgtggcctggcttttggtgctgatctctggatgctggggccaggtgaaccggctgcccttcttcaccaaccacttctttgatacatacctgctgatcagcgaggacacgcctgtgggttcttctgtgacccagttgctggcccaagacatggacaatgaccccctggtgtttggcgtgtctggggaggaggcctctcgcttctttgcagtggagcctgacactggcgtggtgtggctccggcagccactggacagagagaccaagtcagagttcaccgtggagttctctgtcagcgaccaccagggggtgatcacacggaaggtgaacatccaggttggggatgtgaatgacaacgcgcccacatttcacaatcagccctacagcgtccgcatccctgagaatacaccagtggggacgcccatcttcatcgtgaatgccacagaccccgacttgggggcagggggcagcgtcctctactccttccagcccccctcccaattcttcgccattgacagcgcccgcggtatcgtcacagtgatccgggagctggactacgagaccacacaggcctaccagctcacggtcaacgccacagatcaagacaagaccaggcctctgtccaccctggccaacttggccatcatcatcacagatgtccaggacatggaccccatcttcatcaacctgccttacagcaccaacatctacgagcattctcctccgggcacgacggtgcgcatcatcaccgccatagaccaggataaaggacgtccccggggcattggctacaccatcgtttcagggaataccaacagcatctttgccctggactacatcagcggagtgctgaccttgaatggcctgctggaccgggagaaccccctgtacagccatggcttcatcctgactgtgaagggcacggagctgaacgatgaccgcaccccatctgacgctacagtcaccacgaccttcaatatcctggttattgacatcaatgacaatgccccggagttcaacagctccgagtacagcgtggccatcactgagctggcacaggtcggctttgcccttccactcttcatccaggtggtggacaaggatgagacccagggcctgaacagcatgtttgaggtgtacttggtggggaacaactcccaccacttcatcatctccccgacctccgtccaggggaaggcggacattcgtattcgggtggccatcccactggactacgagaccgtggaccgctacgactttgatctctttgccaatgagagtgtgcctgaccatgtgggctatgccaaggtgaagatcactctcatcaatgaaaatgacaaccggcccatcttcagccagccactgtacaacatcagcctgtacgagaacgtcaccgtggggacctctgtgctgacagtcctggcaactgacaatgatgcaggcacctttggggaagtcagctacttcttcagtgatgaccctgacaggttctcgctggacaaggacacgggactcatcatgctgattgccaggctggactatgagctcatccagcgcttcaccctgacgatcattgcccgggacgggggcggcgaggagaccacaggccgggtcaggatcaatgtgttggatgtcaacgacaacgtgcccaccttccagaaggatgcctacgtgggtgctctgcgggagaacgagccttctgtcacacagctggtgcggctccgggcaacagatgaagactcccctcccaacaaccagatcacctacagcattgtcagtgcatctgcctttggcagctacttcgacatcagcctgtacgagggctatggagtgatcagcgtcagtcgccccctggattatgaacagatatccaatgggctgatttatctgacggtcatggccatggatgctggcaacccccctctcaacagcaccgtccctgtcaccatcgaggtgtttgatgagaatgacaaccctcccaccttcagcaagcccgcctacttcgtctccgtggtggagaacatcatggcaggagccacggtgctgttcctgaatgccacagacctggaccgctcccgggagtacggccaggagtccatcatctactccttggaaggctccacccagtttcggatcaatgcccgctcaggggaaatcaccaccacgtctctgcttgaccgagagaccaagtctgaatacatcctcatcgttcgcgcagtggacgggggtgtgggccacaaccagaaaactggcatcgccaccgtaaacatcaccctcctggacatcaatgacaaccaccccacgtggaaggacgcaccctactacatcaacctggtggagatgacccctccagactctgatgtgaccacggtggtggctgttgacccagacctgggggagaatggcaccctggtgtacagcatccagccacccaacaagttctacagcctcaacagcaccacgggcaagatccgcaccacccacgccatgctggaccgggagaaccccgacccccatgaggccgagctgatgcgcaaaatcgtcgtctctgttactgactgtggcaggccccctctgaaagccaccagcagtgccacagtgtttgtgaacctcttggatctcaatgacaatgaccccacctttcagaacctgccttttgtggccgaggtgcttgaaggcatcccggcgggggtctccatctaccaagtggtggccatcgacctcgatgagggcctgaacggcctggtgtcctaccgcatgccggtgggcatgccccgcatggacttcctcatcaacagcagcagcggcgtggtggtcaccaccaccgagctggaccgcgagcgcatcgcggagtaccagctgcgggtggtggccagtgatgcaggcacgcccaccaagagctccaccagcacgctcaccatccatgtgctggatgtgaacgacgagacgcccaccttcttcccggccgtgtacaatgtgtctgtgtccgaggacgtgccacgcgagttccgggtggtctggctgaactgcacggacaacgacgtgggcctcaatgcagagctcagctacttcatcacaggtggcaacgtggatgggaagttcagcgtgggttaccgcgatgccgttgtgagaaccgtggtgggcctggaccgggagaccacagccgcctacatgctcatcctggaggccatcgacaacggccctgtagggaagcgacacacgggcacagccaccgtgttcgtcactgtcctggatgtgaatgacaaccggcccatctttctgcagagcagctatgaggccagcgtccctgaggacatccctgaaggccacagcatcttgcaggaggaagacttggcctccccctgcatatctcccgccccacccagaagggcctttcagagtagcggggagaaagagacgtcacaatttcccggaaaggagttgagaagagagccagggcccagcaaggcccagaacagagctgctttcacagagcccttggccgaggctcccctcttgggaagtaaacaggcacaagaagaaagggctcctttgcccagggagcaggcgcaacagctccaaggctcagagggagagaagggaggaccctga

SEQ ID NO: 336028 - protein, 3319 aa, Artificial Sequence
  derived and/or modified sequence
MGRHVATSCHVAWLLVLISGCWGQVNRLPFFTNHFFDTYLLISEDTPVGSSVTQLLAQDMDNDPLVFGVSGEEASRFFAVEPDTGVVWLRQPLDRETKSEFTVEFSVSDHQGVITRKVNIQVGDVNDNAPTFHNQPYSVRIPENTPVGTPIFIVNATDPDLGAGGSVLYSFQPPSQFFAIDSARGIVTVIRELDYETTQAYQLTVNATDQDKTRPLSTLANLAIIITDVQDMDPIFINLPYSTNIYEHSPPGTTVRIITAIDQDKGRPRGIGYTIVSGNTNSIFALDYISGVLTLNGLLDRENPLYSHGFILTVKGTELNDDRTPSDATVTTTFNILVIDINDNAPEFNSSEYSVAITELAQVGFALPLFIQVVDKDETQGLNSMFEVYLVGNNSHHFIISPTSVQGKADIRIRVAIPLDYETVDRYDFDLFANESVPDHVGYAKVKITLINENDNRPIFSQPLYNISLYENVTVGTSVLTVLATDNDAGTFGEVSYFFSDDPDRFSLDKDTGLIMLIARLDYELIQRFTLTIIARDGGGEETTGRVRINVLDVNDNVPTFQKDAYVGALRENEPSVTQLVRLRATDEDSPPNNQITYSIVSASAFGSYFDISLYEGYGVISVSRPLDYEQISNGLIYLTVMAMDAGNPPLNSTVPVTIEVFDENDNPPTFSKPAYFVSVVENIMAGATVLFLNATDLDRSREYGQESIIYSLEGSTQFRINARSGEITTTSLLDRETKSEYILIVRAVDGGVGHNQKTGIATVNITLLDINDNHPTWKDAPYYINLVEMTPPDSDVTTVVAVDPDLGENGTLVYSIQPPNKFYSLNSTTGKIRTTHAMLDRENPDPHEAELMRKIVVSVTDCGRPPLKATSSATVFVNLLDLNDNDPTFQNLPFVAEVLEGIPAGVSIYQVVAIDLDEGLNGLVSYRMPVGMPRMDFLINSSSGVVVTTTELDRERIAEYQLRVVASDAGTPTKSSTSTLTIHVLDVNDETPTFFPAVYNVSVSEDVPREFRVVWLNCTDNDVGLNAELSYFITGGNVDGKFSVGYRDAVVRTVVGLDRETTAAYMLILEAIDNGPVGKRHTGTATVFVTVLDVNDNRPIFLQSSYEASVPEDIPEGHSILQLKATDADEGEFGRVWYRILHGNHGNNFRIHVSNGLLMRGPRPLDRERNSSHVLIVEAYNHDLGPMRSSVRVIVYVEDINDEAPVFTQQQYSRLGLRETAGIGTSVIVVQATDRDSGDGGLVNYRILSGAEGKFEIDESTGLIITVNYLDYETKTSYMMNVSATDQAPPFNQGFCSVYITLLNELDEAVQFSNASYEAAILENLALGTEIVRVQAYSIDNLNQITYRFNAYTSTQAKALFKIDAITGVITVQGLVDREKGDFYTLTVVADDGGPKVDSTVQVYITVLDENDNSPRFDFTSDSAVSIPEDCPVGQRVATVKAWDPDAGSNGQVVFSLASGNIAGAFEIVTTNDSIGEVFVARPLDREELDHYILQVVASDRGTPPRKKDHILQVTILDINDNPPVIESPFGYNVSVNENVGGGTAVVQVRATDRDIGINSVLSYYITEGNKDMAFRMDRISGEIATRPAPPDRERQSFYHLVATVEDEGTPTLSATTHVYVTIVDENDNAPMFQQPHYEVLLDEGPDTLNTSLITIQALDLDEGPNGTVTYAIVAGNIVNTFRIDRHMGVITAAKELDYEISHGRYTLIVTATDQCPILSHRLTSTTTVLVNVNDINDNVPTFPRDYEGPFEVTEGQPGPRVWTFLAHDRDSGPNGQVEYSIMDGDPLGEFVISPVEGVLRVRKDVELDRETIAFYNLTICARDRGMPPLSSTMLVGIRVLDINDNDPVLLNLPMNITISENSPVSSFVAHVLASDADSGCNARLTFNITAGNRERAFFINATTGIVTVNRPLDRERIPEYKLTISVKDNPENPRIARRDYDLLLIFLSDENDNHPLFTKSTYQAEVMENSPAGTPLTVLNGPILALDADQDIYAVVTYQLLGAQSGLFDINSSTGVVTVRSGVIIDREAFSPPILELLLLAEDIGLLNSTAHLLITILDDNDNRPTFSPATLTVHLLENCPPGFSVLQVTATDEDSGLNGELVYRIEAGAQDRFLIHLVTGVIRVGNATIDREEQESYRLTVVATDRGTVPLSGTAIVTILIDDINDSRPEFLNPIQTVSVLESAEPGTVIANITAIDHDLNPKLEYHIVGIVAKDDTDRLVPNQEDAFAVNINTGSVMVKSPMNRELVATYEVTLSVIDNASDLPERSVSVPNAKLTVNVLDVNDNTPQFKPFGITYYMERILEGATPGTTLIAVAAVDPDKGLNGLVTYTLLDLVPPGYVQLEDSSAGKVIANRTVDYEEVHWLNFTVRASDNGSPPRAAEIPVYLEIVDINDNNPIFDQPSYQEAVFEDVPVGTIILTVTATDADSGNFALIEYSLGDGESKFAINPTTGDIYVLSSLDREKKDHYILTALAKDNPGDVASNRRENSVQVVIQVLDVNDCRPQFSKPQFSTSVYENEPAGTSVITMMATDQDEGPNGELTYSLEGPGVEAFHVDMDSGLVTTQRPLQSYEKFSLTVVATDGGEPPLWGTTMLLVEVIDVNDNRPVFVRPPNGTILHIREEIPLRSNVYEVYATDKDEGLNGAVRYSFLKTAGNRDWEFFIIDPISGLIQTAQRLDRESQAVYSLILVASDLGQPVPYETMQPLQVALEDIDDNEPLFVRPPKGSPQYQLLTVPEHSPRGTLVGNVTGAVDADEGPNAIVYYFIAAGNEEKNFHLQPDGCLLVLRDLDREREAIFSFIVKASSNRSWTPPRGPSPTLDLVADLTLQEVRVVLEDINDQPPRFTKAEYTAGVATDAKVGSELIQVLALDADIGNNSLVFYSILAIHYFRALANDSEDVGQVFTMGSMDGILRTFDLFMAYSPGYFVVDIVARDLAGHNDTAIIGIYILRDDQRVKIVINEIPDRVRGFEEEFIHLLSNITGAIVNTDNVQFHVDKKGRVNFAQTELLIHVVNRDTNRILDVDRVIQMIDENKEQLRNLFRNYNVLDVQPAISVRLPDDMSALQMAIIVLAILLFLAAMLFVLMNWYYRTVHKRKLKAIVAGSAGNRGFIDIMDMPNTNKYSFDGANPVWLDPFCRNLELAAQAEHEDDLPENLSEIADLWNSPTRTHGTFGREPAAVKPDDDRYLRAAIQEYDNIAKLGQIIREGPIKLIQTELDEEPGDHSPGQGSLRFRHKPPVELKGPDGIHVVHGSTGTLLATDLNSLPEEDQKGLGRSLETLTAAEATAFERNARTESAKSTPLHKLRDVIMETPLEITEL

SEQ ID NO: 336029 - DNA, 9960 bp, Artificial Sequence
  derived and/or modified sequence
atgggccgccatgtggccacaagttgccacgtggcctggctccttgtgttgataagcgggtgctggggacaagtcaacaggctgccctttttcactaaccactttttcgatacttatctgcttatcagtgaggatactccagtaggttcttctgtgacacagctcctcgcccaggacatggacaacgacccgctggtcttcggagtttcaggcgaggaagcatcaaggttctttgcggtcgaacccgacaccggcgtggtatggctccgccagcctctagatagagaaacaaagtccgagtttacagtggagttcagcgtcagcgatcaccagggggtgattactcggaaggtaaatattcaggttggtgacgtgaacgacaatgcacctacattccacaatcaaccttattctgtgagaatacccgagaatactccggtgggcactcccatttttatcgtcaacgccaccgacccagatcttggagccggaggatccgtgctctacagctttcagccccctagtcagtttttcgccatcgattccgctcgcggtatcgtgaccgtaattcgcgaactcgactacgaaaccacacaggcctatcagctcaccgtcaacgctaccgatcaggacaaaacccggccactgtctacgctggctaacctggcaatcatcattactgatgtgcaggatatggaccccattttcatcaaccttccgtattcgactaacatatacgagcacagcccacccggaactactgtgagaatcatcaccgcaatagaccaggacaagggcagaccccgtggcatcggttataccatagtgtccggtaatacgaattctatctttgcgctggactatatttcgggggtgctcacccttaacggcttgctggaccgtgagaatccactatatagccatggtttcattttaactgttaaggggaccgaacttaatgacgatagaactccctctgatgcaaccgtaaccaccaccttcaatattctagtcatcgacattaacgataatgctcccgaatttaacagttccgaatacagtgtggctattacagaactggcccaggttggattcgccctccccctattcatccaggtcgttgataaggatgagacacagggcctgaactctatgtttgaggtgtacctcgtcggcaataatagtcaccattttatcatttcaccgacctctgtccagggaaaggcagacatcagaataagggtggccattcccttagattacgagacagtggaccgatatgactttgatcttttcgcaaatgagagtgtcccagatcacgtcggttatgcgaaggtgaagataactctgattaacgagaacgataaccgccctattttctctcagcccttgtataacatatcgctgtacgagaatgtaaccgtgggcacctctgttttgaccgtccttgcaacagacaacgatgcgggaacgtttggagaggtctcatatttttttagcgatgatcctgaccgctttagcctcgataaggacacggggctcatcatgctgattgccagactggactacgagctaatccagcgattcactttaacgatcattgctagggatggggggggggaggagactactggacgtgtacggattaacgttctagatgtgaacgataatgtgccaaccttccagaaagacgcatatgtgggagccctacgcgaaaacgagccttcggttacacagctggtgcggctcagagccacagacgaggatagcccccccaacaaccagatcacctatagcattgtgagcgcgagtgcatttggttcttacttcgacatcagtctgtatgaaggctatggagtgattagtgtgagtagaccactcgattatgagcaaatctctaacgggctcatatacctgacagtgatggctatggacgccggcaacccgccgctcaacagcaccgttccggtaactattgaagtcttcgatgaaaacgacaaccccccaactttcagcaaaccagcgtactttgtatctgtggtcgaaaacattatggcaggagccaccgtactctttctcaatgccactgacctggacaggagtcgcgaatacggacaagagagtatcatctactccctggagggcagcacacagtttcgaatcaacgcccggagtggcgagatcacaacaacctcactgcttgatagggaaaccaagtcagagtatatcttaattgtccgtgccgtcgacggtggagtgggacacaatcagaagactggaatagcaaccgtcaacatcacgcttctagacataaacgataatcaccccacatggaaggacgctccctactacattaatctagtcgagatgactcccccagattccgatgtcacaacggtcgttgccgtagacccggacctgggggagaacgggactctggtttactctattcagccccctaacaaattctactcacttaatagtaccactggaaaaatccgaacgacccacgcaatgctggatcgagaaaacccagacccacatgaggcagaattgatgcgcaagatcgtggttagtgtgaccgattgtggcagaccacccttaaaagccaccagctctgctacagtttttgtgaacctgctggatctgaacgataacgatccgactttccagaatttgccattcgtggctgaagtccttgagggcattcccgcaggagtgtcgatataccaggtggtagccatagatctggacgagggactcaatggcctcgtatcttaccggatgcccgtggggatgccaagaatggacttcctcattaactcctcttccggagtggtcgtgaccaccaccgagttagatcgcgagagaattgcggaataccagctcagagttgtggcatccgatgccgggacaccaactaagtccagcactagcacactcactatacatgtgctggatgtgaatgatgaaactcccacattctttcccgccgtgtacaacgttagcgtgagcgaagacgttccgagagaatttcgtgtcgtatggttgaattgcactgacaacgacgtgggcctgaacgcagaattaagttattttatcaccggaggtaatgtggacggaaagttcagcgtgggataccgcgacgccgtggtgcggacagttgtgggactcgatagggagacaacagcagcctacatgctgatattggaggcgatagacaacggacccgtcggcaagaggcatacgggcaccgccactgtgtttgtgacagtgctcgatgtcaacgacaacaggcccatattcctccaatctagctatgaggcttctgtacccgaagatatccctgaggggcatagcatcctgcagctcaaggcaaccgacgccgatgaaggagaattcgggcgcgtttggtacaggattctgcatggcaatcacggcaacaatttccgcattcacgtttcaaacgggctgctaatgcgtggaccccgtcctctcgaccgcgagcgcaactcatctcatgttctcatagtggaagcatacaaccacgatctgggcccaatgcgctccagtgtccgggttattgtgtacgttgaagacatcaatgacgaagcccctgtgttcacacagcagcaatatagtaggttaggcttgcgggaaacagccggtattggcacatccgttattgtcgtgcaggcgacggatcgagattccggcgatgggggccttgtgaactaccgtattctgtccggcgcagaaggcaaattcgagattgacgagagtactgggctgattataactgtcaactacttagactacgagacaaaaacgagttatatgatgaatgtttctgccaccgaccaggccccccccttcaaccaaggtttctgttccgtctatattacacttctcaacgagctggacgaggccgtccaattcagtaatgccagctatgaagccgctatccttgagaacctagcattgggaacagagattgtgagagtgcaggcgtacagtatcgataacctgaatcagattacatatagattcaatgcctatacctccactcaagctaaggcccttttcaaaattgacgctattacaggcgtgatcacagtccagggcctcgtggaccgcgaaaaaggggacttttacacactgaccgtagtcgcggacgacggaggccccaaggtggactcaaccgtgcaggtgtacataactgttttggatgagaacgataacagtccacgctttgatttcacttccgacagtgctgtgagcatcccggaagattgtcccgtcggccagagggtggccactgttaaggcctgggatccggatgccggtagcaacgggcaggtggtcttcagcctggccagcggcaatatcgccggcgcatttgagatcgtcaccactaatgactctatcggagaggtatttgtggcccgccctttagacagagaagagctggaccactatatcctccaggtggtggcctccgaccggggtacaccaccaaggaaaaaagaccatattttgcaggtcactatcctggacatcaatgataatccacctgtaatcgagagcccattcggctataatgtcagcgttaatgaaaatgttgggggaggtacagcagttgtacaagtccgggcgaccgacagggacattggcataaactcagtcctctcctactacattacggaaggcaacaaggatatggcctttagaatggatagaatttctggcgagatagccactcggcctgcacccccggaccgtgagaggcaatcattttaccatctcgttgctacagtggaggatgagggtactcccaccctctccgccactactcacgtttacgtgacaatcgtcgatgaaaacgataacgcacccatgttccaacaacctcactatgaagtgctgctggacgagggtccggacacgctgaacacatccttgattactatacaagcgctggaccttgacgaaggtccgaacggaacagtcacttacgctattgtagccggtaacatcgtcaacacctttagaattgaccgtcatatgggtgtgattactgcggccaaagagctcgactacgagatcagtcacggtcgctatacactcatcgtgactgccaccgaccagtgcccaattctgtcacacagactaacttcaacaaccacggtcctggtcaatgtgaacgacataaacgacaatgtgccaacatttccacgggattatgaggggcccttcgaagttactgaaggccagcccgggccaagagtatggacattcctggcccacgatcgcgactcaggacctaacggccaagtggagtactcgatcatggatggcgaccctctcggcgagtttgttatcagccccgtcgagggggtgcttcgtgttcgcaaagatgtggaattggacagagagacgatcgctttttataacttgacgatctgcgccagagatcgaggtatgcccccgctgtcatcgacaatgttagtcggaatcagagtgcttgatatcaacgacaatgaccctgtgctcctgaacttacccatgaacatcacaattagcgagaattcaccagtgagcagcttcgtcgcgcacgtgttagcctctgatgctgatagtgggtgtaacgcacggctgacatttaacatcactgccgggaatagggaacgcgccttctttattaatgccacgacaggaattgtgactgtgaatcggccactggaccgagagagaattccagaatataagttgactatctccgtaaaagacaatcctgagaatccaagaatagctcggagagactacgatttgttactcattttcttgagtgacgagaacgataaccatcctttgttcaccaaatctacatatcaggctgaggtgatggaaaacagtcccgccggtaccccgctgaccgtcttgaatgggccaatactggccctggacgccgaccaggacatttatgccgtggtcacgtaccagctgctgggtgcacagtctggtctcttcgacataaatagctctacgggtgtggtcaccgtacgaagcggagtgataatcgacagagaggcctttagcccccccattctggagctgcttctgttggcagaagatatcggactgctcaactcaactgcccatctgttaattaccatcttagacgacaacgacaataggcccaccttctctccagcaacgctcactgtgcaccttctggaaaactgtccacctgggtttagcgtgcttcaagtgaccgccacggatgaagacagcggcctgaacggtgagttggtatatcggatagaggccggagcccaggacaggtttctcatacatctggttacgggcgttattcgggtcggcaatgcgactatcgatcgggaggagcaggagtcttatagactcactgttgtcgcaacagataggggaacagtaccgctatcaggcactgccatcgtgaccattcttatcgacgatattaacgactccaggccagagttcttaaacccaatacaaacagtgagcgttctcgagtccgccgaacctggcaccgtcattgctaacatcactgcaattgatcatgacctcaatcctaaacttgagtaccatatcgtaggcatcgttgcgaaggacgacactgacagattggtaccaaaccaagaggatgcattcgctgtgaacatcaacactggatctgtaatggttaagtcacctatgaaccgtgagttggttgcgacctatgaagtgacactttcagttatcgacaacgccagcgacctgcctgaaagatccgtttctgtcccaaatgctaagcttaccgtgaacgtcctagacgttaacgataataccccccaattcaagccttttggaataacatactacatggagcgtatcctggagggagccacgccgggaaccactctcattgccgtcgcagcagtcgacccagacaagggacttaatggactagttacctacacactattggacctagttccgccgggctatgtgcagttggaggactcttccgccggcaaagtgatcgctaaccggacagtcgactacgaggaagtgcactggttaaacttcacggttcgcgcttcagataatgggagcccccctcgggcggccgagatcccagtctaccttgagatcgtggatatcaatgacaacaaccctatcttcgaccagccatcataccaggaggcagtctttgaagacgtccccgtgggcacaatcatactgactgtgaccgcaacagatgcagattcaggcaacttcgcactgattgagtattcacttggggacggcgagagcaaattcgcaataaatcccacaaccggcgacatctacgtgctcagctctctagaccgcgagaagaaggatcactacattctcacagcgttagcgaaggacaacccgggtgatgtcgcaagtaataggcgagaaaactccgtccaggttgtgatacaggtgcttgacgtgaatgactgccggcctcagttttctaagcctcaattcagtacgagcgtatatgagaatgagccagcaggaacatctgtcattacaatgatggccactgatcaggatgaggggcccaatggtgaactgacatactcgctggagggcccaggcgttgaggctttccatgtcgacatggacagcggtcttgttaccacgcagcgcccattacagagctatgaaaaattcagtttgactgtggtcgcaaccgacgggggagaaccacctctgtgggggaccacgatgctgctagtggaagtcattgacgttaacgacaatcggcctgtattcgtcagacctccgaatggaaccatccttcacatcagggaagagattccactgagatctaatgtgtatgaggtgtacgcgacagacaaggacgagggtttaaacggggctgtaaggtactcattcctgaagacggctggcaatagggactgggaattctttatcattgaccccatcagcggcctcatccagacagcccagagattggaccgtgaatcccaagcagtgtattctcttattcttgtggcctcagacctggggcagccagtaccttacgagaccatgcagcctctccaggtcgccctggaagacatcgacgataatgagcctctcttcgtccgcccgcccaaaggatcaccgcagtaccagctccttaccgtgcctgagcactccccacgcggcacgctggtggggaatgtcaccggggctgtggatgctgatgaaggtccaaacgcaattgtgtactattttattgcggcaggaaacgaggagaagaactttcacctccagcccgatggatgtcttctggttctgagggacctggaccgagagcgggaggcaatattcagttttatcgtgaaggcttcaagtaacaggagttggacaccacctagaggtcctagccccacccttgacctcgttgccgatctaacactgcaagaagtcagggtggtgcttgaagacattaacgatcagccccccaggttcacaaaggccgaatacacggccggcgtggcaaccgatgctaaagtcggatctgaactgatacaagtgctcgcgctggacgccgatattgggaacaacagcctggtcttctattcgatcctggccatacactacttcagagccctggcaaatgacagcgaggacgtcggacaggttttcactatgggctctatggatggtattctgagaacattcgacctgttcatggcttactcaccggggtacttcgtcgtggatatagtggctcgggacttagccggacataatgatactgcaattatcggtatttacatcctgagggatgatcagcgggtgaagatcgttatcaatgaaatccctgacagagttcgaggattcgaggaagaatttatccatttacttagtaatataacaggggccattgtgaacaccgacaatgtgcagtttcacgttgacaaaaaggggcgcgtcaattttgcccagacggagctgctaatccacgttgtgaatcgcgatacgaacaggattttggatgtggaccgagttatccagatgatcgatgaaaataaggagcagctccggaatctgttcagaaattataacgtgctggacgtccagcctgccattagtgttcgcttgccagacgacatgagtgccttacagatggccatcattgtgcttgccatactgttatttcttgccgccatgctctttgtcctgatgaattggtactaccgcacagttcacaagcgtaagctgaaagccatcgtagctggcagcgccgggaatcgaggcttcatcgacatcatggatatgccaaacaccaataagtattcatttgacggagccaaccccgtgtggctcgatcccttttgcaggaacctggagctggccgctcaggccgaacacgaagacgatctgcctgaaaatctgagcgaaatcgccgatttatggaattcgccgacccgaactcatgggacgtttggcagagagcctgctgccgtgaaacccgacgacgataggtacctgagagcagccattcaggagtacgataacatcgccaaattaggtcagattatccgggaaggtccaatcaaacttatacagacagaactagacgaggaaccaggcgaccattctcctggtcagggttcactcagattccggcacaaacccccggtggagctgaaaggccctgacgggattcatgtcgtccatggctcaactgggactctgctcgcaacggatcttaacagcctacccgaagaggatcaaaagggccttgggcgctcattagaaacactgaccgctgctgaagctactgctttcgagagaaacgccaggacggagtcagcgaagagcacaccccttcataagctccgggacgtgattatggaaaccccactcgagattactgagctttag

SEQ ID NO: 336030 - DNA, 9960 bp, Artificial Sequence
  derived and/or modified sequence
atgggccgccacgtggccaccagctgccacgtggcctggctgctggtgctgatcagcggctgctggggccaggtgaaccggctgcccttcttcaccaaccacttctttgacacctacctgctgatcagcgaggacacccctgtgggcagctctgtgacccagctgctggcccaggacatggacaatgaccccctggtgtttggagtgtctggagaggaggccagccgcttctttgctgtggagccagacaccggggtggtgtggctgcggcagcccctggaccgggagaccaagtctgagttcaccgtggagttctctgtgtctgaccaccagggcgtcatcaccaggaaggtgaacatccaggtgggagatgtgaatgacaatgcccccaccttccacaaccagccctacagcgtgcgcatccctgagaacacccctgtgggcacccccatcttcatcgtgaatgccacagatcctgacctgggcgccggcggctctgtgctgtacagcttccagccccccagccagttctttgccatcgacagcgcccggggcatcgtgaccgtcatccgggagctggactatgagaccacccaggcctaccagctgactgtgaatgccacagaccaggacaagacccggcccctgagcaccctggccaacctggccatcatcatcacagatgtgcaggacatggaccccatcttcatcaacctgccctacagcaccaacatctatgagcacagccccccaggcaccaccgtgcgcatcatcacagccatcgaccaggacaagggccggccccggggcatcggctacaccatcgtgtctggcaacaccaacagcatctttgccctggactacatcagcggcgtgctgaccctgaatggcctgctggaccgggagaaccccctgtacagccacggcttcatcctgactgtgaagggcacagagctgaatgatgacaggacccccagtgatgccaccgtgaccaccaccttcaacatcctggtgattgacatcaatgacaatgcccctgagttcaacagcagcgagtacagcgtggccatcacagagctggcccaggtgggctttgccctgcccctcttcatccaggtggtggacaaggatgagacccagggcctgaacagcatgtttgaggtgtacctggtgggcaacaacagccaccacttcatcatcagccccacctctgtgcagggcaaggctgacatccgcatccgggtggccatccccctggactatgaaacagtggacagatatgactttgacctgtttgccaatgaatctgtgcctgaccacgtgggctacgccaaggtgaagatcaccctcatcaatgaaaatgacaaccggcccatcttcagccagcccctgtacaacatcagcctgtatgaaaatgtgacagtgggcacctctgtgctgactgtgctggccacagacaatgatgctggcaccttcggggaggtgtcctacttcttcagtgatgatcctgaccgcttcagcctggacaaggacaccggcctcatcatgctgattgcccggctggactatgagctgatccagcgcttcaccctgaccatcatcgccagagatggcggcggggaggagaccaccggccgggtgcgcatcaacgtgctggatgtgaatgacaacgtgcccaccttccagaaggatgcctacgtgggcgccctgcgggagaatgagcccagcgtgacccagctggtgcggctgcgggccacagatgaggacagcccccccaacaaccagatcacctacagcatcgtgtctgccagcgccttcggcagctactttgacatcagcctgtatgagggctacggcgtcatctctgtgtcccggcccctggactatgagcagatcagcaatggcctcatctacctgactgtgatggccatggatgctggcaacccccccctgaacagcacagtgcctgtgaccatcgaggtgtttgatgaaaatgacaacccccccaccttcagcaagccagcctactttgtgtctgtggtggagaacatcatggccggggccaccgtgctcttcctgaatgccacagacctggacaggagccgggagtatggccaggagagcatcatctacagcctggagggcagcacccagttccgcatcaatgcccggtctggagagatcaccaccaccagcctgctggaccgggagaccaagtctgagtacatcctgattgtgcgggctgtggatggcggcgtgggccacaaccagaagacaggaattgccaccgtgaacatcaccctgctggacatcaatgacaaccaccccacctggaaggatgccccctactacatcaacctggtggagatgaccccaccagacagtgatgtgaccaccgtggtggccgtggaccctgacctgggagaaaatggcaccctggtgtacagcatccagccccccaacaagttctacagcctgaacagcaccaccgggaagatccgcaccacccacgccatgctggacagagaaaatccagacccccatgaggccgagctgatgaggaagatcgtggtgtctgtgacagactgtggccggccccccctgaaggccaccagcagcgccaccgtgtttgtgaacctgctggacctgaatgacaatgaccccaccttccagaacctgccctttgtggccgaggtgctggagggcatcccagctggggtgtccatctaccaggtggtggccatcgacctggatgagggcctgaatggcctggtgtcctacaggatgcctgtgggcatgcccaggatggacttcctgatcaacagcagcagcggcgtggtggtgaccaccacagagctggaccgggagagaattgctgagtaccagctgcgggtggtggccagtgatgctggcacccccaccaagagcagcaccagcaccctgaccatccacgtgctggatgtgaatgatgagacccccaccttcttccctgctgtgtacaacgtgtctgtgtctgaagatgtgccccgggagttccgggtggtgtggctgaactgcacagacaatgatgtgggcctgaatgctgagctgagctacttcatcactggaggaaatgtggatggcaagttctctgtgggctacagagatgctgtggtgaggacagtggtgggcctggaccgggagaccacagctgcctacatgctgatcctggaggccatcgacaatggacctgtgggcaagaggcacactggaacagccaccgtgtttgtgacagtgctggatgtgaatgacaaccggcccatcttcctgcagagcagctatgaggcctctgtgcctgaggacatccctgagggccacagcatcctgcagctgaaggccacagatgctgatgaaggagaatttggccgggtgtggtaccgcatcctgcacggcaaccacggcaacaacttccgcatccacgtgtccaatggcctgctgatgaggggcccccggcccctggaccgggagaggaacagcagccacgtgctgattgtggaggcctacaaccacgacctgggccccatgaggagctctgtgcgggtgattgtgtatgtggaggacatcaatgatgaggcccctgtgttcacccagcagcagtacagccggctgggcctgcgggagacagctggcatcggcacctctgtgattgtggtgcaggccacagaccgggacagcggagatggcggcctggtgaactaccgcatcctgagcggggctgagggcaagtttgaaattgatgagagcacaggcctcatcatcaccgtgaactacctggactatgagaccaagaccagctacatgatgaatgtgtctgccacagaccaggccccacccttcaaccagggcttctgcagcgtgtacatcaccctgctgaatgagctggatgaggccgtgcagttcagcaatgccagctatgaggccgccatcctggagaacctggccctgggcacagagatcgtgcgggtgcaggcctacagcattgacaacctgaaccagatcacctaccgcttcaatgcctacaccagcacccaggccaaggccctcttcaagattgatgccatcaccggggtcatcaccgtgcagggcctggtggaccgggagaagggggacttctacaccctgactgtggtggctgatgatggcggccccaaggtggacagcacagtgcaggtgtacatcaccgtgctggatgaaaatgacaacagccccaggtttgacttcaccagtgacagcgctgtgtccatccctgaggactgccctgtgggccagagggtggccaccgtgaaggcctgggaccctgatgctggcagcaatggccaggtggtgttcagcctggccagcggcaacattgctggggcctttgaaattgtgaccaccaatgacagcatcggggaggtgtttgtggcccggcccctggaccgggaggagctggaccactacatcctgcaggtggtggccagtgaccggggcaccccacccaggaagaaggaccacatcctgcaggtgaccatcctggacatcaatgacaacccccctgtgattgagagccccttcggctacaacgtgtctgtgaatgaaaatgtgggcggcggcacagctgtggtgcaggtgcgggccacagaccgggacatcggcatcaacagcgtgctgagctactacatcacagagggcaacaaggacatggccttcaggatggaccgcatcagcggggagatcgccaccaggcctgcccccccagaccgggagcggcagagcttctaccacctggtggccaccgtggaggatgagggcacccccaccctgagcgccaccacccacgtgtatgtgaccatcgtggatgaaaatgacaatgcccccatgttccagcagccccactatgaggtgctgctggatgagggccctgacaccctgaacaccagcctcatcaccatccaggccctggacctggatgagggccccaatggaacagtgacctacgccatcgtggccggcaacatcgtgaacaccttcagaattgacagacacatgggcgtcatcacagctgccaaggagctggactatgagatcagccacggccgctacaccctcatcgtgacagccacagaccagtgccccatcctgagccaccggctgaccagcaccaccaccgtgctggtgaatgtgaatgacatcaatgacaacgtgcccaccttcccccgggactatgagggcccctttgaggtgacagagggccagcccggcccccgggtgtggaccttcctggcccatgaccgggacagcggccccaacggccaggtggagtacagcatcatggatggagaccccctgggggagtttgtgatcagccctgtggagggcgtgctgcgggtgaggaaggatgtggagctggaccgggagaccatcgccttctacaacctgaccatctgtgcccgggaccggggcatgccacccctgagcagcaccatgctggtgggcatccgggtgctggacatcaatgacaatgaccctgtgctgctgaacctgcccatgaacatcaccatcagcgagaacagccctgtgagcagctttgtggcccacgtgctggccagtgatgctgacagcggctgcaatgcccggctgaccttcaacatcacagctggcaaccgggagcgggccttcttcatcaatgccaccactggaattgtgacagtgaaccggcccctggaccgggagcgcatccctgagtacaagctgaccatctctgtgaaggacaaccctgagaaccccagaattgcccggcgggactatgacctgctgctgatcttcctgagtgatgaaaatgacaaccaccccctcttcaccaagagcacctaccaggccgaggtgatggagaacagccctgctggcacccccctgactgtgctgaatggccccatcctggccctggatgctgaccaggacatctatgctgtggtgacctaccagctgctgggcgcccagagcggcctgtttgacatcaacagcagcactggagtggtgacagtgcgctctggagtcatcatcgaccgggaggccttcagcccccccatcctggagctgctgctgctggccgaggacatcggcctgctgaacagcacagcccacctgctgatcaccatcctggatgacaatgacaaccggcccaccttctccccagccaccctgactgtgcacctgctggagaactgccccccaggcttctctgtgctgcaggtgacagccacagatgaggacagcggcctgaatggagagctggtgtaccgcatcgaggccggggcccaggaccgcttcctgatccacctggtgactggagtcatccgggtgggcaatgccaccatcgaccgggaggagcaggagagctaccgcctgactgtggtggccacagaccggggcaccgtgcccctgtctggaacagccatcgtgaccatcctgattgatgacatcaatgacagcaggcctgagttcctgaaccccatccagacagtgtctgtgctggagagcgctgagcccggcaccgtgattgccaacatcacagccatcgaccatgacctgaaccccaagctggagtaccacatcgtgggcatcgtggccaaggatgacacagaccggctggtgcccaaccaggaggatgcctttgctgtgaacatcaacacaggctctgtgatggtgaagagccccatgaaccgggagctggtggccacctatgaggtgaccctgtctgtgattgacaatgccagtgacctgcctgagaggtctgtgtctgtgcccaatgccaagctgactgtgaatgtgctggatgtgaatgacaacaccccccagttcaagcccttcggcatcacctactacatggagcgcatcctggagggcgccaccccaggcaccaccctgattgctgtggccgctgtggaccctgacaagggcctgaatggcctggtgacctacaccctgctggacctggtgcccccaggctacgtgcagctggaggacagcagcgctgggaaggtgattgccaacagaacagtggactatgaggaggtgcactggctgaacttcaccgtgcgggccagtgacaatggcagcccccccagggctgctgagatccctgtgtacctggagatcgtggacatcaatgacaacaaccccatctttgaccagcccagctaccaggaggccgtgtttgaagatgtgcctgtgggcaccatcatcctgactgtgacagccacagatgctgacagcggcaactttgccctgattgagtacagcctgggagatggagagagcaagtttgccatcaaccccaccaccggggacatctacgtgctgagcagcctggaccgggagaagaaggaccactacatcctgacagccctggccaaggacaaccctggagatgtggccagcaacagaagagagaacagcgtgcaggtggtgatccaggtgctggatgtgaatgactgccggccccagttcagcaagccccagttcagcacctctgtgtatgaaaatgaacctgctggcaccagcgtcatcaccatgatggccacagaccaggatgagggccccaatggagagctgacctacagcctggagggccctggggtggaggccttccacgtggacatggacagcggcctggtgaccacccagaggcccctgcagagctatgagaagttcagcctgactgtggtggccacagatggaggagagccccccctgtggggcaccaccatgctgctggtggaggtgattgatgtgaatgacaacagacctgtgtttgtgcggccccccaacggcaccatcctgcacatccgggaggagatccccctgcggagcaatgtgtatgaggtgtatgccacagacaaggatgagggcctgaatggagctgtgcgctacagcttcctgaagacagctggcaacagagactgggagttcttcatcatcgaccccatcagcggcctcatccagacagcccagaggctggaccgggagagccaggccgtgtacagcctcatcctggtggccagtgacctgggccagcctgtgccctatgagaccatgcagcccctgcaggtggccctggaggacattgatgacaatgagcccctgtttgtgcggccccccaagggcagcccccagtaccagctgctgactgtgcctgagcacagcccccggggcaccctggtgggcaatgtgactggagctgtggatgctgatgagggccccaatgccatcgtgtactacttcatcgctgctggaaatgaggagaagaacttccacctgcagccagatggctgcctgctggtgctgcgggacctggaccgggagcgggaggccatcttctccttcatcgtgaaggccagcagcaacagatcctggaccccaccccggggccccagccccaccctggacctggtggccgacctgaccctgcaggaggtgcgggtggtgctggaggacatcaatgaccagcccccacgcttcaccaaggccgagtacacagctggggtggccacagatgccaaggtgggcagcgagctgatccaggtgctggccctggatgctgacatcggcaacaacagcctggtgttctacagcatcctggccatccactacttccgggccctggccaatgacagtgaagatgtgggccaggtgttcaccatgggctccatggatggcatcctgcggacctttgacctcttcatggcctacagccctggctactttgtggtggacatcgtggcccgggacctggccggccacaatgacacagccatcatcggcatctacatcctgagagatgaccagagggtgaagatcgtcatcaatgagatcccagacagagtgcggggctttgaggaggagttcatccacctgctgagcaacatcactggagccatcgtgaacacagacaacgtgcagttccacgtggacaagaagggccgggtgaactttgcccagacagagctgctgatccacgtggtgaacagagacaccaaccgcatcctggatgtggacagagtcatccagatgattgatgagaacaaggagcagctgaggaacctcttcaggaactacaacgtgctggatgtgcagcctgccatctctgtgcggctgcctgatgacatgtctgccctgcagatggccatcatcgtgctggccatcctgctcttcctggccgccatgctgtttgtgctgatgaactggtactacagaacagtgcacaagaggaagctgaaggccatcgtggccggcagcgctggcaacagaggcttcatcgacatcatggacatgcccaacaccaacaagtacagctttgatggagccaaccctgtgtggctggaccccttctgcaggaacctggagctggccgcccaggccgagcatgaagatgacctgcctgagaacctgtctgaaattgctgacctgtggaacagccccaccaggacccacggcaccttcggccgggagcctgctgctgtgaagccagatgatgaccgctacctgcgggccgccatccaggagtatgacaacatcgccaagctgggccagatcatccgggagggccccatcaagctgatccagacagagctggatgaggagcccggggaccacagccctggccagggcagcctgcgcttccgccacaagccccctgtggagctgaagggcccagatggcatccacgtggtgcacggcagcacaggcaccctgctggccacagacctgaacagcctgcctgaggaggaccagaagggcctgggccgcagcctggagaccctgacagctgctgaggccacagcctttgaaagaaatgccaggacagagagcgccaagagcacccccctgcacaagctgagagatgtgatcatggagacccccctggagatcacagagctgtag

SEQ ID NO: 336031 - DNA, 9960 bp, Artificial Sequence
  derived and/or modified sequence
atgggccggcacgtggccaccagctgccacgtggcctggctgctggttctgatctctggctgctggggtcaggtcaaccggctgccattcttcacaaatcactttttcgatacatacctcttgatcagtgaggatacacccgtcggctccagcgtgacccagttgctggcacaggatatggataatgacccactggtgttcggagtgtctggtgaggaagctagcagattcttcgctgtcgagcccgacaccggagtagtttggctgaggcagcctctcgatagagaaaccaagagtgagttcaccgtagagttttccgtgtccgatcatcagggagtgatcactagaaaggttaatatccaggtgggcgatgtgaatgacaacgcgcctactttccacaaccagccatatagcgttcgcattcctgagaatacacccgtcggtacccccatattcatcgttaatgctaccgatccggaccttggcgccggaggtagtgtgttatatagcttccagcccccaagccaatttttcgccatagattcggctcgtggaattgtgacagtgatccgagaactcgattatgagaccacgcaggcctaccagttgactgtaaacgcaacggatcaggacaagactcggccactaagtaccctcgctaatcttgccatcatcattaccgacgtgcaggatatggaccctatcttcatcaacctgccatattcgacgaatatctatgagcacagcccccctgggacaactgtgcgcattattaccgccattgatcaggacaaagggcgaccgcgaggaatcggttatacaatcgtgtccggtaataccaatagcatcttcgctctggattacatatctggggtgctcactcttaatggtctgctagacagggaaaatcccttgtactcccacgggttcatcctaactgtgaagggaacagaattgaatgacgatcgaaccccatcagacgctaccgttactacaacctttaacatcctagtaatcgatatcaatgataatgcacctgagtttaactcctctgaatactccgttgccatcacagagctcgctcaggtcgggtttgccttaccactgttcatacaggtggtggataaagacgagacccaggggctaaacagcatgtttgaagtctacctcgtcggcaacaacagccaccatttcattatatcacccacatcagttcaaggtaaagctgatatccgtatcagggttgccattccccttgattatgagaccgtcgatcgctacgactttgacctctttgccaacgaaagcgttcctgatcatgtcggctatgctaaggtcaagatcacactcattaacgaaaatgacaaccggcctatcttctcccaaccactgtacaacatctccttgtacgagaacgtgaccgtggggacatcagttctgactgtccttgccaccgacaatgacgccggtacctttggggaagtgagctactttttttcagacgatcccgacaggttcagtctcgataaagatacgggactaattatgctcatcgcaaggttagattatgaattgatacagagattcaccttaacaataattgccagggacgggggaggcgaggaaacaaccggacgtgtgagaataaatgtgctggatgtcaacgataacgtgccaacctttcagaaagatgcctatgtcggtgctttgagagagaacgagcctagcgtgacacagctggtgagattgcgcgcaaccgacgaagattcccccccgaacaatcagatcacatattccatcgtgtccgcctccgcattcggatcatatttcgatatcagcctctacgagggctacggagtgatctctgtttctagacctctcgattatgagcagattagtaatggactgatctacttgacagtgatggctatggacgccggtaacccacccctgaatagcactgtccccgtgacgattgaagtctttgacgagaacgataaccctccaacttttagtaagcccgcttatttcgtttcagtggtcgagaatatcatggcaggggctacggtactgttcctcaatgctacggacctggatcgttcaagagaatacgggcaagagtctataatatacagcttagaggggtctacccagtttagaattaacgcaagatcaggtgaaataacaactactagtctgctggatagggaaacaaagtccgaatacatacttattgtgagggctgtggacggcggcgtgggtcacaaccagaagacaggaatagcaaccgtaaatatcacattgttggacatcaatgataaccatcctacctggaaggatgctccctactacattaacctggtggagatgaccccacctgacagcgatgtgaccacagtggttgccgtggatccagacctgggggagaacggtacactggtgtatagcatacaaccgccaaataagttctactccctgaacagcacgacaggtaaaatccgtactactcacgcgatgctggatagggaaaaccccgatccccacgaggcggaactaatgcgcaagatcgttgtgagcgtcacagattgcgggagaccacccctcaaagctaccagctctgctaccgtgtttgtaaaccttctggacctgaacgacaacgaccccaccttccagaatttgccattcgtggctgaggtactggaaggtatcccagccggcgttagcatctaccaggttgttgcaatagatctggacgaagggctcaatggcctggtctcatatcgaatgccggtgggtatgccacgcatggattttctcattaacagctccagcggagtggtggtgacaactacggaacttgatagagaacgtatcgctgaataccaactccgggtggtggcctccgatgcgggcaccccgactaaaagcagcacaagtactctcactatccacgttcttgatgttaacgacgaaacgccaactttctttcccgcggtgtacaatgtgtccgtgtccgaggacgttccgcgggagtttcgagtggtttggctgaactgcaccgataatgacgtaggccttaacgccgagctatcatattttattactggaggtaacgtggacggaaaattttcagtcggatatcgtgacgccgtcgttcgtacagtggttggccttgaccgtgagacaaccgcagcctatatgctgatacttgaggctattgacaacggcccagtgggaaagcgccatacaggtaccgccactgtctttgtaaccgtcctagatgtcaacgacaacagaccaatcttcctccagagctcctatgaggcatctgtgccagaggatatccctgagggccattcgatattacagctgaaagctacggacgccgacgagggagagtttgggagggtgtggtatcgaatcctacatggcaatcacggcaataacttccggatccatgtgtcaaatggcctgctgatgcggggccctcgcccactcgaccgggaacgaaattctagccatgtactcattgtcgaagcttacaaccatgacctgggacctatgcgtagtagcgttcgggtcattgtgtacgtagaggatatcaacgatgaggcccctgtgttcactcagcagcaatactcacggctggggctgagggaaacagctgggatcggaacctcagtgatcgtggtgcaagccactgaccgggacagcggcgacggtggactggtgaattatagaatattgtctggtgctgaagggaagtttgaaatcgacgagagcactggcctgattataaccgtgaactacctggattacgagaccaagacatcctacatgatgaatgtctcagctacagaccaagccccacctttcaaccaggggttctgtagcgtctacatcacacttttaaatgagctcgacgaagccgtccagttctccaatgcaagttatgaggcagcaattctggaaaatctggcgctcggtacagaaatcgttcgagtccaggcatactccattgataaccttaaccagattacctaccggtttaacgcctacaccagcacccaggccaaagccctattcaagattgacgccatcacgggagtgatcactgtgcagggtctcgttgatcgggagaagggagacttctacaccctgacagtggtggctgacgacggcggtccaaaggtagattctaccgtgcaagtgtatataactgtcctcgacgagaatgacaattcaccacgcttcgactttacatctgatagcgcagtttccatacccgaagactgccccgtcggacaacgggtcgctaccgtcaaggcttgggacccggacgccggctccaacggccaggttgtatttagtctggcctctggtaacatcgcaggggctttcgagattgttacaaccaatgactccatcggcgaagttttcgtggccagacctctggatcgtgaagaactggaccattacatcctgcaggtcgtagcctccgacagaggcactcctccccggaaaaaagatcacatcctccaagtcaccatcctagacattaacgacaatccgcccgtaatcgagtcaccattcggctacaatgtgtcagtgaacgagaatgtaggtgggggcacagctgtggtgcaggtccgcgccactgacagggatattgggattaacagcgtcctctcttactatattactgaggggaataaagatatggccttccgaatggaccgtattagtggggaaatcgcaactcgcccagctcctcctgacagggaacgacagagtttctaccacctggtggccaccgtggaggacgagggaactcccactctcagcgcgaccactcatgtatatgtgactatcgtcgatgagaatgataatgcgcctatgttccagcagccccattacgaagtgctgctggatgaaggtcccgacaccttaaatacatccctgataacaatccaggctcttgatctggacgagggcccgaatggcacggtcacatacgctatcgtggccggcaatatcgtcaacacatttagaattgaccgacacatgggggtgattaccgccgcgaaggagctcgattacgaaatttcacacggcaggtatacgcttatcgtaaccgcaactgatcagtgccccatcctcagccaccgtctgacctccaccactaccgttcttgtgaatgtcaatgacattaacgataatgtgcccacatttccgcgagattatgagggacccttcgaggtcactgaaggacagcccggaccacgcgtctggacattcttagcccatgaccgcgattccggaccaaatgggcaagttgagtacagcataatggatggagaccctctgggcgagtttgtcatcagccccgtggagggcgtgctgagagtcaggaaggacgtcgagcttgatcgggagacaattgcattctataatttgacaatctgtgcaagagatagaggcatgccccctctctcttcaaccatgctcgtaggtatcagggtcttggatatcaacgacaacgatcccgtgcttttgaacctcccaatgaacatcacaatcagcgaaaattccccagtctcttcctttgtggcccacgtactggcatcggatgccgattccggttgtaatgctcgcctaacattcaacatcactgctggtaatcgagagcgcgccttcttcatcaatgctacaacaggaattgtcactgtgaaccgcccgctcgatcgtgagagaattcctgagtataaactaacgatttccgtcaaagataatcccgagaatccccgcattgctcgtagggactacgatctactcctgatcttcctaagtgatgagaacgataaccatccgctgttcaccaaaagcacttaccaggccgaagttatggaaaacagtcctgctggcacaccacttactgttctgaacggaccgatcctggcactggacgccgaccaggacatctacgctgtcgtgacatatcagctcctcggggcacagtccggactcttcgatataaacagcagcacaggtgtcgtgaccgtgcggtccggggttataattgaccgcgaggcattttcacccccaatactggagttgctgctgttggcggaggacattgggctgctgaatagtactgcccatctgctgatcacaattttggacgacaacgacaaccgcccaaccttctctccagccaccttgaccgtccatcttctcgagaattgtcctcctggcttttctgtccttcaggtgaccgcaaccgacgaggatagcggtctgaatggagaattggtgtacaggatcgaagccggggcgcaggatcgctttctcatccatcttgttacaggggtgattagggtgggaaatgccacaattgatagagaggaacaggaaagttacaggctgacagtggtcgccactgacaggggcacggtcccgttgagtggtaccgccatcgtaaccatccttatcgacgacatcaacgatagtcggccggagtttctgaatcccatccaaacagtcagtgtgcttgagtcagccgaaccgggaactgtcattgccaatatcactgccattgatcatgacctgaacccaaagctggaatatcacatcgtaggaatagtggctaaagacgatacagacagacttgttccaaaccaggaagatgcctttgcagttaatatcaatactggaagcgtgatggtgaaaagccccatgaacagggaactggtagccacttatgaagtgacactatctgtcatcgataatgcctccgacctgcctgagaggtcagtctccgtgccgaatgccaaattgacagttaacgttttagacgtgaacgataatacgccacaatttaagccgttcggaatcacgtactatatggaacggattttagagggtgctacaccaggaactactctcatcgcggtggccgccgttgatccggataagggtctcaacgggttggtcacatatactctgctggatctagtaccccctgggtacgttcagctcgaggatagttcggctggaaaagtcattgcaaatcggacagtcgattacgaggaggttcactggctcaatttcaccgtcagggcatcagacaatgggtccccccctcgggcagctgaaatacccgtgtatcttgaaatagttgatattaatgataacaaccctatctttgaccaaccttcttatcaagaagccgtgttcgaagatgtccccgtggggacaatcatcctgactgtaactgcgacagacgctgactctggcaacttcgccctgatcgagtactctctcggtgatggagaatccaaatttgctattaaccctactacaggggatatctatgtgttgagtagcctcgacagggagaagaaggatcactacatcctcaccgctctggccaaagacaacccgggcgacgtcgcaagtaaccggcgggagaactccgtccaggtagtaatccaggtgctggacgtcaacgattgtaggccccaattctcaaaaccacagtttagcaccagtgtgtacgagaacgaacctgctgggacctcagtgatcaccatgatggctacggatcaggatgaaggccctaacggagaactcacatactctctggagggacccggcgtggaggccttccatgtggacatggattccggactggtgacaactcagcgcccgcttcagagctatgaaaagttcagtctcaccgtggtggcaactgacggtggggagcctccattgtgggggactacaatgctactggtcgaagttatcgatgtaaacgacaataggcccgtgttcgttagacccccaaatggcacaatactgcatattagagaggaaatccccctgcgcagcaatgtgtacgaggtttacgcgaccgacaaagacgaaggcctcaatggagctgtgaggtacagctttctgaagactgcaggtaaccgcgactgggagttttttattatagaccccatcagcggacttattcagaccgcacagcgcctggacagggaatcccaggcagtctactctttgattctggtcgcctccgacttgggccagcccgtgccctatgagacaatgcagcctttgcaggtagcacttgaggatatcgatgataatgaaccactatttgtacgcccacccaagggtagtccgcaatatcagttgttaacggtcccagagcactcccctaggggcactctcgtgggcaacgtgacaggtgcagtggatgcggacgaaggtcccaacgccatcgtatactactttatcgcagcaggaaatgaagagaaaaacttccacctccagcccgatggatgtctcctcgtgctcagggacctggacagagagagggaggccattttcagtttcatcgtgaaggcttcgagcaacagaagctggacaccacccagaggaccttcgccaactctcgatttggtcgctgatctgacattacaagaagtgcgggtggtactagaggatattaacgaccaaccaccaagatttacaaaggccgagtatactgcaggcgtggcaacggatgcgaaagtcggatccgagctgatccaagtacttgccttggatgctgacatcggaaataattcacttgttttttactcaatcctggcaatccactattttagggcacttgctaatgattccgaagacgttggccaggtatttactatggggtccatggatggcattttacgtactttcgacctttttatggcctacagccccggatactttgttgtcgacatcgtggctagggaccttgctggccacaatgacaccgcaatcatcgggatctacatactgcgggatgatcagcgggttaaaatagtgatcaatgagatccccgatagagtgcgtgggtttgaggaggagttcatccacctcctctctaacatcactggggctatagtgaatacagacaatgtgcagttccatgtggataaaaaaggaagagttaattttgctcagacagagctgctgatccatgttgtgaacagggatactaatagaatactcgacgtcgatagggtcatccagatgattgacgaaaacaaagaacaattaaggaatctgttccgcaactacaacgtcctggacgtgcaaccagccatcagtgtcaggctgcccgatgacatgagtgccctgcaaatggctattatcgtgctggctatactcctgttcctggctgctatgctgttcgtgctgatgaactggtactaccggaccgttcataagagaaagctgaaggccatagtggcaggctcagccggaaacagagggttcattgacattatggacatgcctaacactaacaaatactcgtttgacggagccaaccccgtttggctagacccattttgtcgtaaccttgagctggccgcgcaggcagaacatgaagacgaccttccggagaatctgtccgagatagccgacctctggaactcccctaccagaacgcacggtactttcggccgtgagcccgccgccgtgaagccagatgacgatcggtaccttagggctgcaatccaggaatatgacaatatcgcaaaactgggtcagatcattagagagggacctattaagttgatccaaaccgagctcgatgaggagcctggggaccattctcctggccagggttccttgcgatttcgccacaaaccgcctgtggagctgaaaggcccagacggaatacatgtcgtgcatggttctaccgggaccctgctcgccacggatttgaactctctgccagaagaagaccagaaggggctgggccggtcgcttgaaacacttaccgcggctgaagccacagcgttcgagcgaaacgcaaggactgagagcgcaaaatccaccccccttcacaagctgcgcgacgtgatcatggagaccccgcttgaaattaccgaactctag

SEQ ID NO: 336032 - DNA, 9959 bp, Artificial Sequence
  derived and/or modified sequence
atgggacggcatgtggctacatcctgtcacgtcgcctggctgttggtgcttattagcggttgttggggacaggtcaatcgcttgccattttttaccaatcactttttcgacacttatctcctgatctctgaagacacgccggtcggttccagcgtaacccagctgctcgcccaggacatggataacgatcctctggtattcggggtctcaggcgaagaagctagcagatttttcgcagttgaaccagatacaggtgtggtgtggcttcgtcagccgctagatcgggaaaccaagtcggagttcaccgtcgagttttcagttagtgaccaccagggcgtgatcacccgaaaagtgaatattcaggtcggcgacgtcaacgacaacgcgcctacctttcacaaccagccatacagcgtccggatacctgaaaatacccccgtgggtactcctatttttattgtgaacgcaactgatcctgacctgggagccggtggctctgtgctctatagtttccagccgccaagccaattttttgctatcgactcagctcgcggtatcgttaccgttattagggagcttgattatgagactacccaggcttaccaactgacggtcaatgcaactgatcaggacaagacacgtccactatctacattggctaatctggcgatcatcatcactgatgtccaggatatggacccaatctttataaacctgccctattctacaaatatttacgagcactcaccacccggtaccaccgtgaggatcattacagctatcgaccaggacaaagggcgacctcgcggtataggatatacaattgtgtcgggaaataccaattctattttcgcactggactacattagcggagttttgaccctgaacggcctcctggatagagagaaccccctgtactctcacggcttcatcctcaccgttaagggcaccgaacttaatgatgacagaacaccttcggacgccacagtgacaaccacgttcaacattctcgtcattgacatcaatgacaatgcccctgagttcaactctagcgagtactcagtggccatcacagaacttgcccaagttggatttgctttgcccctgttcatccaggtggtggataaagatgagacgcagggactgaatagtatgtttgaggtatacctggttggcaataatagtcaccattttattatttctccgacgtcagtgcagggcaaagcagacatccgcattcgagtggcaatccctcttgattacgaaactgtggacagatatgattttgatttgttcgccaacgagtccgtgcccgatcatgtcggctatgctaaagtgaagattaccctgattaatgaaaacgacaatagaccaatattctcccagccgttatacaatatcagtttgtacgagaatgtaaccgtgggtacatctgttttaaccgtcctggctaccgacaacgacgccggtacctttggggaggtgtcttattttttcagcgatgatccggatcgctttagtctcgacaaggacaccgggttaattatgctgattgcccgactggattatgagttgattcaaaggtttaccctgactatcattgccagggatgggggaggcgaggaaactacaggccgtgtaagaatcaacgtgctagacgtgaacgataacgttccaacatttcagaaagatgcatatgttggagctctccgtgagaatgaaccctccgtcacccagctcgtgagactgcgggcaacggacgaggatagcccgccaaacaatcagattacatatagcattgtcagcgcatctgcttttggttcatacttcgatatatcgttatacgagggctatggggtcatttcagtgtcccgccctctcgactatgagcagatctccaatggacttatctatctcacggtgatggcaatggacgcaggtaatcccccattgaattctaccgtcccggtgaccatcgaagtattcgatgaaaacgacaatcccccaactttctccaagccagcctactttgtttcagtggtggagaacatcatggctggtgctacagtgttgttcttgaacgctaccgatctcgatcggagccgcgagtatggccaggaatctattatctacagcttagaggggagtacacaatttagaattaatgcacgctctggtgagatcactaccaccagccttctggatcgggaaaccaagtcagaatacatcctgattgtcagggctgtcgatggaggagtcggccataaccagaaaacaggaatcgcgactgtgaatattacactccttgatattaatgacaaccacccgacctggaaggatgcaccatattacataaatctggtcgaaatgaccccacccgacagtgatgtcaccactgttgtagctgtcgatcctgatctcggggaaaacggaaccctggtgtactctattcagcctccaaataagttttacagcctcaactctacgactgggaaaatccgcacaactcatgctatgctggatagggagaacccagatccacacgaggcggagctcatgcgaaaaatcgtcgtctctgttactgactgtgggaggcccccactgaaggctacctcatccgctaccgtgttcgtgaacctcctggatctgaatgataatgacccaacttttcaaaatcttccctttgttgccgaggtgcttgaggggatcccagcaggggtatctatttaccaggttgttgcaatagacttggatgaggggctgaacggtttagtgagttacaggatgccggtaggaatgccaagaatggattttctcatcaattcatccagcggagtggtcgttacaaccaccgaactagaccgggagcgcatcgcggaataccagctgagagtggtggcttccgatgccggtacaccaacaaaatcctccacatccacccttaccattcacgtcttggatgttaatgacgagacacctacttttttcccagccgtctacaacgtgtcagttagcgaggatgtgcctagagagttccgggtggtgtggctgaactgtactgacaacgacgttggactgaatgccgagttgagctattttatcactgggggtaatgtcgatgggaagttttcagttgggtacagggatgctgtcgtccgaacggtcgtgggcctggatcgtgagacaaccgccgcatacatgctgattttagaggctatcgataatggtcccgttggtaaaaggcacactggtaccgccacagtgtttgtgactgtgctggatgtgaatgacaacaggcctattttcctgcagtcgtcttacgaagcctcggtgcccgaagacattcctgagggccatagcatactccaattaaaggcaacagatgccgacgaaggcgaattcggaagggtctggtacaggatcctccatggtaatcacggtaacaattttagaattcatgtctccaacggactgctcatgaggggacctaggcctctggacagggaacgcaattcatcccacgtgctcatagtggaggcctataatcatgacctgggccctatgcggtcttcagtaagagtgatcgtgtacgtagaagatatcaacgatgaggcaccggtgtttacacagcaacagtacagccgcctcggtcttcgagaaaccgccggtataggaacctctgtgatcgttgtgcaggcgacagaccgcgatagcggtgacggaggcttggttaactatagaatccttagcggggctgagggcaaattcgagattgacgagtctacgggtttgattattacggtaaactatctcgattacgagactaagacttcttacatgatgaacgtttccgcgacggatcaagcccctccatttaatcaaggattctgcagcgtttacattactctgttaaatgagctcgatgaggccgtgcagttttccaacgctagttacgaggctgctattttagagaatctggctctgggcacagagatcgttcgagtacaggcctactcgatagataaccttaaccagatcacctacaggttcaacgcctatacatccacacaagcgaaggcactgtttaagattgacgcgatcacaggcgtaatcaccgtccagggacttgtggaccgtgagaagggggacttctataccttgacagtcgttgccgacgatggcggacctaaggtcgactccacagtccaggtttatattactgtgctggatgaaaatgacaactcccctagatttgattttacttctgactctgctgtgtcgattcctgaggactgccctgtggggcagcgtgtagcaaccgtcaaggcttgggatccagacgcgggtagcaatggccaagtggtgttcagcttggccagtgggaacatcgccggagcattcgaaattgtaacaaccaatgattccatcggcgaagtgttcgtggctagaccgctggaccgagaagagttagaccactacatcctccaagtcgtggcatctgacagagggacccccccaagaaagaaggaccacatccttcaagtaacgattctcgacatcaatgacaatccccctgttattgagtccccgtttggctacaatgtgtccgttaacgagaacgtcggcggaggaacggctgtcgtacaggtgcgcgctacagaccgagacataggtataaattctgtcctgtcctactacatcaccgaggggaacaaggatatggcgtttcggatggatcggatttccggggaaattgccacccgcccagctcccccagacagggaacggcagtctttttaccacctcgtagccaccgtcgaagacgagggcacaccgaccctgtctgcgactacacacgtttacgtcaccattgtggatgaaaacgacaacgccccaatgtttcagcaacctcactacgaagtgcttttagacgagggtccggacacactgaacacgagtcttattaccattcaagcactcgacctggacgagggtccgaacggtacagtgacgtatgcgattgtagccggaaacattgtgaacaccttccgtattgatcggcacatgggagtgatcaccgcagctaaagaactagactacgagatcagtcatgggaggtataccctcattgtgactgccacagaccagtgtcccatcttatcccaccggctgactagtaccactactgtcttagtcaacgtcaacgatatcaatgataacgttccgacatttccacgtgactacgaaggacccttcgaagtcacagaaggacagccagggccaagagtctggactttcctcgctcacgaccgggactccgggcctaacggtcaggtggagtatagcattatggacggtgatccactgggcgaattcgttatatccccggttgaaggcgttctaagagtgagaaaagatgtggagctggaccgtgagaccattgcattttataacttaaccatatgtgcaagagatcggggaatgccccctcttagctctaccatgctggtggggattcgggtcctggacatcaatgacaatgaccccgtactgctgaatttgcccatgaatattacaatctcagagaatagccctgttagctctttcgtcgcccacgtgctggctagtgatgccgattcagggtgtaacgctagactgacatttaacattaccgccggtaatcgcgaacgcgcatttttcattaacgccaccaccggaatcgttacagttaatcggcctctggatcgggagaggatcccagagtacaagctgacaatctcagtcaaggataaccctgaaaatccacgcatagccagacgcgactacgacctgctgttgatctttctgagcgatgagaatgacaatcaccctctcttcacgaaatctacctatcaggcggaggtgatggaaaattcaccagccggtacaccgctgaccgtgctcaacggacctattcttgctctggacgccgaccaggatatctacgctgtcgtcacctatcagctcctgggtgcccaatctggattgttcgacatcaacagctccaccggggtggtcaccgttaggtcaggcgtcattatagaccgcgaagcatttagccctcccatactggaactcctgctgctggccgaggatattgggttgctgaatagcactgcgcatttgctaattacgatcctggatgacaacgataaccgcccaacgttcagcccggctactttaactgtgcaccttctcgagaattgccctcctggattttccgttctccaggtcactgcaactgatgaagactctggattgaacggtgagttagtgtatcgcattgaggccggagcacaggaccgctttttaattcatctagtgacaggggtgataagagtgggtaacgctaccattgatcgggaggaacaggagtcctatcggttaacagtggtggctaccgacagagggacagtgccactctcaggtaccgccatcgtaaccatcttgattgatgatattaatgattccaggcctgaattcctgaatccaatacaaaccgtgtctgtgctcgagtcagccgaaccaggcaccgtgatcgctaacattaccgcaatcgatcacgaccttaatccaaaacttgaataccacatcgtcggtattgttgcgaaagatgatacggatagattggtccccaaccaagaggatgccttcgccgttaacataaatacggggtctgttatggtgaagagtcctatgaatagagagttggtggcaacctatgaagtgaccctgagtgtgatcgacaatgcttctgatttacccgagcggtcagtgagtgtgcccaacgccaagttaaccgtaaacgtacttgacgtgaatgacaacacgccacagtttaagcccttcgggatcacctattatatggaacggattctcgagggagcaacccctgggaccacactcatagcggtcgctgctgttgatcctgacaaggggctcaatgggttggtgacatacacacttctcgatctcgtgcccccaggctacgtccagctggaggacagttcggccggaaaggttattgctaacaggaccgtggactatgaggaggtccactggctgaactttactgtccgagcttctgataatggatctccacctcgcgcagccgagatcccagtctacctggaaattgtggacatcaatgacaacaaccctatttttgatcagccctcttaccaggaagccgtttttgaggacgtaccggtcgggacaattatcctcactgtcacagccacggacgctgatagcgggaactttgctttgatcgagtactcgctaggggacggggaaagcaagtttgccatcaatcccaccactggtgacatttatgttctgtcctcccttgatagggaaaagaaggaccattacattctgacagctcttgcaaaagataacccaggcgacgtcgcctctaatagacgcgagaactcagtccaggtggtgattcaggtgctcgatgttaacgattgccgacctcagttctccaagccccagttctccacgagcgtgtatgagaatgagcccgcagggaccagcgttatcactatgatggccactgatcaggacgaagggcctaatggcgagctgacatattcccttgaggggcctggtgtggaggcgtttcatgtggatatggactctggactggttacgacgcagaggcccctgcagtcttacgagaagttcagtttaacagtcgtggctactgacggaggggaaccacctctctggggcactactatgctactcgtggaagtcattgatgtgaatgataatagacctgttttcgttaggccccctaatggaaccattctccatatacgggaggaaataccattgcggtctaatgtatacgaggtgtacgccacggataaggacgagggactcaacggcgctgtgagatactcattcttgaaaactgctggcaatcgggactgggaattctttattattgaccctattagcggcctcatccagacagctcagcggctggatagggagagccaggcagtttattctctgattctcgtcgcttccgacctggggcagcctgtcccttatgaaaccatgcagccactacaggtggccctggaggacattgacgataatgagcccttgtttgtcaggccacctaagggcagtccccaataccagctgttgaccgtacctgaacactctcctcgaggaactttggtaggcaatgtgaccggcgcagttgatgcagatgagggacccaatgcaatcgtgtattactttatcgccgcaggaaatgaagaaaagaacttccatttgcaaccagacgggtgtcttctcgtgctgagggatcttgatcgtgagagggaagccatcttcagcttcatcgtgaaagcctctagcaataggagctggacccctcctcgcggacccagccccactctcgatctcgtggccgatctgaccctccaggaggttcgagttgtcctcgaggacatcaacgaccagcctccgagattcactaaagctgaatacacggccggagtcgctactgacgctaaagtcggatctgagctgatccaggtgctggcccttgatgctgatatcgggaacaatagcctggtgttttattccatccttgccatccactacttccgagcactggccaacgactcagaagatgtgggccaagtgtttaccatgggtagcatggacggcatcctgaggacgttcgacttgttcatggcttattcccctggctatttcgtagtggatatagtagctagggacctggcagggcacaacgatactgctatcattggcatatatatcttgcgcgacgaccagagggttaaaatagtgataaacgagatccccgatagagtgagggggttcgaagaggagttcatccacctcttgtccaacatcacgggagcgatcgtgaataccgataatgtgcagtttcatgtcgataaaaaggggagagtcaattttgcccagaccgaattactgatacacgtggttaatagagatacaaacagaattctggacgtggatcgggtgatacaaatgattgacgagaacaaagagcagcttcggaatctgtttagaaactataacgtcctcgatgttcagcccgcaatttcggttcgcctgcccgacgacatgagcgctctgcagatggctatcatcgtgttagccatactgctattccttgcagcgatgcttttcgtgctcatgaattggtattatagaaccgtacacaagagaaagttgaaagctatcgttgcaggcagcgccggaaatcgcggatttatagatataatggatatgcctaatacaaacaagtatagctttgacggcgcaaaccccgtgtggctagacccattttgtaggaatcttgaattggccgctcaggccgagcacgaagacgatctgcccgaaaacctctctgagattgcagatctctggaattctccaaccagaacccatggtacctttgggagggaacctgctgccgtgaaaccagatgacgatcggtacctcagagcagcgatacaagagtacgataatatagccaagcttggccagatcatccgcgaaggccctatcaagctcatacagaccgaactggatgaggaacctggcgaccatagtcccggtcagggctccctgcgttttagacacaaaccacccgttgaactgaagggaccagacggcatccacgtggtgcatggtagcacgggcaccctcctcgccactgatcttaattccttgcctgaagaggatcagaaaggcctgggcaggtcgttggaaacactaacggctgcggaagcaactgcgttcgagcggaacgctcgaacagagagtgctaagtccacccctcttcacaagctgagagacgtgataatggaaactcctctggaaatcaccgagctgta

SEQ ID NO: 336033 - DNA, 11017 bp, Artificial Sequence
  derived and/or modified sequence
gcggcggcggcggctcgggagagagggacgcgggctgcaggcgcgatgcttggctagaggacgcgtccgacggcggccggacgctgaggtggtcggggctagtcagcccggcctgggcatggagcgcggggtggcagagcctctggacgtttggggcgcgcccagtccgagcccccggcgcgcctgaagttgcgagcggcgagcggcgagcggcgagcggcccgcggagacccaggagctgccggcacgccgcggatgagccttcgcgccggcgggaagacgcggcggtggccagggccagagcaggcggcccgcgggggccgatccggcggagagcagagcccgaggcgaggcgaggcgcggcgccgctgcacacacgcacacggagccatggggcgccatgttgccaccagctgccacgtggcctggcttttggtgctgatctctggatgctggggccaggtgaaccggctgcccttcttcaccaaccacttctttgatacatacctgctgatcagcgaggacacgcctgtgggttcttctgtgacccagttgctggcccaagacatggacaatgaccccctggtgtttggcgtgtctggggaggaggcctctcgcttctttgcagtggagcctgacactggcgtggtgtggctccggcagccactggacagagagaccaagtcagagttcaccgtggagttctctgtcagcgaccaccagggggtgatcacacggaaggtgaacatccaggttggggatgtgaatgacaacgcgcccacatttcacaatcagccctacagcgtccgcatccctgagaatacaccagtggggacgcccatcttcatcgtgaatgccacagaccccgacttgggggcagggggcagcgtcctctactccttccagcccccctcccaattcttcgccattgacagcgcccgcggtatcgtcacagtgatccgggagctggactacgagaccacacaggcctaccagctcacggtcaacgccacagatcaagacaagaccaggcctctgtccaccctggccaacttggccatcatcatcacagatgtccaggacatggaccccatcttcatcaacctgccttacagcaccaacatctacgagcattctcctccgggcacgacggtgcgcatcatcaccgccatagaccaggataaaggacgtccccggggcattggctacaccatcgtttcagggaataccaacagcatctttgccctggactacatcagcggagtgctgaccttgaatggcctgctggaccgggagaaccccctgtacagccatggcttcatcctgactgtgaagggcacggagctgaacgatgaccgcaccccatctgacgctacagtcaccacgaccttcaatatcctggttattgacatcaatgacaatgccccggagttcaacagctccgagtacagcgtggccatcactgagctggcacaggtcggctttgcccttccactcttcatccaggtggtggacaaggatgagacccagggcctgaacagcatgtttgaggtgtacttggtggggaacaactcccaccacttcatcatctccccgacctccgtccaggggaaggcggacattcgtattcgggtggccatcccactggactacgagaccgtggaccgctacgactttgatctctttgccaatgagagtgtgcctgaccatgtgggctatgccaaggtgaagatcactctcatcaatgaaaatgacaaccggcccatcttcagccagccactgtacaacatcagcctgtacgagaacgtcaccgtggggacctctgtgctgacagtcctggcaactgacaatgatgcaggcacctttggggaagtcagctacttcttcagtgatgaccctgacaggttctcgctggacaaggacacgggactcatcatgctgattgccaggctggactatgagctcatccagcgcttcaccctgacgatcattgcccgggacgggggcggcgaggagaccacaggccgggtcaggatcaatgtgttggatgtcaacgacaacgtgcccaccttccagaaggatgcctacgtgggtgctctgcgggagaacgagccttctgtcacacagctggtgcggctccgggcaacagatgaagactcccctcccaacaaccagatcacctacagcattgtcagtgcatctgcctttggcagctacttcgacatcagcctgtacgagggctatggagtgatcagcgtcagtcgccccctggattatgaacagatatccaatgggctgatttatctgacggtcatggccatggatgctggcaacccccctctcaacagcaccgtccctgtcaccatcgaggtgtttgatgagaatgacaaccctcccaccttcagcaagcccgcctacttcgtctccgtggtggagaacatcatggcaggagccacggtgctgttcctgaatgccacagacctggaccgctcccgggagtacggccaggagtccatcatctactccttggaaggctccacccagtttcggatcaatgcccgctcaggggaaatcaccaccacgtctctgcttgaccgagagaccaagtctgaatacatcctcatcgttcgcgcagtggacgggggtgtgggccacaaccagaaaactggcatcgccaccgtaaacatcaccctcctggacatcaatgacaaccaccccacgtggaaggacgcaccctactacatcaacctggtggagatgacccctccagactctgatgtgaccacggtggtggctgttgacccagacctgggggagaatggcaccctggtgtacagcatccagccacccaacaagttctacagcctcaacagcaccacgggcaagatccgcaccacccacgccatgctggaccgggagaaccccgacccccatgaggccgagctgatgcgcaaaatcgtcgtctctgttactgactgtggcaggccccctctgaaagccaccagcagtgccacagtgtttgtgaacctcttggatctcaatgacaatgaccccacctttcagaacctgccttttgtggccgaggtgcttgaaggcatcccggcgggggtctccatctaccaagtggtggccatcgacctcgatgagggcctgaacggcctggtgtcctaccgcatgccggtgggcatgccccgcatggacttcctcatcaacagcagcagcggcgtggtggtcaccaccaccgagctggaccgcgagcgcatcgcggagtaccagctgcgggtggtggccagtgatgcaggcacgcccaccaagagctccaccagcacgctcaccatccatgtgctggatgtgaacgacgagacgcccaccttcttcccggccgtgtacaatgtgtctgtgtccgaggacgtgccacgcgagttccgggtggtctggctgaactgcacggacaacgacgtgggcctcaatgcagagctcagctacttcatcacaggtggcaacgtggatgggaagttcagcgtgggttaccgcgatgccgttgtgagaaccgtggtgggcctggaccgggagaccacagccgcctacatgctcatcctggaggccatcgacaacggccctgtagggaagcgacacacgggcacagccaccgtgttcgtcactgtcctggatgtgaatgacaaccggcccatctttctgcagagcagctatgaggccagcgtccctgaggacatccctgaaggccacagcatcttgcagctgaaagccacggacgcagatgagggcgagtttgggcgtgtgtggtaccgcatcctccatggtaaccatggcaacaacttccggatccatgtcagcaatgggctcctgatgcgagggccccggcccctggaccgggagcggaactcatcccacgtgctgatagtggaggcctacaaccacgacctgggccccatgcggagctccgtcagggtgattgtgtacgtggaggacatcaacgatgaggcccccgtgttcacacagcagcagtacagccgtctggggcttcgagagaccgcaggcattggaacgtcagtcatcgtggtccaagccacagaccgagactctggggatggtggcctggtgaactaccgcatcctgtcgggcgcagaggggaagtttgagattgacgagagcacagggcttatcatcaccgtgaattacctggactacgagaccaagaccagctacatgatgaatgtgtcggccactgaccaggccccgcccttcaaccagggcttctgcagcgtctacatcactctgctcaacgagctggacgaggccgtgcagttctccaatgcctcatacgaggctgccatcctggagaatctggcactgggtactgagattgtgcgggtccaggcctactccatcgacaacctcaaccaaatcacgtaccgcttcaacgcctacaccagcacccaggccaaagccctcttcaagatagacgccatcacgggtgtgatcacagtccagggcctggtggaccgtgagaagggcgacttctataccttgacagtggtggcagatgacggcggccccaaggtggactccaccgtgcaggtctacatcactgtgctggacgagaatgacaacagcccccggtttgacttcacctccgactcggcggtcagcatacccgaggactgccctgtgggccagcgagtggctactgtcaaggcctgggaccctgatgctggcagcaatgggcaggtggtcttctccctggcctctggcaacatcgcgggggcctttgagatcgtcaccaccaatgactccattggcgaagtgtttgtggccaggcccctggacagagaagagctggatcactacatcctccaggttgtggcttctgaccgaggcacccctccacggaagaaggaccacatcctgcaggtgaccatcctggacatcaatgacaaccctccagtcatcgagagcccctttggatacaatgtcagtgtgaatgagaacgtgggtggaggtactgctgtggtccaggtgagagccactgaccgtgacatcgggatcaacagtgttctgtcctactacatcaccgagggcaacaaggacatggccttccgcatggaccgcatcagcggtgagatcgccacacggcctgccccgcctgaccgcgagcgccagagcttctaccacctggtggccactgtggaggacgagggcaccccaaccctgtcggccaccacgcacgtgtacgtgaccattgtggatgagaatgataacgcgcccatgttccagcagccccactatgaggtgctgctggatgagggcccagacacgctcaacaccagcctcatcaccatccaggcactggacctggatgagggtcccaacggcacagtcacctatgccatcgtcgcaggcaacatcgtcaacaccttccgcatcgacagacacatgggtgtcatcactgctgccaaagagctggactacgagatcagccacggccgctacaccctgatcgtcactgccacagaccagtgccccatcttatcccaccgcctcacctctaccaccacggtgcttgtgaatgtgaatgacatcaacgacaatgtgcctaccttcccccgggactatgagggaccatttgaagtcactgagggccagccggggcccagagtgtggaccttcctggcccatgaccgagactcaggacccaacgggcaggtggagtacagcatcatggatggagaccctctgggggagtttgtgatctctcctgtggagggggtgctaagggtccggaaggacgtggagctggaccgggagaccatcgccttctacaacctgaccatctgtgcccgtgaccgggggatgcccccactcagctccacaatgctggtggggatccgggtgctggacatcaacgacaacgaccctgtgctgctgaacctgcccatgaacatcaccatcagcgagaacagccctgtctccagctttgtcgcccatgtcctggccagtgacgctgacagtggctgcaatgcacgcctcaccttcaacatcactgcgggcaaccgcgagcgggccttcttcatcaatgccacgacagggatcgtcactgtgaaccggcccctggaccgcgagcggatcccagagtacaagctgaccatttctgtgaaggacaacccggagaatccacgcatagccaggagggattatgacttgcttctgatcttcctttctgatgagaatgacaaccaccccctcttcactaaaagcacctaccaggcagaggtgatggaaaactctcccgctggcacccctctcacggtgctcaatgggcccatcctggccctggatgcagaccaagacatctacgccgtggtgacctaccagctgctgggtgcccagagtggcctctttgacatcaacagcagcaccggtgtggtgaccgtgaggtcaggtgtcatcattgaccgggaggcattctcgccacccatcctggagctgctgctgctggctgaggacatcgggctgctcaacagcacggcccacctgctcatcaccatcctggatgacaatgacaaccggcccacctttagccctgccaccctcactgtccatctgctagagaactgcccgcctggattctcagtccttcaagtcacagccacagatgaggacagtggcctcaatggggagctggtctaccgaatagaagctggggctcaggaccgcttcctcattcatctggtcaccggggtcatccgtgttggtaatgccaccatcgacagagaggagcaggagtcctacaggctaacggtggtggccaccgaccggggcaccgttcctctctcgggcacagccattgtcaccattctgatcgatgacatcaatgactcccgccccgagttcctcaaccccatccagacagtgagcgtgctggagtcggctgagccaggcactgtcattgccaatatcacggccattgaccacgacctcaacccaaagctagagtaccacattgtcggcattgtggccaaggacgacactgatcgcctggtgcccaaccaggaggacgcctttgctgtgaatatcaacacaggatctgtaatggtgaagtcccccatgaatcgggagctggttgccacctatgaggtcactctctcagtgattgacaatgccagcgacctaccagagcgctctgtcagtgtgccaaatgccaagctgactgtcaacgtcctggacgtcaatgacaatacgccccagttcaagccctttgggatcacctactacatggagcggatcctggagggggccacccctgggaccacactcattgctgtggcagccgtggaccctgacaagggccttaatgggctggtcacctacaccctgctggacctggtgcccccagggtatgtccagctggaggactcctcggcagggaaggtcattgccaaccggacagtggactacgaggaggtgcactggctcaactttaccgtgagggcctcagacaacgggtccccgccccgggcagctgagatccctgtctacctggaaatcgtggacatcaatgacaacaaccccatctttgaccagccctcctaccaggaggctgtctttgaggatgtgcctgtgggcacaatcatcctgacagtcactgccactgatgctgactcaggcaactttgcactcattgagtacagccttggagatggagagagcaagtttgccatcaaccccaccacgggtgacatctatgtgctgtcttctctggaccgggagaagaaggaccactatatcctgactgccttggccaaagacaaccctggggatgtagccagcaaccgtcgcgaaaattcagtgcaggtggtgatccaagtgctggatgtcaatgactgccggccacagttctccaagccccagttcagcacaagcgtgtatgagaatgagccggcgggcacctcggtcatcaccatgatggccactgaccaggatgaaggtcccaatggagagttgacctactcacttgagggccctggcgtggaggccttccatgtggacatggactcgggcttggtgaccacacagcggccactgcagtcctacgagaagttcagtctgaccgtggtggccacagatggtggagagcccccactctggggcaccaccatgctcctggtggaggtcatcgacgtcaatgacaaccgccctgtctttgtgcgcccacccaacggcaccatcctccacatcagagaggagatcccgctgcgctccaacgtgtacgaggtctacgccacggacaaggatgagggcctcaacggggcggtgcgctacagcttcctgaagactgcgggcaaccgggactgggagttcttcatcatcgacccaatcagcggcctcatccagactgctcagcgcctggaccgcgagtcgcaggcggtgtacagcctcatcttggtggccagcgacctgggccagccagtgccatacgagactatgcagccgctgcaggtggccctggaggacatcgatgacaacgaaccccttttcgtgaggcctccaaaaggcagcccccagtaccagctgctgacagtgcctgagcactcaccacgcggcaccctcgtgggcaacgtgacaggcgcagtggatgcagatgagggccccaacgcgatcgtgtactacttcatcgcagccggcaacgaagagaagaacttccatctgcagcccgatgggtgtctgctggtgctgcgggacctggaccgggagcgagaagccatcttctccttcatcgtcaaggcctccagcaatcgcagctggacacctccccgtggaccctccccaaccctcgacctggttgctgacctcacactgcaggaggtgcgcgttgtgctagaggacatcaacgaccagccaccacgcttcaccaaggctgagtacactgcaggggtggccaccgacgccaaggtgggctcagagttgatccaggtgctggccctggatgcagacattggcaacaacagccttgtcttctacagcattctggccatccactacttccgggcccttgccaacgactctgaagatgtgggccaggtcttcaccatggggagcatggacggcattctgcgcaccttcgacctcttcatggcctacagccccggctacttcgtggtggacattgtggcccgagacctggcaggccacaacgacacggccatcatcggcatctacatcctgagggacgaccagcgcgtcaagatcgtcattaacgagatccccgaccgtgtgcgcggcttcgaggaggagttcatccacctgctctccaacatcactggggccattgtcaatactgacaatgtgcagttccatgtggacaagaagggccgggtgaactttgcgcagacagaactgcttatccacgtggtgaaccgcgataccaaccgcatcctggacgtggaccgggtgatccagatgatcgatgagaacaaggagcagctacggaatcttttccggaactacaacgtcctggacgtgcagcctgccatctctgtccggctgccggatgacatgtctgccctgcagatggcgatcatcgtcctggctatcctcctgttcctggccgccatgctctttgtcctcatgaactggtactacaggactgtacacaagaggaagctcaaggccattgtggctggctcagctgggaatcgtggcttcatcgacatcatggacatgcctaacaccaacaagtactcctttgatggagccaaccctgtgtggctggatcccttctgtcggaacctggagctggccgcccaggcggagcatgaggatgacctaccggagaacctgagtgagatcgccgacctgtggaacagccccacgcgcacccatggaacttttgggcgtgagccagcagctgtcaagcctgatgatgaccgatacctgcgggctgccatccaggagtatgacaacattgccaagctgggccagatcattcgtgaggggccaatcaagctgatacagactgagctggacgaggagccaggagaccacagcccagggcagggtagcctgcgcttccgccacaagccaccagtggagctcaaggggcccgatgggatccatgtggtgcacggcagcacgggcacgctgctggccaccgacctcaacagcctgcccgaggaagaccagaagggcctgggccgctcgctggagacgctgaccgctgccgaggccactgccttcgagcgcaacgcccgcacagaatccgccaaatccacacccctgcacaaacttcgcgacgtgatcatggagacccccctggagatcacagagctgtgactagacagggaagccttgtgggtgtgagcagcacccatccaccgtcccctcccagggagcaagggcagggacagggccggtcgggggggaccctccaaggccaggccttggggacaaccttggcttggccctggcagcccgcatcagctgctcagatcccacttttgccagacgctcattcagcatctgacctctaccttcataagatctgttatttttataagaaaaccaaacaaaaatgttaagcatctaaggacaaggtaaggagggtcactggggcccaagagtctggggaccagcttggctcaggctgagctgaaagaggccaaacaggccctcctccctcccagctccaccccgcaagcaccatcccctccggctaagcaggcgcaagggaggcccagcgcggacatcccctgctggccggacacccgactccagtccaagtctcgctacatttccgccacatccctctctgctggacgtccaggtggaggtggcatccccacgtggacaagaaagtcaatgtcaatgaacaagcattctctccatttcactggcttcccaaatgtgtgcccagcttataaacagaagtgactgatgttccctccggttttgaatgtggagtgtttgtgtgtgttccttttttaaattaagttattccctc
